United States Patent Application Publication US 2014/0057251 A1 - sequence listing, part 182

SEQ ID NO: 377668 - DNA, 10426 bp, Cannabis indica
tggtccttaaatccgttttagtggaaagttcaacgataacttgcgatgacgtgtaaattctgaggtagagaaaagcctccagaataatcttcctcgcggggagtcgctttaaggggtatacatacaagtgatctcatagggttccgaaaaccatcccatcccaacatgtgatatcaggatctaatagaagccaaaaccactatatccattaaggattagctagaatgaggcaaatactaccactaatcccaactagtctttgaagtatcttttcagagaaagaatcgctccagcacgtatgtgtttagcactccaagtcccgattttacagaaccgctcatactatactctaagtcatttgtaaggcgaccaggtggaaagcaacttgtaatattctggaaaccaaattatgaataattaagatttattatacattatggaatgattaggtagtatgcgaaggattatgatcccgctaacctaatttagcataaattataaatttttgaaatatgtggatataatgtaagttaattgtgagacaaaaatatttttagtttcggcgatcctggagactcaattggaggccaaaaatatcacaacgatattagttatcaatattgttgggattattgagacaagcagattttaaaattatcgaagtattttggggtactcggagttaaccaaatgtcttagaattagagatttcttagtggctaagaaataataagataaatattaataataaagtttttattaatattatattattatattattattactattatatcttttttaaattgataaaatttattagtttatatatattaagttcataaacagtacgtacgaacgaaaccctcctcaaccattcgaatgaaaccctcatccccttctattcatatttttttgatttttgacccgaaacctagtaattcaagcttaagtagtagcaggatagtaaattattgaagaggaagagcttaaagtaaggattggtttcgttttaaattaaatacgattggttttatatagtgactttgtgatttagaattcatacgaagattttgattttatagaattgttctttggtagccatgggactagcttcgatgtttacttattgaatttgaggtgattttgagttagaaatcgagtttagaattttctaaagcttaagtttgaatgttaattgagtttttcattgaagggctcaattttaatttttgtaacataagggtggtagtatttatgatatatatgtgccctgtgaagtttggagtgatttgaacaggtttcggtagtatttcggtgagtgcaaaacttaaaaatcgtgactcttagccacatgccaaactggtccactggttgtgaaccaattaactggttatggtggaagcggttaacctcccaacccgttaactgtttctaggcagtctcgggaaattagaaatcgtattttcgccataacttttcacttgagtgtccgttttagacattctatacgaagcttgccataatctcaaccatatggtttatgttttagagccaaactataagttttattttagtgtatttatactatggttttggtaggaaaccctaagttgtcctttgtaactgttaattagtattttaggataaacacttattggtttaccattgttgtgacataggaccaagaccatcggggatatttctccacttgggttggccgacatgcatggatttggatcaaagaggtaagaaagaaaagtataatgtatcacatgacatgacaagtttcgtaattatcgatcgtctgattaggcaatgaaaatttgaatgcgacaagctcacctgattaggtgaagggatatatgaatgtcaaactatggcatgagtttgcctaattgtgcaatgtggcataagaatgccaaattttggtatgcgtttgcctgattgtgtgcgacataagaatgatagactaagacatgggcttgcctaattaggaaatgtgatatacaagtggacttgattaggtgatgtgatatgtggatgccaagttatggcatagactgaaaccattgttaggtttcttcctggcagcgtaccttattaggtacgggtggcagtgacatatgagtgacagtctatgggatagaccaaagccattcttaggtttcttcttgacggcgtaccttattaggtacaggtggcagtgacatgttgatgtcaggttatggcatagactaaaaccgttgttaggtgtcttcctggcggtgtaccttattaggtacaaatggtagtgacatgtgagtactaggctatggtacgggctcgcctggttacgcgatatgatatattagtaccatgttgaggcccagactcgtctggttagacgaagtgatacattgatgctagattatggcacgggctcatctgattagttgatgcagcgacattatatataatgccaaattatgatatggaattgcttgattaggcaatgcaatatatgattacttttatttccatgcatatgattgattatgatatccacttttgaatgttattactaaatccttccatattagtgagataaataattggttattccatgtgtttactgagtttttcggaaactaaataattataacttaagagcgctaaagatattaaataatagacaagaaaatattttttacgtggttcaaacgttaatgatccttgtccacgagtcaacagtactagcctctttgggcgtgtgttttgacattacaagtgtttacaaatatgctctatgtattcctcttatttctctcttaggaggaagctctctaggaattttagtagagtaactgtaaatgagaaattgttctccccttgctcaaagataatatgagtatttatagacacatatggggtaaagggcattccctttacctacccagggtttccttacctacacgctaccaaggctgataatactagaagacaatctgaccatcagttgaggagaaccttctatatcgtgtggcgtataactgtagtaagggattttgtacaacccaagacatgtgtcacgcaaaggtccctcctttgcaatacactctctattcagactattgggcaaaaggtatgtcttgcggtgcgtatgcacactaccatgccctggcatgaggggacaatatctgatttgatgtcaggacatagtgtaaccatctatagcgcaatttttttgtgatattgacgtggttagtacccttgaaactgctattccactctaggttcattacttaaggaagtttcatccaggagtcttctgttttaaccatcttttgaattggaaagggttttttttcttgcaaatgacttgccttatcaggcgtttaacgaacacttccaggattgccgagatgttctctctgggataccgtatgggctaatttgattaatcctttccgctaatacactttgtcctttaatcataacacgtgtctcatgcacgaaaacttggataacatttactccccaagcttttgaaactcctcgagttctcggagcttgccatcttttctcggtactagctaatgacacgtgctgatgttttaggtcaaggatacatcttcctcaagggcggtatcctattaagggtgaatgagacatctttcttttgtgctgcccaagtaaccctttgaaggtctcacgtggcccttgtggcacgtggcgaggcgcatatggaaaaagaggtggtggcaactaacgactgaatgaaggggcccatcgtcatgtcttagtgggcccgagactaattatatcatacctcttatctccctaactgttggatccactacagagtctgaatcattgatcttgtaggggccagatttctttttgaaatataaactgccctcaatagcattctttttacttctttcacatgaaggttcatatttctctctgtaatttctctcttcaccagccaacttcttgcatgcaagaggagttagaaatttcaatccaaaaactactatgcatccatgcaaggctttttcctatcatcaaacctctccgactcgatcaaccaaaatcctcgttaggtgaagcgtttgatttttaggctagctgtgaccaatgcatcgactagctatggagcttttaggccaactactttaatgtgtaactcttccctccctattagacaagtaagtacgctaacccgctatccgaacctcttacatctcacgtctagggtagaaatttttgttcaagttagggctaggactgcctttgtgccgaccattgggatagagtgtgggagagaacctttgccctgataatcattttttgtgagattaaatcgactaggatgttaatctggtgactattttccctccatctatcagccatttaaagaaatttactttttctttccttttttgtggtagtaactatggacttgaaccaggaccttcccgcaagcatgattgctcctactgagggtgtacttatctctcctactgaaagagtttttgcgtgacaagatcaaattgtagtccctgcagtggcacctcatcctaaggaggccttggataccactcccaaaaatgaaaccactgctgagaaggaccttcctgtgaaaactagaaaagggaaggggttcaagactcctccacctgctcaggctcataatgactccatttgagaaatggatcaaaaagacaattgcttccaatcttatgggatgttgcaagcttatacgacgttgccggccttcacaatgttcctggattaatgtggcacagactttctattataggagaatttgcttccatcagtacaaagagatttagtgcatggagctggtctcacatttttagtggccctcacctccctctgaggactttttttgcgaacctagttgaaaaaattgggattactccttttcagctgatcccctcgtcatacaggctcttaacagggtggtattttgtaagatgaacaacctagcagccccttctttggaggaaattccttacttttacagtgcaaaagctaatccaatgaggatggacatgaaaaagctggggttttacaagttagataagcgtccaaattcttattgtcccatttgccacacgaaccgtactcacaacctccatgaatactggtttttctcctccaagtttcctaccaagagggtgccatctctacgcctaagtttccatcttcgaggtattcttactttttaacttaattcctgtttgggtccgattctgctacatttttatagtttcactaatgtgcatgatattcagtagaactccctccccagagcactaggacaaaagagatagctaaaaaggaggctcaatacagggcctcctccgaagatcaacttaaagttgagggcttagtgacgaccaaacttcttcgtaggctagtctgattataaagttttgtcaacttctgagggcaacgttaacctccaaaggaggggaaagaggtcattttcgctgagttggctgctatcatcactgaggcagctagaaatgacaacacattgaaatctcattggttgtcacaccatctcgatcctttgtcagaggaggaagagattttagtgaggttcgttgccgcgtaccccgatgtggggactctgggagctagtacttcgagaagaggtaatagactcttctgcattcttcgtaccgccagtctataccacatgtcccaagggaatcatggaggatttgaaaaaaaatttcttaggcataaactgtcgtagataccccatgaaggattacatagataaagtagatcaaatcgttaggagccttaagaatccaggagcacttccagacactattacagtggaccctttaatgtgtatgtctctacccaactttgaggaatctggtagctttcttggtcatgggggaatagctgcttttgcttgtgggcaatcttatagcgtctcactaaatggctgcactcatgcacgagcctctttagtagatttctcattttgctgtcattatttcctttagtgagatcgatcagttttgtggttcttatttgcatatattgttgttttatgtgcaggtactccagagttcaaaatgttgaaatctttgggtagtcaaatcaacgctgctctggccaaggctaagaaaagtcagggaggaggtaaggggaagtctaagacctgggcttccaggatccaaaagccacgccttccctctacctcttcatcatttgatataaggcagatcactcctcccaccaaggttgtatctctagtaccgggctcttcaactctggtaggtggtaggaaagagacccctgcctcttgggaggcttttgaagtgccagtcgctccaggagagcgaacctcgaaagaagttttgcctatggatggagtaatttgtgacattgtgccaaacataggggattctgatgacaacctggatgggtcgtttctctctcaaatgaggcttttaccaagtccaagcgcaacggatcaagctcttccccgagtcacagtgccaagaagatcaagtctttggtcccgaacttgacggcacataacaaatcctccattgcaccactcccaatccaacaacaatagcattagcgacaacaaacacaacaccaacgacaacaactgcgacaaccacaacaccaataacaccctcaatagcaacaacaactacaacaatcacaaaaacaatcggttttgtctccctactagctccaaatagtgccatcgcagtctacttcacgccagtctcagttaccagcctctcaacatcatcttaagggttcaactcctaagtctacctctagtgacccaactcagcgcacgactttggggaagattcctcaactgggattttctttccccatgaggcctcctgttctgggtcaggactaccttaccaaagtgggtaatctactaccaccttaaagaggcatcatgagagtgaacatgtgatgctccaaaaatgggccaaccggttgtcttccatcaagacagctgagattacagaaggaattcatctaccctcctcacctagcctggtgttggacatggctatggtgagtcagaccttagtgcctaaagctgcagagtcgtagctctttttgctacggagatgttggatagtgtgtttcttagcatgagtgagctcaggttcaaaaaatgggttgtaagcagtagtgttgacccatacactttattagtggccaccaaacaacaggcagcaggagtaagcctcaaccttctaaaaaaaatttctttttgctataacacctaagtattgaaggtcatttaactttctacttcttcatcagatgggtttatttacggagacgacagccaaagaagtgggcaacatgactattgaactgagtcgtcttcgcgccaaagttcaatccttaacatctaaaaatggggccttacacgcaaaagttgagcaaatccaaacccaggctacacttgacattaagaagggcaaagaagactgtgatgccaagctggtggttaaagagaaagaaatagactccaagtactaaaaactatatcttgaacacaaggcctaggctatgaaaaaggttgaggagactatacgttcccttcaagaagagttaggccagaccaaggtggcactttgtctttcccatgaggagaaagataaagctgaggcccgggtgatgctctagtctgcaactatcactgcccaaatccaagaagttaacaccctctagggagacatccaacaaaaggacctacttatccagggtttgcatgatgattataactaagagaagaaatagaaggaatcttggatgaccaagtacaacaatctagacgtgctctttcaaggagtttgcaataccagtaaccttcgtcaagagactatcaaaaaattccaaaaggaagctgaacgacgactggtgaacggtgtgaaagcatacattgccctggctgctatgcaaagaatgagagagactgcctacagaccattctggacactctcactaaagaatctaaggcggaagccaaggtagagagatactgccttcgttccctagagagggcttacgccatggtcatttataacttatggaaagttgatcttaccatactccggcttcttggtgatgaagagagagaagatactaccaagagagtgcttgccatacagcgcgacacatatcttcaggaatttttccttaccattgagagcgacgaggagtcagacgatgaagtcttaagtcctcaaggccttgcggaagttaaggcatcctctgggcggctggaaaggggtttttccaagatgtagttgagtctaatccagatcttccacggaagatagttggtgactcagtccaagtcgacttaacggtccattctcccactcaagaccaatagggaccacttccgttcttcattatctatctcttttcttaagacattttagtttctttttttgcagagttgttttttattttttcctagtctgtggggctgtgtatgacaatcatcttttgtgcaggaacaacttaatttgccttgtcgtgaggcattgttacagacattcatgttttgtccaacttttgatttttcagttttaagtctttacgtgtcatcctgttaggtcattttaaaggttattttctttggttgttttagaaacgtgtggttccaatgatcactacttcaaaccttggatttcgctcgacctccaacccttctccctacttcctattttcaagtagggtggtcttggccttggccctttataaagtctccaaacttaagcagactaaaaaattttacaatgcaaataaacaacacgaataagccttttagactgttcccggaccactgcatggttgcggagcctcaactacttaagcttctttacaatttttggagaccggttttacacgctatgaactttagacgatatctcttagttatgatatagttgaagtccataggagttcaagcaaggcctttccattttaataattttaaattttaagcaacacttcaaaactttgaagaaagaattcaggcaagttcttcccttttctgggaattttggctgaaaaataattctattttcaaaatatgcatttgttttagctttaagaagggattcaagtgttatttcttttaaggaatttggttgaaaacacaccttgctctaagctttaatatgagttatagaactcgtgtatgttaataaacaaaataattaattgtggcacactgtacattttttaggggcatacacagttaggcatggtaccccccccccctcccaagtgagatgagaagtgtggatgtctccaacttcgtggtcacttgtttaaaacatagagtgtggcccaataaaaatataaagtgtaaactcaaatgtaaactatttttatcctcatttcattgtgcccaagggctattcacacaagggttatttaccgagttttttggaaactaaatatttataacataagaaagttaaagatattaaataatagacaagaagatttttatgtgattcaagcgttaatgatccttagtccacgagttagtagtattagcctctttgggcgtgtgttttgacattacaagtaattacaaatatgctctatgtattcctcttatttctctcttaggaggaagctctctaggaattttagcagagtaactgtaaacgaaaaattgttctccccttgcccaaagaaaataggagtatttatagacacacatggggtgaagggcattcattttacctacctagggtttcgtaccctacacgctaccaaggctgatatactagaagatgatttgaccatcgattgaggagaaccttcttcattgtgtggcgtacagttgcaataagagattttgtataacccaagacatgtgtcatgcaaaggtcctcctttgcaatatactctctattcaaactattgggcaaaaggtatgtcctacggtgcgtatgcacactaccatggcctggcatgaggggagaagatctgatctgatgttagaaaaaggtgtaaccatctatagagcgatttttgtgtgatgctgacgtagtccgtacccttgaaatcgctattgcgctccaagttcattacttaaggaagtttcatctgggagtcttctgttttaaccatcttccaaatgcgggaggggtttctttcgcgcgaatgacttgccttatcatgtatcgaacgaacacttccaagattgtcaagatgttctctctgggataccctatgggttaatttgattaatccttttcgctaatacactttgtcctttaatcaggctacgtgtctcatgcataaaaacttggataacaccatgtattatcttttattacttttcttgctgagtccttgtgactcacgggtg

SEQ ID NO: 377669 - DNA, 5109 bp, Cannabis indica
cgtcttctcttcaaagtttttcattctttacgtttttcccaattagggtactgtgtttttctgtttggttcctgagaaatctctgattagggggaaacctgctgattcggtggacttcagttgattttgcagcgtttttttctcttgggggggttttgtccgatcattaatggtcaatgtaggtcaatgttgttccgattagggttttgattcctcatctgaaattggggatttggggtttgttgttgttggaagaaggttgatttgctttcgttgaaattttctgtaacctcatttttggaggattgcgttgaaaaaagattgaatttttttttttctgatttcgaattgggtatttcggattttccatctacttcggttgattttgatctgatgcttggtttgggatgtgtatttagttcttttggcgatttttttggctcaaaaagataggattttttttctttggatagatttggggcattgttgttggctggatatgaggttatgctcaaataaagactagattgggcataaatcattgaaaaagttagccattattaggctttggatcgaggtgttgttgaggttggattgatcatggagcatgtgattggtaacaggtttaagcttggaaggaaaattggtagcggttcatttggagagctttatctaggtatgcttgtcaatgatgtggtaaagttactcaatttcttttggggttttgatttttgtttactgcattgtgtttgtttgttgatttattatcattctgaaaaattgctcctttttctcgggtaggtgttaatgttcaaacaggagaggaggttgctgtgaagctggtatgtcacttgtttggtttacttagctttatacattggtataagtatttgtatatttatatatatatacttagcttttatagtgtattgggttatcttgagctttatcatgtgtctaaacatggttttcagttggatatggatatggaaatggattgtattgcttttaaattttcagtatgctatattgattttggtagtagagctcagctactgaagatttgtcaaaatcacatatacttagactgaaaagactatagatcttgttttgttattatcactaagacacttaagattttgaattcatattatagaatcttcattgtagaagaaaagactgaatctttatacatagtgttattctcttaaattttaaatattggatgcttcttttactttcctctaattcaatgtgtaacctttcaaattatggaaaaaacttaaactttatgtatccttaatttcaggaacctacgaagacgaaacatccccagcttcactatgaatcgaaattgtatatgcttttacaaggaggaagtaagatctctttatctatttcattacatgtttttttcagtggtcagatagttttatttagtttttgggagtggaatttgtgagctaggcttcttaaatgaacaatgtttgttattcgagttcggataataataaaattagtttgatattatcttggattattttgtttttttaatatacttttattttcttcttttgaagctggagttcctcatatcaaatggtttggagttgaaggagagtacaatgttatggttattgaccttcttggaccaagtttagaagatttatttaattattgcaataggaaattgacattgaagactgtattgatgctcgccgatcaattggtatgttattgagatcgcttttgttaagaattgctatcgattattgaagtctcaagctaatatgattcctcttcgttatgtaactttgcttttcagatcaacagagttgaatacatgcattcaagaggttttcttcatcgtgacataaagcctgacaacttcctaatgggtttaggacgcaaagccaatcaggtaatctggtcttccgagtatagcgatttatctcacattcattcatttatgactctcaattgtaatggtttggtaaactaaagtaaattctttaacagaggacattcaaaatgtataaattgtttccctgagatattgtttcttctcgtttcatgtagaatcactgtatttagattttctgtatattacaattgtccgagttattcttcttcaggtatacatcattgattatggccttgcaaagaagtatagggatcttcagactcataagcacataccttacaggtatatttcgatatgttaggccatggttggatagtgtgttagtgcttatgtatgtcttaaggttgacaaatccaacactgagacttctttttcttttatgtggtttcgattttctttagttttctttcttcccctacaatttgatggggttatttattttaaaaagtaactatcggaacagttttctttataaaattagagagaaagagtgaggtttgatcctaacagttatttcttctttaccgttcggtgttcttaggtttatggttcaacatctgttgtaatagctaaccattttcccccccctttttttttctcatctttcagagagaacaagaacctcacaggcacagctcgctatgcaagtgtcaatactcaccttggaatcggttagtatgtatatactatcaccgtatcacgtgtgaacgaccgctatttaagttttcaggaattaccttttattcaattttttgttgttaatgttttgcagaacaaagcagaagggatgatttggaatctcttggttatgtacttatgtattttctgagaggaaggtaggaaactactctatcctcaccacatacatatatatattttcgatatttgatacccatcgagtacaatttattcatcatcatttgttatttactttatttccctttttcttcatcagccttccttggcagggattaaaagctggcacaaaaaaacaaaaatatgataagattagcgaaaagaaggtgtcaactcccatcgaggtattgcaacttatgccatgttttatcttagttgacatagcttttggcaacgttactcgttgaaaatatataattatatagctctgggaatgtactacaggtgctgtgcaagtcatatccatcagagtttgtgtcttattttcactactgtcgttcattgcggtttgaagataaaccggattattcatatttgaagagactcttcagagacctatttattcgggaaggtaatccatcgaattcatctaacctgttcttatagtttgtgaatatttatataaatctgttgtttacctaaactgttacaactgcaggttatcaatttgattatgtgtttgactggaccgtattgaagtatccccagattggtgccagctctaaaggacgggttagtattgaaccttgttgagttttgtttcgtaggaacgtttacttattaagttcttgtttatgttttagcatgtcagtggaaaacccggtttgcacgctggaccatctgtagaaagaccagaaagaacctcaggtttgctctgtttgaattcaaatgttcgggcattagattcttttaccgtcggtggacttagttgataaggtatttgatattattgactatttttttctttttctttttttaatagttgggaaagagatccgagaaagattctcgggtgcagttgaagtattttccaggagacatgtctcgggttctagtccgcgaaatgatcaaccaaagtacaggactcatgaagaagtaccttcatcgaaagatgtggtaataaaacttttgttcatggtttcattattttcaacttttttaagattgttggtcaaatcttctaatggaaagctcttggtttaatttcttcttccagcgccctgattcagaaagagcacgtagttcttctcgatatggaagcacatcaagaaaagctgtaatctcaagtagcaaaccgagctcttcagccgaccacagtgatggtcgaaatggtcgtgtagtctcaagtagtggtcgcccttcaaccacacaaaggattctgctatcacgcagcggaggagctggaagaggcacccgagatgatcctctccgaagctttgaactcctttccatcagaaagtaatattattcgggccgaaagggagtctctgttgttatctactactaaaagaacaatttctttgctcatctcatggatacatatttaccaccccttctatatgtgatgaactacttgatttttttcttttttctctttttaactatcaaattcatggtaaatggggggttgttgtgtcttctaatcgccgccacggttacatacaacggaaaataccatgtcgtatatcgattctcccccatgcattttcattctcacttttttctcaatgtgaaaaaaaaaagctcttggctttggtaatgggtgtcttgatatgtatccatccccctttgtagcagagaatttccttttttttttctgttgtatgagaattattttgttgacttgaaataatgacttatcttcattatacttccatcttttgaattgagaccaaccatggttgagtacttgagttgattatgtatgtacttgttttaagctatttatgtattttttttctttttgcaaaacttgtaccctggtgtgtgatcttcccggtcggtcctcgaaaaattatgcgtatggagagctacttatgactgaacgcagaggcccgaaactcggttcaccggttaattcgtccggcctaaacccggtgcagccctagagctacttccccggtgaagcaagtattgtagtatggtagggttgtacttagccattccaacgcctaaaatggaaagatttcgaaacttgtattagaaaaacgtccttaatttactgagagtttttttcactgcaaacaccattctaaggttactgatagttttactcatttgtttcataattatcttttgctcaaaagtttcaaccatacacttgtgtagctaacaaatttctagtgttaacaataccccttccttttgatttagatttctaactactgaaatggacaagacattctagtgggaaaataaaattgggaaaaagggatttaagtggcaagaattatcatttcattctagtataataataatatatatatata

SEQ ID NO: 377670 - DNA, 3722 bp, Cannabis indica
ttatacattttgttgaacgatctacaaataaggctacccactatttagcgcgtggctcttatttttcctctagtcatgttgttcaagagcatgaattacctcctgaattgcgtgctattgtaatagatgaaatatatataaaagtttacttttattcaaaaaaaaaaaaatttaacagagtattacaatataatcttatcaacaaaatattatgttcaagccattgtccttctttcttattttgacacattcaagtattatgaaatgtcttttataattaccactgttataaagaaaattttataattatatatatatattaggttgcagcacgtacaatcagttttttttaattagatttaattagttgatgttaagtgtaatacatgtatgttaaattttttttaattaggtaatgtatttttatttttaaatatatataattaaattaattttttttaatataaatatctgcataatttttatttttaaatatatagaataatattataaaattaataaagaatattcactttaagtaaagttaaataattaagatatttgttaaaattaacttaaatcaaaaattctattacataatcactttataaagaatatatatataaaaacaaaaaaaaaactactactcttatctatttttatcttatatttatttgcgttggtatcaaaatgggaaaaataagaggttcattgagacgtaaagacaataagcattaagacagaactacaaacaaacaacaacgggagacaaacttaacaaaagcaaacaaaacaaaaggaaaaaagcacgcaaagcttactaaccctcctcacgcataaaatcttgaacaaataaattaggctacactttttttttttgttactattattaaaaacaaaaaaacaatataatctgtctagtgctctgtctgtgacactgaggtttgaggctttatttttgtgctccctgtgataactgataaaacgattgataattgccaaaaatgaaaaaataaaataaaataaaataaaaaaagatgtttatatgtttatatattacaatgtataacttgtgattctaactcacgaactcaaatagttgtcacttgaagttggaaaggtctgaaggaaccttttctttaacggtgttttgaaatggtgccaccaaaactaccaagaatttggagcaacaagacacttattttgcaatttgaagtactaattaaaaattcaaatggattatcattagattctagcttaacagtcaagggtttatagtttgtacattatataagagaatcccataaaagaatgacaaatttgttgaccacattgtatttttttggtgcttgaagaatacaaatagaaacgaatgaattgtcactagcttccactttttcattatgttggtggaattgttaccagagcaactatggaattttgcattttggctgctttatgagtgcttttaattaatagatcactttatcattcatggtcctctttcgaatttttaaggtccgaatataatgtcacactgcacaaatgtaccaaatggtggccatgtaacttgtctttttcctgtaaccgacgtctaaccgtatgggaaaaatagcctcacattcaatgaaaaataggaccacacaccactattctaaagtttaatttatatttagagtatgttataaaacaaattatgtctttccttaagaaatgtaacatttcattgggaacccttaatttttcatctaatcaataaaaaacagatagaagcctagatagattcctcaacaaagacaatccctctcatttttaatattagaatatcttggtttgctcaatgcacctaactctagttgtagtccacgatatatatatggctaatgaaaccccatattttaactttttcacttactcgatggatgagatgagtgagcaatgttactatacttataaaagctgattagtgacagaatatttatattatactttgctgctttttacacaccaaaaggatttgggtgcccagtcttattctatttagaccagtagtgtggcatggcatggtgttgaggctgtggaaatatgtgtatcttaatatacatttatactctttattatgaacatgacatagtttattcaattatttatttcatcttcctatattaagacttttccttaaaaagtagcttggattcgagttttattaattctttccttcagggtttcatctttatggaacttttttaaattctttggtgatagacaacaaggcatcttttttctacttaagacaatgccatgaatgacttttcaattctcattttttcttttcttcttctttttttttttcctaataccatgcttatatatactttagagttcatgtcacatgaaccacttggggctagctcaagtggtcataggtgggtgtgtgggtgttggaggtcctggattcgagcccaaataaaacatgttgtaatatataaaaaaaaaaaaaaaaagttcatgtcacatggggccacgaaaagaagtgaaaagggctgcacacagtagtatagcagtatagtacaatacattttctttggttcttttagtgcaccgatcagtatggtcattctctattcattttaatttggtgcttttttccctccatttcatgattgtgtgtatacgtatatattaataagcactgtcacgtgtacacaaatatattctcatataacatgtcaacattgctcctatattatatattgtatatatacatagtgatccctttcaaagaagaaaagggaaaaatatacacataatgattaatattgatctataaatcatttagaaaactttatatatgaggaccaaccccagccagaggattttaagaattttattaaagaattttttataaagtttgcccactttaatttttatgagtttttttgcggcaaaatattctcaactgtcgtttcacttgtatttaactctttaaacttaaattttggcgataaaactctccaaacagctgaactagtaaaaaaattaaggtgtcattcgattaactgtcattataggctatttatgtgtacacgcttgtatacatgacacgtttatattggtatacctaataatattattattttcaaaattcattttaaaattatgaaaaataaaaataaaatatttaaaaaataaaaaataatatacattttgacataacttttatatttttaatatataatattaggtgtacaaatataattttgacacatgtataaaagtatacacataagcagtttatattggaaattaactgttaaaaatagatgacactttaaatttgaaggcagttcagtagttttaaaggttttaccgtcaaaagtagagtttagagagttaagtacaacttgagtgatagttgagagaatttaaccgcaaaaaaattctttttataactatttcgtctagaccaacgaaccggtggctcaacctttaatgtgctattaatattatgagtgctagaggtcttaatcttagattctaatttaggtgtttcctttgggaggtttaaaaaatgtgatgccggcttagtccctaattctttactttaggtctgtttggcatgtaagattagactaaattaattattttaaattaaaaaataattacataagacattattttttgtaaaaaaaaattaatatttttacgtttacagaattttt

SEQ ID NO: 377671 - DNA, 9680 bp, Cannabis indica
ttcaaaattgtctaatatgtacttcctaaccatttctcaccattacaattatattttcactaattttgttttttcaattttgtatatgcacaaggtcatttggggtttatagggtcgtttaggtttatcaagacaaaccaatatgtacttcccaatcatttctttccattgaaattaagttttcactaatttcatcattttatttttgtatttttgtgtatgcacaaagtcattttgagtatattacgctgtttactattcttttatttataaaaaattattattttttttggtcttgcttcaaagcagtctagtatatactttcacaccatatctcgccattgaaattaagtatttactaatcttgtttttcaattttgtgtatccacaaggtcatttcggtatatgttgccttcttttaagttatttttttttaaataatcttttttccttctggttgtacttcaaaattttccaataagtattttccaactatctctcaccattgaaattaacttttcactaatctcctttttcagttttgtgtatgcacgaggtcatttgggctatattaggtcatttgttaattttttttactcttttatcctttttgttatgcttcaaaatagttagataaatacttccatgtcatctctcctcattgaaattaattttaaaccaatcccatttttcaattttgtatatacatgcatgagatcatttgaggtacattagacaacttgttaattttttcaaagaaaaattaaatcttgtttccttttaattttgcttcaagacaattcaatatgtacttctcaatcatctctcaccattgaaattaagttttttctaattgaattttttcagttttgtatatgcagagtttgttttggggtatattaggccatttgttaattattattttttttttaaaacaaatagtcttttttgctttaaatctgtctaatatgtacttcccaaccatctcacgccttggaattaagttttctctaataattttttcagttttgtgtatgcactaggtcatttagggtatattaagctattttctaatttcgttttaaaaaattaatattttataaatccttaatattattatagataaatacttggaagataggatattagagttgcaaaaatccaatgtgacttgttgaaatgactgttaggtttatacctaagtttcaaactccctcctttctttccttctaatatctttgtcacaaaacatagaaaaagtgtcttgacatatttttataaaatggaagagaaaaaggatattagatggttttgtatctccatcttcatctcctccaacacctccttctccacttcccattagtgtgggacccggaaaccaaaaatacttcttctcaccctctccatctttatcgccacctttctcaccaccgccttcttcaagtcatgactccacggagcttcttcaccttttgcaggaagagaagaagttacctagtctcagagcccgttctgcattctcgttggatcttgtagatcccgacattttggattctaaaagctcatgccttaaagacttgtaagtaacatcttttctatctcactaaagaattgaaatgacactaagagagcaaatgttatgaatgatttagttcagagtcttgttttggaatgtaaatgccacttcctcattgagaagcattagtcttaagtctttacatatgtttttgcatcaatagaaaagagaataatagtaagtttcaattcaaagcatgcacctatccatcagtcaaactaattttaagtcaaacacataacaaaacaacatatagaagagaacaatctttctctaaagactggtgggctgatatcaacaatcaactgccttgaacacttcaaaattaacaactaaattaaatatgaatatttttctgtgttgttgaaaacaggttagaatggtttatagaaagatgctgcaacatttgctgtaataagtctacttgacaatgattcaagaagaaggctactatgaagaaaaagctattctgccaatggattctaaaaccaccaatcacttctaactttactaactcagcaaaaagaacaagagatgaatctcaaggcatttgaaattagcaattcttttcttcttcttcttcttaatttttgtaatttacaccaaggaatgaatgatgatatcttcatctgaaaatgcaatgtagaaattattcttaatactgttatttgcatcaatgaattaacatgtttcagattagccaacccaaaagaatcaaaccataaagttcatgaaacagcagattaacacaattctaaagtctaggtagtattcatccatggcatagtttatattaataagaaataatattgatgagtgattagcaacttaaggctatctaccatgacgtgtcacattaagtaaagtaaattttgctgttattaattcatacattatggaaaacacgaaagatgtgcaaaatcatacagaaattttgtaaattagaaactttagcttaatttacacatacaaagtttgcttcaacaaacgaggcttctttgtatcaacccgaatcgtcggaatcatcagagtcgcttctgtcaggctctccggcatttgtaccagcatctggaacatcgtcaggttgtgctaccggtgaaggagcagatgatttcttattagcatcacgagcatatctctctccgtttttctctggtctagccacttcaacatgtgctatactttgtcaaggaatagttaatcagaaagacatgaaaaacgaataacaatacaaaatccataagatataacattaaataaaaggatatcaacagtttcagtatgtccaccggccgagatattgagcaaatcatcctctacccgacgcacaagctcaggctgaaaatgaagaaaattgaatcagcaaagagcatgaatagcattgaaaaagttgcataatgtaaattaagggggcaacaagagaagagattcatacatttagatccggctcccttcggaatcttctctttcttgcatctctcataggaggtgtgagaccatgcctgtactccactgcatctggagcaggatcatctggttctctaaccataatcatctgttcatacaggcaccttaaaaagttcatacaaaggccttaaaaagaaagaaagaacaaactgtgtctgggactgagactgactactgtacctgaccaacatctgctgtcttgattaggacactatcatcataagttttgtaggactccacaacacaagggagatccaatagagatgcagggaaattctcatttccaatcacaaatgtgccagtcctaccatcatctgcaccaaacaattaagttgaaattgtaaaactacaaacaatgagctcaatctgctgtcacattgcgccttcttctacgactgcaagagaatcgtggaggctttctagggtgaggagaattccttcatggagactttaaatcgtttcttgtaatttgtttcagttactagaagtggtggattgtaatgtgttttggtgtaacctagagtctaacaaaggctgctcatgatctggataaatggggctcctcaagctcagtttcgggttttgtaagtttttgggaggtgaatccccatgtgttcaccaacattttagcttctttccaataaatttgaagaatttcagcaaaaaaatgacacccatttactaaagctaatcccttgattaaaacaacaacataaggtggactatggagccattgttctataatcatgataatgggttttcaccaaaaaaaagtgttgaataaagaccaaattcaacacataattttatcaagaaaagttaaatatgttttacctttttaattcatttcaggggaattgaactctaaatcactcactcacccaatctaatacaacttgagatagccctaaagttgataaaagaagctagctttatagctttatgtgttctttgagcagataaaaattggggaaaacaatctgaaacagtattacatattttatcaacttgattagaaaaagaagcaggaatcttttgtttgattgtaaagatgaatactttatagaaagaagattgagattattgtaattaccggtaaaagacaaatccagtgatggtgaggagttggggtcagaagaagaggaggaaggatcttcattgagaagacgttcaatacgctctgcaacagatggtggaaccctaagaatgaattgctcctccattcaattcaattcaattcaaattcaattcaatcaatcaaatatatgaaggaatgaaattgttgggtcttttctgacctataaacaatgaacatgtattattaccaaaatacccctagaagaaagaagacaattttaccaaaatacccctcattctttagaagaaagaagacaattttaccgaagccagtaaacatttttatcatcatcatcatcttcaagcccctgcaaaatgatattggcttgtttggtatgtaagtagtcaacttgttttaaataaattgaatttgagttctaactttctagaatgaataagcatgacagaaataactgtattcaatatcatgtcataacctccaaaatagagttcctaaaataatcacctaatcaagaacacaattctataactatttcagtactatcaattattaatggcccgtgcttggggtgaaaatagtactataataaataaattcttgagaagttttggtgttgcacctttaaaactttttcccaacaaaaaaactatatttcacactaaaaatagccaataaatattgtgaataagtattgtagcaacaataaaaaatttaaccaagttcaatcataaggcagattagcttagacctaattcccaagaacacatgcactagcactaaagaagtgagaaaaccgaactgacacactagctagctaactaagtaattaaaatctctaacgtctaatttatcacacgtgtttaaaatacttcaaatatgttttgacactgtaaattaattaaattttttttaaaaaaaattacaatattataactataacatgtactatcataaaaaaaaatattacaatatatactactaaaaaaataaaaattaagaaaaagattgtaataagcaattataattatcactaaagttgtttttgttgactaaaacaattaacaatgtggaagccatggattagagacacctaaaaactttttaattatattcttattttttttatacttattataataattgtgatatttttcatttcctttttgctcgaaaggaaatgaaaggaatatctttgtgatatttataatataataataatttaattagtatataatggaagacagagatttgggacaaattaaaataagatatctaaaatgaaaaagcaggatatgtattaaataatatatataatttgatgataatcaagtgaaaataataaagaattagtaattgattattaataattatttctgaagtgctctttacttaccaataccaacactcaatcatatattacaccactgtcgaccacatccacaagcctatatcaccaactacaataattaattaactaattaattaaatttaaagctatagcaaatcatgaattaatatccatctcaatctctatatatacacatatatacattcccttgaaattatttatttattttccttcccaataatcatatataatattgttatgctcttctcttaatttcatcaagtttcaagctttttttttttctttttcttagcattatatatacatatttatatagtttagtttgcaggtgaaaacattaatatgggatcagaggagaagaagggaacccaaacccaatatatttatgttgaaaacacttcaatttcaactatagacaacaaagaagaagaaaaagaagaaaaatcattaggtaatgtaagtgtaatgatgttacatcaaatgaattttcatcaaaaattcaaaccaaaagatgatgatataatcttagcctccattcccaaatcaggcacaactaaatgcctcaattctcttgtcttctccatcttaaatcgaaacaatttacatgatcataataactgtcgtttaatctcgacacatattccctatgcatcttttcctgattccataaagcattattccaagtctcgaattgtttaccttagtagaaaccctcttgacgtaatagtaactaacaataaggagggtttttctagtatggaagagtgtgtggacatgttttgtagaggagaaagtgtgttcggtcctttttgggatcatgttttagggttttggaaagcaagtttagaaaaacgtgataaagtattgtttttgaagtacgaggaaatgaaagaagacaacattggtcaagccaaaagggttgctgagttcgttggaattcctttctcgaaagaggaagagaaaaatggaattattgaacaagtactacttatgaataaattgaaagaagacgatcatgacgatcatgatcatgaagtgggcgattggatgaatcatcttactccatctatggtaaagtgtgttaataacataatgaaggagaaattatgtggttctggcctatcatttaaaatgtcttaattaattagaagaaattgtttaagttgtttcattaattttattgtcttattatatttgttaatcaaagtaatattatttgagttgtggtgtgttgtgttgtgtgtagtattaaattattaattgtgtgtattagtattatatatgaagagatgtcggccttgtccaatatttataaggctatccatctaaacaaaaagcactattatttaataaatcactctttcttgtattgcttcatctaattatttattaattaattgtcttcttctattaactaattcaaagaagaaatatatatgaccaaaccaaattacaaattttatgtaacttggctagctaaggtaggagtattgtttaatatccacatttaaagattggttagatataaattgcaattttactaagaaaaaattactataatttataaatgctttgaattttttagtttgtgtagttctaaattatttagagtattataaattgattattctgtcaattaaataaaaataataatatggctatttaaataattaacacgttaatatcaggctaacattacatgtataattaatttgaaaaaaaaaattaatacatgcagaggtcataattatgagtggttaaatatttaaaaaagacaatgaaaggaccaaattgcaaataagtagtaaaattgagggagtaaagtgaaattttataaattaatcggtttgattagaacagtagtatccatagtagtcaccttcatctccaattcaatttcaatattgaaaccctagaatttcaatttcaattccaattccaattcaaacccaaatcacctcaaacttcaacaatcatagtagtcgtacatacatacatacatacatacaatgttaaaatctcaggtaaaattcttcaattccctatatttgtatttgtttctatatctctctctcatttgttttcgttttcattttatttcacttgtatctgagatatcgttatattgtattgaattgaatctgaaagttttcatttttcctaagcgctgttcagaaaaatcttatttttaattacttttgtccagatctttcaaatcaatttgattagtttacaacagtgttggaatttacagtagataataatagtactactagtgttagaattttaatggaattgatcatttcttttcttctgtgtttgttttaattatgatgtttcttcttgtttcggggctaaggaatgagagtccgacaggggcagccctgataattaagtaataattttttttaaaagaaattggttatttaggatttttactctccgaactttcacatgtaccaaatcatgactcttgtactttttaaagcgtaaaaaattctcctaaatgaaagtttaagaagcacgatttggtagatatcaaagttcggagggcattatttagtacatagacaatagtcgtattagtaaagttgaacgaaatttaacagaaatctttaaattcaacaatctcagtagtttggaatcattttaacagcctgaaaaattagaaggtatgatttagtacatgtcagttctgggtaaaaatcctatatagcctaaaaaattaggccggccaatttttggagttgattcttaatctgcttttatgacttggaataatctttcctttaatcctcagactcctagtattggatatttgagctaattgtgtgcttatataaaatatggctacaaaattcatatatatagaaggttaaattgtttgtttcttgaatgatgcatattggccaagttaatatgttgaatgagtaattcagcttggttagtatgagcacaatggtgtaagtaacattgtctctacttgcagcaggttcctttgtttttcttgagatgatggttcctactatatttctgatacaaagtgcttcgaaatgcaattagctataaatgatagtcataatgaagagatttcagaacgtgagcccatcttaggccaatctgagagcttgcacagatcggtaggatcatcctcttcgtcctcctgtgaaatcataactgttgaaggggatcatgctatcgccgatgaagatgggataaatgttcgagttgaagagaactgtcaactggtgatgctgatctaccacagtgccgtatatgccttgattccggaggtctttcagttcctatttgttcggtatctgtttgtattttctttagttactgacattgtcaccatttagaatgagaattttgtgtgttgtgaatttttgtgcaattcccaacccccaacaccacactgaacccaaatagtaacaaacttaaaacaaacaaaatattatgtttgtaaataaatcttaaaggccatatgcattatgtctttcaggggaagacttgattgctccttgtcactgcaaaggtacccagaaatatgtccatagatcatgtcttgacaattggaggtccacaaaggtgagtagtagcagttgttttatgattttcttgtgacaactaagtttattattgtacatgcagtagagtgaataattgtgtttaaactattctagtgaaatgaaatatcttttgatgaagcttgacagtgaaacctatttctttctttcctcaggagggttttgcctttgctcattgtaccgaatgcagggcaatgttcttgttacgtgcaaatgttcctgcagatcgctggtggttgagattaaaattccaatttcttgttgctagagatcatgcattcattttcattattgttcaactggtatgatcacagtcgcagactatataatgcgaattgacctttcaaactttgctcatcgcctgattcaagattgcttttgtgcttgtgtttcaacagattgtggcattcttaggagtgctggtttataacttttatggggaagaacttagggagatgtttggttatgaagaacacccatatggattttatacaatggccggtatgcacgcccttgaccctcttcctcactctctgtctgtctctctctttcacttacttatttacatgtattgatatg

SEQ ID NO: 377672 - DNA, 2014 bp, Cannabis indica
aaaatatttttttcagaaaatgaaatagaaatttcattaaaatttagcactcagagtacaataggccttgtaaatcaggcagaatattatgaacatgaatactacaacctgataaaaattgagagtgcctagcaacatattgagcaactcaatttgtcgatcgtctaataaaatgcaaggtaacattggggagagaagaaaataaaagtttgcaatcattaacaaccaacctgaaaacaaagaacatatattggttgctacgaatgacctgaacagtgagtatattgtcagtttcaatctccactttattccagttcttagttttgatccagttgaaaacctccttaatccccatggcttcgactacctcagtagcataggaacctctattacaaggcaccagaggagtcgctagcaacaatccaaaactataggaaccttctttttcaaacaaagtgacattaacattgatcttaattgtgttaagtcctgattcagactatatttctcattgattccaagggccaacgacaataaactccgtttatcgtgagctttgtgccattattcaagagtaaccgatactgatgtaacaatctattgtggaaaagaagattttttgtcccaaactaaactgttttttgctttccaaattgcccaacatagcatgagggtgcggcagcttgtgtccaaatcagaaccattgaacaaagtatttgtatatatggctcatccatgctcggcaaagtccaataactatatatagtattatatacatatgcttttgtgaattttgtccataccaaactttatatgtaccttctctagtttgtcggtaccacaacaagatgtaataaatttctctagtaattatgctttatttatttatttattttttgaagtacttttctcttatatttcttttgtcttatactatttatctttaccttgtaatttatcatctatatgaaattaactacaaagaataaattctgagtttaatacagtagaatataacactaactagctacatgtataatatattctcaagggttcactctattattaatatatattcaaatgttcatagatgtaagaaggaaagcatctattataattgtacatttataagttggagatgatctcaattcaaataattgaaaaataatatatcaataataacaacaaatttcaattaaagcgcgcatatttttatagtctgtgaaccattataatgtacagtgtgtgggacagtgggagagggagaacagatgatggaatggaatgcttacatacattaaactttttcaaaattataaaaacataatggatggtttaattaatatacctcaccgcatattaatttcatcctaaaaatgctttgctctcttttcattattattattaaggaaaaaaatggttgtggccttgtgggaaggttataaaagtagctaggaacacgtacgtagcacaccagaaataattgcttataaataaagtcaatgtactaactgagccagacgaatgtggtaagattatggctataaaaaaaaataagaaaattaataaataaataaaaataaaatggtgtcggctgctgagtcagaattggattggttgttggacttgggtggaaagtgaaaaggtcaaattaatgattcaggaacttcatcttaaaacgagtcccaaaataataagtttaataaattgtacaaaccagcccaaagtaaaatattaaaaaataaaaaacataattccattctaacttaagagactgctaatttggtttaaagaaataagtttgacctgaaatacacccaaagtggaaatctcccatgggtcatcatcagtcgtgagacccggtgaaatattcaacacccagttttctctcaaattttacatggtttaactttgtactaccaagacacaacccaaccctatattttctctttagaaatttctaaaaaaaatagctttttccttccttaaactattgaccatttttagtttccaa

SEQ ID NO: 377673 - DNA, 2715 bp, Cannabis indica
aacttgtataaagcatacctacgcttacgggatagcttgacgcattgagtgtcattgtgtacttcctctttctttttcttcttctaggtgtctctcaacagctattaatgacctgaatacatttccggtgttctggtcgacatagtactgcacatgtaaatcagcatataaattctatagtttctgatggtgccatgtgcttaataatgaaagagaagcagaaagcattgaactgacaattgtccaagtctacgtgagtgaaactagtttctgatggattcatgtgcttattaatgagggaacaccatgaaaacatgaaatgccttcaccgacattatactttcaatacatacataaggcaaggaagtcactgagcatagtattagagctcaaaaggcaattacttctagcaggtacataattcacaataagcccaggacaactgaaaaaaagaggcttaacctgaaaacagaatataccttacgatgacgtgttttctgaatgatccaaccatcaggtagtacaaagttcgaggggctctcagtgataagaggagaatgttggatctgcgtaatttcatttcggtaattttaattaggattttcctgcaaaacttaaatcattacaaaatgaaatccttccttcataaaagtggattgactaatgcagaaatctcagaaacttccaaatccagtaaggtcaagtcttttcccttgtgatatgggtgcattagtattcaaagacacttgtgaataaagataccaagttatagagcaccaaccttcagccgtacaggttaattattaaagatgcttcaacagtgcatgttagtggcattgaatttttaaaaaaataaagttaaatgcataaaaacacatggacttagcttcttcaattataccaataagtgaaggaccgttatgttagagcaactggagctaatatgagattaaacacctttaaaaagttaaattttgacccaccttcttcttcttttttttttcccaaggaatgaattcattaaatcttttttttttgaatcacctgctgaaggagatgatgaattgccgtatatgtgaagaatcacctttatcaaacaaataacaatccatttgttgcatatcaactttgatgatgctcgtcaaatattcaaataaataccttgactggtgctgtgaccatgtttgtttctttaaggtgtctctcaacctctcttggggagcgaaattgacgtccagtccctggctcaacatagtactgcaaatgtaaatcagcttgtaaattctctagcatctcatggagccatatgcttgataatcaaagaatatcaggatgtattgaatttttccgcactcattcatccatctatttatgtataataaacaaagagcatcaatatatacaacaagataagtagctgcacaaaattttattatgctaaaaaagtggattttccttcaacagatacagaacgctataaaccttttacaattatttttttttaaaaaaaaaatgatgcttcaaattttggaaaggagagataccctgtcaatacgaccagcagtagctccgctagttctaacctttgtctcaatgatccaaccatcaggaagtacaaagtttgaagtgctctcgaagggaataatttgcatctgcagtattatttaactgaatgaatatttttaagtgtttttaatcataaagtttgaacatttgcttctatagtttagtgctgtacagtaatagctgaaaatttatcaattaaatctgctaaaaggttaagcctttcccctattcttatattacaagttgaaataaatggactacatttgttggattactccaaattaaaagcaccattatgaagcagggtccctatatcaaatcatggatagtatgaaagaatctatgcagcttttcacaacagaataatcctaatagcactccagcatgatatatttcagtacatacatcgtgttaatttaaaaataaatgacctgtaatcaagctgaaatcaattacaaaagacttgatgtattcgataatacttgagttccctatgaaacttccgaccgcttgcaaaagcatttatgggaaaataggaactcatataagtttactgcagggtgtgaacttgaaaggaactgtaaaaaagttttcaagcttctgtttcctttttcaatattttatttcctgttaattccatcgccttggccttcttcgccaaatatgacaagaggaattttaataagtgaaaataaaagcaaacgccaacattttgcattttgacctacaagaaaacttatctgagacaaacccaaaaaacataaatgtattctttcatatatgttatctctttcagttgaaacccgtagtaatctcacataagccaattgacataagtaaactaaaagcctctttatattcctctgctattatttttaagagatatataattcaagtttaagacttacacatttgttgactgattctttcaatactttgcctggggatgcatctgtttctccataccttaagtatctctcaactgctaccagcgaccgaaacactctttttgtaccgggttcaatgtaatactgcacaaattttggtaggtcatatttccatgatagaaccacaaaaatatatcttctaacttacataatgttcatattaagaacaagagtacactaaaacccaaacacttttaaagtt

SEQ ID NO: 377674 - DNA, 10878 bp, Cannabis indica
tttttctagttttctttaactcatttttcatttctaatgataactatcaaagtcagaatgctttctaacaaaaaaaccataatgctaaatttgctaacgtgtgagaagagaaagggacaaagaagaaagattaagttttaaaataattaaataaagtaacacaacatcatattgtcgactcatttaaacaagagaaaacattttttttataatgctagttttcttcatgtaatatattcttaattctcatagttcctataaaatgcaaattaacaaaaatggattacatatggagacattttgtacaaccactactagcactgcactactcacaacactaacatttctatattcatttaacccaaaaaaaaaactattctgactatctttttcatttcacattattagaaactaaggaaattgcagattggagcagagtttccaatttggacactaagctggaaacatagttctttaaagtttcatgtgaagttgcctgtaaaagggcaatcttatcaccttgcaatacctcaaattgcttcttcaaaaacctattaaggctgcactctgcaatattaacaagacttagagatgcatttgtgtgcatatattttgttacaataagtcctgccaaaagttgctgatctgccttaacgagctccgaaacaaaacatggcatgatgatcctcctaaaaagtagaaattcgatctcgctgtctcctctttgttctgaaccttcttcatcaacgagtctcgatagttgggaggcttggcacttttgagagaaacttccaaccaaatagcaggtgtaagagaatatagtaccgtaagacgaattggagatgatattagacataactccagatgaggatatgagaataagaaactcaatgctctcagcaaccgtgtctgtgaacgttccttgtttcaacttgttttctacagcagccaagcaatgtggccttagtgcctcgtatggaagcaataggactaactttaaagccataaaacaatctatttgaagtacggatttgcttaggctttgggcaccatcttcgtctagcaatatgtcgttagattgatcaatcactcttagcacatctttaaagcgagacactgctataagtttcttacatatctctaaccaacacgcgtgtaaagggtgaagagaagagctgatttcggatttttctttttcaggagtctcggcgtcctggagactttcccatccctcatcccagttgtcagagttccaagcgttttcaacatcggatgcttctgaagaggctttctcatcatgccttgtcgtaaaaagcccttcccactctcccaaaacagctaccagagaatcaatatgagcatcactatcggaaacctctgacagcttaaagaagcaagaaactgctgtctctacagtagacagatcgtcgggagtaatttccagagttggtgatatgcttgctacgagctgagttgatctgagggcaaccaatgtgctagtaaatctgctcgatgtgttattatgatcggtcaacccctgattcgtggaagtttgactttgctcgcttgtattgagtgactcatcccacccttcccatggtacaatattggattgtaactcggatgagaaccccttaatatttctaccggtgagaaattgcataatctctagcatgcaaactctaacagatcccggtatctgcagatcatcagagaactttacaagtctcttccaaattacatgtctaacttgcttcaaatcatccagatcaccttccaatttactcacagaagacaaaatatgatagaagtgctggcgttcctgagattcgccgacagccaattcttgcagaataggctccaaaacatttaagtagaaatggggaagatcctgaagttcagcatcaccatttggagcatttattgcatcagaataaacttctgcaacagctctgaatccacaacccgaaaatagcatagctctgctgaacatgaaaatttcaaaagcaggaccaccagttaatccataacctacataatcaataaccgtgctccagccctgacttggcgaaacattatcctcaatcacaagcctcatgaaagcattaagatgtctacttaagcaatccggactgaatacaagaatttcttcagcatcagaaagggtcataatttccttcatttcatcagttagtcgcatccaaaagtttaagaggatcagaaggcagtcctgccaagttgaatcatctggaggagtgccatatgaatgatatagaggtataattacagtcatatactgctttataatgtccaaagcatcagacagggccaaaagtttgatatactttctgcaaaattcaaagctctgctcaagctgacatataaacccctgtaggttttcaggcctcttatcagaaaaatctgtcctagactttgtctccaaattcttcaacaaaccgaggacataatgtttgtacacatcctttgacgacacgaggccatctggcactgagtcagcataaatgctatggaggttttctgccatctttgctaagacttccaagctgctctcagcaatgtgttcatagatttcaaggttgaagcactcaaagttcaaacctcccagtccagcgatatttttaaagttgatgtttgaaataaatgaaactctactgcattcttgctcaagcatcgagtaataacgagcaaatccaaaaccagataaattagcttggtctgggtgtatcataggtaacgaatttttggtttcttccagctgcaaatagcaatcagaaagcaggccaaatatgtaagcaagtcgcaacttgtcacgtccatcaattgcaggatatacagcagaggaaattgtttggatggtctcgatagcactgccaattatttcttctttacactcagaaatttcacgcataatatcctcattggtccaaacctcagaaacaagcaaagaacttagatactgttgaagaacctgcaaggaaattgagaaaattaatcacttcaatggatcaaaatggtttatctatgtacctccccaatttaaaacttgcaaatattcatacctttgtccggctcaagccgtaagtgttggctaattttaaaatatccttcagaatgtacttcttctccaactgtacagactcaattaaagagaggacaacgctctcaatgtattgcatgtccccagacaaaaaccgagcagtatcaaccccaggaatgatcttttctagtactctggaacggtccgccacaaacttttgttcttcgagttttagtttccattctctccaaaatgaagactgaactttgtcatttttgcttatttcatctgaaaagaaagtacaaattagatttgcaagcatatgatagaaaaaaaacaataaagatatcagggacatgtatagaatatggaacatgtaaatgttcaccagtgaccgcatagactcattatcaaactctatttgataattaatggaaaagccaatcaccagtacctgttgtctgtttttctttaaattttctcagcagcatctcccttctctgagcaggaccttcacactcgaccccgtagttgtgtaacaagcaatatatcattcccacattcatgatgctactaatttcttggtaatcttttcgtcttctcagctgctcttctattacttcaacaccactaaaagcatccacaagatttaacagaaaggaacaacaaataatgtctttctcctcagtaataggaggctcagtagcagcttttgctagagaggcaatcaaatcatctttaggagcaaaaccgtttcttgctaaccaggaaataacagttaccacagcctgtgttctcacactcacatattgtgttctagaaatcaagccataaattgaactatcactgctttcagattttttactcagttcaagtaaccatggaagttgcaaagcagcaaatgacaaaagttttccattttctactaaaacagattcccaactgcttccattctccagaggtaagtttttagaaacagaagaaagaatatcttttatattactgatatgtacatttcgatcctcatcggcagcaccttcaactgcttcaaaaccaccttttaggtgaactatgccgtctgaatctaacatatttgaagaaccttgaactgagaaatttggagagtttgacccagtcaacgtcattaaagtctcacactggccttgcatatctagatctttccatgcagaaagcaactcgcttatagattcttcatcacaatggctcaaagcaaaaccaagtaattgttttcgagaattaacatccatattttcaagtgccggaccccttgctattgcagcacataagtcccaagcttgaccatgtcctttcttggccaaaacaaggcagagatcaagtgccagttgcagatcaccagcaactgcagcttctctagcaatagcttcctgcacagcacatatgtcatctggagcgctaagtccgagaagtttggcaatctcaatgatttcatcaacatgtagatatgctccggtttgacttgtgatagccattttaataatttccatgggatcttttatttgcctgaattgcacaggtaaaagtgcaactccaagactaggaagcttaacagtaatggcatcaatagtatcaagctctgctttaactattccactgcttgagagtagattcagacattccttagccttccatatctgaataaagttgcagtcatgcaatatatgagaatataaaacatacaaccaattctattctcagcttaatttcagctaggttatcattaggcaggttcaacgttcattttaatggtaaaacttgagtttaaatacaaaatgtatgcaatcctacttctttgagaaagaacatgaacttgactaaacaaataaggaaacatacgaacaacatatttatgacctaatgtagctaaccacgataatatgaggctattaccaagatagtctaaatgtaacaataataaaaaagcaccgagatagtctaaagcaatagcaataataaaaaaaaagccaacttgactatgaaacgtgcttaataaataacatgcagatgcaattaactttaaggatattgacaaatcatcataacagagggttgacaacacttttggaacagataacacaatgcaagatggtatctaagaattattatgcattgtaaacaaccaaataaaaaggaaaaggaaaacaagttgcaattccacttgagcctagctagtctcgagtggtctgggatccatgcccataaatgtacgttatactattgggggaacaaaaaaaaaacatagggtacataaaacaacttaaacttgaagcagaaagaaaatatttactccaatttcatacttacttcagggcaagcaagacttgaagcagagaaaaaatattcccttgcagcttgaatgacaagactctccgctttatctgatgccaaggcaacagaacttgtaccccttaaatagtttctagctagagaaaacttcccggctttaagcagtcctctacaaaattccatcagcatatactctggatctaggaaagtaaacgctttttccttcattgactgcatatcacgccacatgcttgcccaatcactatctgatcggctaggctgtcggcgaataaattttgaaagtataagacgaagaatttgcttgacacctttttcatctgcgtgggactcaaggaaataactcattggctttgggacctaaaaaacagaagaacaaaaatcaatatatgcaatcacaatctatttctttttcatggattgatagggaatactatttaaaaaaaaaaaccagatcacaagcagatcacaagctaaggaattaatgcatcggtatcagaccaaaatattcaaataactgtagcataaaggctttcgtcggaagtctacatcagtattatacccttatacataatttaatctttctttctttctgaagatccctcatctatgaaggcataaattccaaagtaaaagcatttttgtaacaagaggaatacagacctgatagaatgatagaagcctccccacttcaatatgcccctctgcaagttttagtcttctctccaagctaccatcacatattatactacctgtaaagcacatttaaaaaaaaaattaaaacatagggaaaatgataaaatataattcataaggattaaggataaaaccaaacatctaaagaagaatttaccatgtacttgcggaagcctcgacaatatagaagccgtggtactccacttatctgttactttacacaaataaaggcactccagggcacaatttatagcttcaacttcatccttgaacaggccactactttggacatctccacacccctcctctatgaccatcaagcaaatgtccaatttattctctgaagcaatttccttcagccatcttaccaaaaatgactcggcctcatcatgatcatcaccaagatggttccttgttacaccatcatgagagactacggttgaataatgaaacctattctgcataaatggaactgctttatcacgaagtttttcaatacattttcttcgttgactcccttgagcatcactttgaatttttcgtagtctgataattcctcccacgtaacaagactcaaacttatttccccatcactgtcatcagcataaatcagttggtgcaggtatgaaacatcctcatggaatttcttcaactcatagatgccttttctattagcataatcaagcaagcaaaggcaattatctagctgcccactacatacatcaatatctcttgcccgcttcttgtaccataccaatagttcatcaattgatggccaaacaaaacctgagcactgtttgacaatgggttcagttctaatctgaatgtcgatctcattacttgtttgtaagctattaacaaaatttatcatcttcctgcattcaacccaatcttctccccttacaaatgtactagaaggaggagactttccaggaagaagctggccatatgtttgtacaggaagtgtttcagggatggcagctaatatatctaaaataaaaggtgcaagtgaataaggatgacgtttgcacagaaggttcaaggctccaatttttccactttcggccatcgttacagcagcttcatttacaggcatcactcgaaatttggtaaattcctgtacagaaaacctgcagaattgtcaaacagtgggttagtactttgtagtaactattacctttaaaaacaaacttaatgtatgcattgaaaaaaatagatttatcaaaatagatttatcgcagcttgttaagatgaacaatggaggcatcaaataaaaacttcttatctacggattataagttttgctctcatttcctttacaaactgaaataacaataaataggaagaaaagcatggtacctgcccatatttatcccaagatatgtctccaacctgtctctgaattgcaatattttaagtctagccacacgaaagtcccaaatttgattactttcagaatcttgtagttcagaaaatttatattggttagtaaggcgcaacccatattcaagcacagccttcatagaatcttctgttggtccaactttgtcaacacattctgagaggatgaaaacttgatccttgatttttgacaagtacatgtttatttcagttaatcctcgtggagaatgcaaccactgtgattttaaaacttcatctttatccagcctatgacgatcggcaaattctaaggcagcttggtaacttctgttgctgattaaagtttcatacatttcatgaatggatttcttagaaaacgttatcaggttccaactcaacttggaaatgtcaatgttattaaaaccatcttctgtaatctgttctatacaatgagaggcacttgttccactgtaattagatagattatctctctcctcctttgacatactctccaaaagaaagagatttccttgaaactggttagctctttctaaaacaggcatagaatatacagggtcattttcctgaactttgtaaccactacatatgtcaatcatggtcacaacaccaggctttttagaaatagcaagaacacggttagaccaccaagtgaaatccacaacgtcactggtaacttgcgaaacacatctttctcctaccgttatatgtgaaagtgaaaaacatttcttgtccagcttaaaaatatgcaagtatcctatcacatctagagtacaaataaattcagcttctggagaaatttgaacctttggatatgccaactgacctatataaccttttggctttgaaaataaaccgtcaaactgaacagtggacaattgctctaaatccataactttactcctatgccaaagcgaaagacaggaagaacctgatatagatataaagaaacaatatttaatataaaatggagtaacaaaaaactagtgagagaaatcagttatcaatgtttcaccagatacggagatgactgaaacctcagaacataaacagtaatgcaagacaccaagtatgtaaagcaaataaaagggagacagacaggacaaaaaaaataatcatctgcatattatactacataatatctgttgctatattgctatttgtgtttgtttgatatattgagagctttaggcttatgtatttttatgtattacgttaagctttccaatgtttcatttttcttgttaccacggttttcctcagctaggaaggaaaatcagttttaaatattttgaaagtttgctagcactcatatttcaataataataatacaaataatatcaattatgtttaaggacttgttacgagtcaaaatgatcaacaacggggatagaaataaaattatggaaaactagtaagaaaaacatacctgtatttccacttgaggtcagtgcaagactgtcagaactagtaactacaacaaacaaaagaagttctggatgggaatcaatgcaaatgacattatttccaaactttcccttctgggttatgccattctcgatggagacatttggctcccgactaatctcaatatgttgaagagaaccatccgatgtcaatatagtaaagctacacctggaaaattttcattcaacttatgtaccatattattgtactataatcactccaaaagaaaaaatcatcttcatacatgctgtcctatgtatatgtgcaaaggctgtaagaaaatatatacacttacaagcaagatgtctgaacatcaaggatccacatttgcaatcaagcttacaatcggtaaagagacctttaaatgcctcttcataatccttgttatctcatcaccatttgctttaataaaatacagagtatctgtatcatcaacaactccaagaatagcatgattttccgaccaagttccggttgtaaacgtaacaaagctgctagctgttacaatgcttgcaaattataaaaatgttcctatcttatggaaaccaaccaaatctttcgacataaacactaaactctatgcaatgcaacacccaaaaccgatgatcgatacaaatacacaagtaaatgagttcagccaggaaatgttaccactgaaagtaccacagggctttgaataatcatccttcttctgcaaaaaagttatgagatttccagaagccacggcaacattctcgccactaggagaaacaaacaaagaagttaatttcctcagttttcttggttgcttgctttctacccacttttccttgagtttgctcacacctatgccgaaccaatcaagaaaatatcaacatacatactaattgacacactcaaccaattcagataagtacaattatcagaatcctagatttaacaccaagaaaaataatcaaaaaaacgagttatacaatgtaaaactttaaagagcattgacagaacaagattgaaagtaattagcaaattaataaagctccgatgctgagaattcgaataaaacattaaatttaaaaaaaaaaataaataagttatataaaaagtcgaaatctgtgtaccttgaactgaaaaaagcgaaagaaagccgcctctggattcattatcaacctgagctcagtgaacagtaatgctagaattcagaaatgaaggatttgagtaaaatgttaaaagaaaaaggaaggaaacggtaacctgttgaggaggataattgagagagaaaggccttgaagtatgacgacgagtctcgtaaagcaccggttcatccattggcaagggtttggatgtggaatgaatcctgcgtaggctgtaatcaaatcaaattcggaccagatttgatttccatagaaagagaaactgaggtagattttcagacgaagatcacaagtcacgactgtcttctctctctctctctcttggaaagacgaaaaacattcttgggcctaagaaaatgggctcagagaataatatgggctgtaatggatcttttgggtttacattaaaaaaaggaaattttcatttttatggtttttaaagtataaatttacaaaaatacggtattttcttaaaaaagttagggaaattctacaatgcatccccttaaaatggatacattgatgcacccttatctgttttagcacccaaaataatttgtcagtcaaattttttctcatggtcatttacgttatagttatttaagacatcctgcaaaattttaagaaatttgaaaaagtttaacacggcgaaaaatacattcaaacagtgtattgcacgtgtgactattttattttatacgcgtgtaaaatagactgtttgaacattattttcaatattgtaaattattttgaatttctcaaaattttgtaggttatcttatatag

SEQ ID NO: 377675 - DNA, 1852 bp, Cannabis indica
aaattcaatattaacaactaaaaaatatataaatcccatggctcagtgtacagccaataaatctttaaatatacatatgcattctacatacctcaagctcattcttagacttgatgggtcctttcaaagcaccatcaccatcttcttcttcatcggcaacatcagtatcactccaagtaaccattgcctcttcatcattgtcgtcatcatcatcatcatcacttttatcatcatcgtgagtctggccaaccatgtctggtgcatcagcatcccttatttcaccttcttctacttcagttaccacattaaacttgctctccgcctttaccttcatattttctttctcttctttttcttttacttcctccttttccacatcattatcgctagaatcatcgtcactagagctgcaaccagaagaagaagaagaagatgatgcagtttcaccctcagactgtgaactttcactctcatccttgtcactcattattttaccctccataccatttccatcctttgtttcactctttatatcatcacttacggttttactttttacagcattttcatccattcctgagttttcagacccacccaccaaagttactttccccatcacctcctcaatcaatgaatttacacttccagacatttcagactcccgttcttccaccttcacagtaaattgagacccacaatcaatcagctcagaaccagcagcaaatggtttagacccaataacatttgagtcagactgatcaataacaggtccttgaacgtcaatttctctgcaagaatctgcttcaagaacaccagtcttaatctttgctccttcagccatatctgggtttgaaatgttgtcaaaccaatcctttatagagtcaaaatcaaggaatgagtcagtaaatgacataatgttgatcaaaggctataaaactttgagatgtcactccaagatgcacttatagaataagaccaactccctgaaagttgcgttagaaactacatattagtatatatatgtacgtgcatataacatcattctttctaaaatggtcatgaggtgtataatgtattacttatgtctaggaaactctatattcccaacaaaactataagaattaacatactaaaatttagatgtatatgtaaataatgtcaagaagaaacaatataaacattatgttatttagttttatatatagaccgcattattacatatagcttttctttctttcattctctttttcattttcttcttcttttttatttttttttttttattttttttttttgggtagaaaaacaaaaacataacactaaatctcaaaagatcagttgtcaaaactgaagaaaccgtgaaatcatctaacaaatcaaaagcccccttgtatggtaaccccattaaaaaaaatgaactgaatactgcttaaaagttttaagaacaaatcgtttttccaaccaagagtaattatcaagtaaataaatatacttattatactcatcagcagacttccaaatcactcaaaatgacacctaaactcatctagttctcagagaaagctaatagttataaggttcaatacaaaccaagcatcaagtagtaggtatgtagttcagaaatgacaataagtttcagattaataagcacaaatacacatagaaatagtatggccatgagagactcttgctgttgagagctagcagagcaagaggaatagcttctgccggaaacctcttcgtcactgatgagcttctctcagtaaatagaggagaggcgggcggcagtgtgaaatttaattaaaattattaaagaaaaagaacttcaaatgcatatatatatatatatata

SEQ ID NO: 377676 - DNA, 2260 bp, Cannabis indica
gggtcatgacttaatatggatggtttcactaagataaaatgaacattgtaagaactttggctatgactataaaaacattccatcaagttaaatctaaaaattcagcaaaattttccaggattaataccttcagccagatcaaaaagtgctttcggcatgtgaagatgaaaagaaactaccttcactggccctttcccttgcttcaatctcttcatcaaccttgccatacactaaattctccaagtccatgttctcatattccaattcattgctagagtcatctaaatgaggtggatcataagagggacaacttgagagggcttctttacaataaatccctatatttgtcaaaagatggcacaaaccctgcataatttttttaagttgtgagagggcttttttttttttaatatctttctgtaaaaaaaatattgccatactgcacataaaagttccatgacaacaaaagagctgtgaacagagaaagagaggggaaaaaaaaagacacaagccttacacgttaaaggaactcccattggaaatttagcatgcatgtgataactatgtcaaatattttgcgtttcttatagaaaagtgcacccacaaaagaaaagaaaacaataataatagcataaatacctcatatgacaaaagattaaaagcaagtaaacaacggcgtagaaacatccccagattgctatttgggtccaaaataacttggtcatcttcaacaacaccagcctcaggacccccaaggattcctgaagaaaaaaaccaaatattaaaacaaacaagttattagacattgaggcaaacaacagatttgtaagcaaggttttcttcagccataactgaggtccaatatattaggaggagatcactcgtggacatgtgtttttagaagattcaaagagagaattaactcacctcgcatatcactgaagaagttgaacagatcatcaggtgaggataaagatgaaagccgacttgttaaatgatcagttagccaatgatttaataagcctccgatttcccttaattgatttatgagttcttctagtttcggctcaaaaatatcatcacatgactacccagaaaaacaaaagtaaaaaacacattaaaaaatttgcaagtggttcagaaaattcaaaaatgaacatcattcaaagacaagaactaaaaacactttatcaaacttaagcaaaatagggcagctaaatttccatccccagtagcaaagttaacattttgatttgacaattgagctaatagtaaccaaaagaaatgtaattgtgaggaaacgaaggcgaaaaccttggtaatggccaacaagaacaagccaaggcgattgtgctgagagacggaagagaaaggaaatgggacagagatctgagcgggtggcgcatatatctgaagcagaatgcaaacggagactttgtgtggcgttaaggaaatagctcccggtagcttcaaaatcccagtcattgtcaaagtaaccaggtagcaccaaaccaatcatccactgaggaagtttgggtttgacaccgttccgaagcttcgtattatctgcttcgtcgttggagagaaagtatctgagcaaactaacaagttttcttgctcgtcgaagtggccgttacggaaataggttcgggttgttcaaaaacaacattacaagtcggtgactgaggaatatgatggcggaaatgccggcgggagagtgtggccggagaagagtgaaggagacggggaagaagggagtggccaaaggagtgagggaggaagagagagagggaaatacgatgaaaccagttattgggtttttttttttttttctgaacaaaagatgatttatttattcggaaatattccgaatcaaaaatagacaaaagttcatgaggagctattaagctcactaaaaatacgatctaagtgaaaataaaatgctccagcaacaataagcagtcttattagtagaccgtttaataaaatgtaaagacacacaattaagaaaagaaaataaagaatgacaaccttaaactgagatggcattgaaactgagccaagaaaaaaaaaatgagaaattataataaattgggattatttcacaaaaacataaaaacaacaaaaaaatcacaaaaatacagtttcatagaattttaaatatttttacgatttttttaattttatttacagaaaatacggtattttatgttgtactcttgttaatttgttgttgattttttgttatctgcatgttatt

SEQ ID NO: 377677 - DNA, 9841 bp, Cannabis indica
  modified_base (360)..(360): a, c, t, g, unknown or other
gcaatagttaactgatgttatcatcagaggtatgcctactgatctttcatcagctaaccatttttattgtctcagctgcctctaactttagcttcaattgcttttttttatagtcaactattaagtttcaatgttgcttaatcagtaaaatttgttgcaattcaacttatattgtgttgctgcctcgacttttaggacttgtttggattaagctgttctattctatgagtacgatgaggtaatggagaatgtgagactgtgacatgaaaagagtgtcttttattaaagtaggaataattattctactaaaatggtaagacataaccacataacgaaatataggaaactcaaaaaaaaaanaaaaaaaaaaaagaaaaaaaaagaaaacacaggaaacttgttatctttttctggtccatcgaaatgggattatgttttttttaaaagtagaaatgtgatctcttagagaaatgctcaaagcacctacatgtacaatatcctatattataattggttaaaatgaatatcaggtctcgcatgcttttaaatagcaccaatactcttttttttttttttctaactgggagtttaatttacactattaaataagtggattttattttaattagtgtctaattaattatcataaataaggtattctgctttaattggtgagacaacaaaattgaattcattgttttttactggaaatgcataaatatgtgcatttatcaggcaatacttttttttttcttttgctggaagatatcacgcaaaacttttttattctaataagcatatcacgcaatacttaatggccatatttttatgttttatccagtccaagcctataaatctgttttgcttgaagactttttccttctagtccaaacttccatcttctccttttggtttgaattgtcaaaaagagtgacaaattaaaaaccgtgatttaaagtaagtccaaagaagataaagagaaaagtaccttcaaaatttggacgggcatcattagaatcaacttttcgtctttgttaagacttcaattagactattttccttttgcatttttgttaatggaggaataggggatcgtctattcatctcttaccccccaacaaggcaacaaacagttaaattaacaactatgtgaaaattcaatgtattgcaatattttagtatacttatgaaaaactattcttctaaaagtattttaaaaagtatatacatattaaaaatttggttgaatttgacataacatataatattgtactaaatttagtcatgaaataaatattacatttttatttactataatattataaattattatattttattgatttttactaaattttacataatttttttacaatattactattatttaaataataaaaaaataaaaaataataattttttttatatattctcaataaaatattaaatatttattaatataattatttatttttatttaattttgcatctggtataaataataggttaaatataacataaatttatttttttacattaaatttaataaaatttttaaatctgatattatctaaactacttttcatttactttgggtacatgaagacatgcatatagaaacacaacattttgttgaaacaaaggggtccccaaatctagaattgcaggctataccgacactcatgaaaatatttaaaatagagaaaaaagtggtatatgcctataatcattatccatgtataaatatgtgtagaagatttaatccataatggggcattatatgccaaattataatatcatattccatcaaaaaaagaaaaagaaaagaaaatcatattcataaattacatgcaagtggtaatatgaatatgttactatcatctttgcctcctaataataaaattaataataaaataaattgtaaatatcatgaagacaacatacatctttgacacgtggcataggccttgcaatttgcaagttgggatatgtatactacagtgattcacattatgaccttcatactgtcacacaaataagagtttggggggccatatgcccttaatattcagcaccaaatgacagtaaagcaaagctttagaaagaaaaaaacccctctgagtcttcacaaatgaattttccaaaacccaaaccaattaaaccctcatcctcccatcttccttaatgtgcaaaagtaaaaaggtgaaaaaccccattaaagagtgcccaattactactagaccaccataagcagctcaaaaatcccatttctaaccttttattattcctcctatttatgcttatttatttatattatgacacagcagcaaatgaaaatcgctctagaaaagagcaagacccacactcccttcctttccaaattcccatcaacttttgcaactcaaacactaagcaaagtaccaaccttctcaagaaccatgatgcctgcatatggggtcatcttttctcttattttgctgctcttcttggctactgttattaccaacactgaagcaagttcagtccaagtgagtctcttttatcttttataactaaaaatcccacctttattttacagatcccttcagttttcttatcaatattgttaatttattctttggattgagtgtttctttctatgtgtactgatttgaaggtaaatgggtctgtggcggcggagagcctgaaggaggtgccaccactggttcctctggtagagacaggaaaagtggagatgatgatgaatgagagcagaagaaagttggggagctttcagatatgtgctttgtgtacttgctgtggaggagctaaagggctctgcttgccatctccatgttgctatgccatcaattgcaacattcccaacaggccttttggtttctgttctttcactcccaagacctgtaattgctttggatgccatatctgaactcttatctctacaaagtttataatttaatactgtttaatttggtgctgggagagtgtgaatggggaagaatatctgttcttgatttgtttgtttataatttttataatttatttatttttttttaaaaaaattatatttttattagtgggaagtgtgctatctccagaatagtttttttcccattactagtggatttatccaaaattattttttttagtcaggaaatagcgattcctggagatagcacaatggtaggattagcatagttatgggttttcgtggaaaaaccatccttgttaatggtgctattgaagcttatggtcattaattaacacgttttttttttctttaaagaatatattaatggttttttttttgggttgtgctggtgtgacacttatgataaagattaaatttttagttttattattatttataacctttgttttcttccatgttgggctgtttaatttgtttatttcaaatagtgggattttcattttccttaaagttttatattttattgtcgaccaaagttagtgattgatagtttctattaattttttaatcttgtttttactagtcttaaatacttgcatcaaattttagcagaaagtgaattgctagacttgttatgtttatttctgctgtacctactttatactctgtggaagctgctaccttccacttcctgccaaaaatattttttacagaaaaataataaggaaaataaaaaagaaagaggtgggaatgtatgtgtagcgtactagtctcatagaatatatgtatatttttacctcatatattatagagtttgcaatatgtcacaacctgttgtaataaattttacctttccatggtgacaagaggatgaggaaggattgctttggtttgctagcttttgaattaccttaaataagtggtaaagttaactgtttgatagaagaaataaaactataaaatagatagattttattttgttttagataagattgatgatatggtattaatgcatgtaggtgtagccaactcaaatatcaaggtgggtagaagttaggtaggggcaattaagccttggctactaacttgctgcatttgttgttaaagagtagcatagttggttcatgaataagttttatgcatatatttttagatgtattgtttttcttataggctacattaaagatttgcattgaatatgtcttttataatggtagagtaaaacagcctctcattcggccaagaccttgtgtttgattgagaaagattatatttcaatgggggtagattgtgggactttgtgggggaaattatagacatggcagtagagctaagaaagccacacatctgaatttgatgtcttgagaagagtgttttgagaatctcattgacttaataagtttgtaatggcaatttgcagcaacccatgtgcttcttcaaaggacaaatcgatatcaattttttgtgtgttttcattgcccacaaatttagtttgtagctcctttggtttgtattcttgagatcatctttgataatgctatatatttgtgttttttttaatatatatattttttttgacaaggggtggatgtcacatactcacatagtgacttttgttattgtaatggtaatttcactaatttgttttcttttgagaaagtcaacatgcatgtgaaatttatatgcaagctgcctaccaataaagtttgtcacatgaattttgctgtaacgatctctcttataggattggtccttgctagttcaggggaaatttattaaattgaaaagatgcctaattgaggttacgagtccatactatggtgttaattaatttgattgaattaaaaagcagtatgcaagtggggtgagtgcccaatatattattattattattattttggtcaggaataaatagtatgactattaagattgaatagggacaaaattataaatgtttggagggtatgcttaactaatttagtaactatatatatatttttgaaataaaattcattaaacagtagatagattacaaaggaaatggcgacgccaacctataattacatgattttgtttgcagtatttatagcttgttatcttcattttctcaagctactattagctatattgttagaaaagcaaatactactactcaccaattagctaaagaagcaataacactagccatgctcttcattgtatcctgagtatttgattccccgtttttaatggatacaggttttcttttttcaaagaaaaagaaatggcgagtctggatagcttgtctcccacaaggtgggggaatcccaatccacatagtagtagcctaggttaacaaggtatgattggttaaactatgagccactctattggcttctctaaaaacaaaattcaaaccattaattaaagggtattgcagcagttctctaatttcttgaaccagaccatctactaccctacaaccttcttctcgactttgaataagtagcatcacttgttggcaatctgtgtcaactctaaacgaaccgagacatctctgtatagcagcctttaatccatcttgaatagcaaaaagttctacaattagtggttcacgctcttgagcacgaacaagaccaccccctacgatcccttagcaccactcccatcgttgagaccccctcttgagcacgaacaccagcatcaacattaactgaataagtgcccatatctggtttctctcatttggcttcctcccttcgacccttatcaattggccttcgatttgcctcttggaactcactcaagaatttccgacaccactctaccacatccccagcccgagccacacaacccccatgatttatagaattttttatatcccatatatgccaataggccataaggaacggagcaaacgtattaggattccatacttgaagtaaatttcgtagaaacaagatcaaatctttagttttgaattggaaaatttggctccataaaccatacttcttcaatatgtccacactccttcaacatccccacaacacatggtgtatatcttcttttttctgttcattacagcgagtgcaataaggtttcacatccattcctcttttagccaaaatactatttgttgggagccatgaatggaaactctccatgtaaaatgtttaatcttaaggggtactttagctttccttaaggctttccaccggttgtcatatgttgctggtttgactgtgaaagagtctcaaacatctctactgctgttttgtatccactacgaacaaaatactcactattacgattataatgccacaaaattttatcctccagtccccaatcaccactagggatactttatatcacctcagcatcatctccattaagtaccacattagtaaagttcatatcccaagtgccatttacgagtttcagatctgcaacatatatttggtcaggtaatattggtctatcataaatcttaaaatccaatacaccaacggtaatcctataagataagcttttgcccaaatcaaactacgccactaaaaagaagcatggtttccacacttagcttccaaaacacttctaatcgggaagtaacaagccttcaaattcaaaacttgactacacaaggaattcaatgatcttatgcagcgccaaatttattttgccagtagagcttgattgaacatacccgaatctctgaaacccattccacccttctcttttagtttgcataattcaacctatttcctctagtgactttttttactatgtttggatgagcccctccaaaaccttgcagccattcgatgcaagctatttattgtactttttgaagcctaatatagctcatggtgtatgttggcataacttgtaagatgaccttaataagaacctccttatatgcacttgagaacatagagcccttccatccttttactttctgccaaacccagattttaatggtgtcaaagagctttgttttagtgtgtcccacaaaggacagaagacccaaatacttcccataattatctacaacccgaacctccattacaacagctagcctacctctcaaagaagtatcagctctacgaccaaagcacatctcaaatttgtaaaaattcactatttgacctaaagccttcaaaaatttgtccaacagcttcttgcagcactcacactctgcctcagttgcttcaaaaaaatacaagactatcatctgtcaaaaatagatgagaaacttttaacccattttggttaaaagacaatccatatagttgattctttgcttcaacccgattaataaagaaagaaaaagcttccacgcaaaacaaaagtaagaacggggacaaaggatctccacgtctcagttcacgttgaggcacaactaagccctgaatctcgctattgaccaaggaagaaaaagtcacaaaagtaacgcaagccataactttcgcaacccaaacttcatcaaacctgttgaccttaaaaagtgatcaaccgacagcatagttgtataaatttgatgtttgccacatgttgcaaaaacaagtatgaaaagtaataaacatgcagagttattatagaggttcggaccccttgtgatagcgagtaatgacctactccccttttagttgtattaataccgaggattaatactatacagatcactatagatgggatctactatagcacccttaaaaatacaaagtatgaatcaagaatggaaaaactcaagtattgagataataggaccatgtgagagaggaagtgaagaagagagaagttgttagacataggcttagagcttggagacaggtttcaggcttatctgagcttaggttttctaggttagagttaatgcctttatataggaggcctaaaccctagattacaacttaaaaccatagatatttgtatattatattaggtaattacaaaagacaaaatgccattgaatatggatattattcagttattctattggacttttagggctcaatttgcagcctagaagatggtgtccacgtgtagaagtgcataggaaaccctggagaacacctcttacccatccaagtccttatgggggacagtctggccggccatggggccggccaccccctcttgtgagggagctggtctatcacttaatgcatgtttaagtgttgagatctccgtttacttaggtactgacttggccttctcattggtgagctgcataggcacatgacgctgattttgtccatgtaagcatgccacattaagaggaaaaaaaaagggataacaatacccaagctgcatcatcatatctctaataaactgccactcaaccttatcatacgccgttggtgtatccaatttaagagccacttttgatccattctaaactgatttttccttatattatgcaagcctttcaaaccaattatagcattatcatgaattagtcttcccttaacaaaagtactttgtgattcagaaatcattgcacagtgttagcctaaggtgattagccaagtactttaccacaatcttgtaaatgacattacaaatgctcatgggcctaaactcttcaattttctaaggtttttcagtcttaggaattagtgcaatgatggtatcatttagacaacccacctccattccctcattcaaaattccatgcatatcccaatcacatcttttcgaaccaatttttgtaatagaaaatcatagggagaccatcaacccttgggactttttttggatccatatccttcagtgcactaaccatttcctcttcataaaatacctttgataaattatcattcatagccggagtagcacactttagaatagcgttcaaaacatcatcaagtatatcttgtcgaatctcattggcagtaagcaaattggtaaaatattcacctacaacattctgtaccacccatatactagtttgccgtacacccatatgatccaacataccttttctttctccttaatgacactttatggtaaaaatatttggtattttcgtccctaatttttaaccataatgcctgactctactgtcgctagtacgtcacgtttttgtcaagcaacccattaagccttttttcttgtattatcccaaattttatccacctgatgtagcatatctacataagccaaagatagagtacaggtcgagtacaactccgtcaatagcagaacagagcctccgtgaaagatattgcaaaatcatcaatagcgaccgaaaggagtgaaacgagcccaacatcttggctggccaagaggagcctataggccggccagggtgagcctataccaagatctgtgcacaagctggccaacaagaagtgactttcagacccaaggagactccgttcggccaagagaacctagcctcttcatagaaacgatgtacaaagctgtcctcaacttaaaaaagcctggcctccacactcaaaggttggcctcctcttggtggagctattgtttcctaccaaaccctgcagaccttgtcctgccacgtcttggcaggaccatagccggctaggatggacctagcaggaccatggccggccaggatggacctggcgggaccatggccggcgaggattgatctgtaaggaccatgaccggccagacttccttgtaggcctatggatgaccaagattgacctggcaagactccatgtacaactctacacgtggaccaaggcatgggctgtaaattgggacccaaaactctaacagacaggctgggcattttggtcttatgtaaatatctagctaactatcctattttcaaggtatttaagttgtaaacctaggatttaaggcttagtcacctagcctccaaatagttctaagtctgaaagccatattccttttttttttctctctctcactctctctcttgtacacgcccat

SEQ ID NO: 377678 - DNA, 4989 bp, Cannabis indica
gaggacaaggaagccgaccgggtagcttcaaccaagctgaaaagcatggtagaagagaggatgaaaaacaaacctctccctccacctcctgctctagcacctgttgatgtcattgggaatgcaaactcagagctgcccgcaaaatcgagggatggggaatctgaacctgataaaaatggtaatgttttaattttcctagttggtaatttttttatattttttcaagatgctgttaacgttttctattttaatttgagcattccttggggatttatcctgatgctgttttgtcattttttatggtcttgcagatgctgccgatgacaagaatgatgatgagctcactagtgacaacaaacaagttagtgagaatgacagggttgctgttagctcacctgataagaataggaggaatgatagaagaagcagagagagagaccgagatcgtgatcagagaagggataaagagcgagaggttgaaagatacgaacgagaaacagagcgagaacgtatacgaaaagagagggagcaaaggaggaagattgaggaagctgagcgcctgtatgaagaatatcttaaagagtgggaatacagagaaagggagaaagagaaacagcgtcagtatgagaaggaaaaagagaaagaaagggaacgtaaaaggaggaaagaaattatgtatgaagaagaagatgaggatgatgattcaagaaaaaggtggcgaagaagtgcagtggaggacaagagaaagaagaggcttaaagaaaaggaagaggacttggctgacagactaaaagaggaagaagaaatcgcagaggccaagaggagggctgaggaggaaaagctgcaacaggaacagaaagatgctttgaagagttcacttgacaattcaaccaatggatccgaagagcctatgttggtggaagaatccaacactgaattgaatgataaagccatggaagaggattctgaagctgagtccagtcgtgaaaactgtattggtgtgttatcttctacacactttaatatttatttattttcacttgtgttttctccagcttctgttttcttctcattcttgtttgaatgaattttgcttgtgttacaggggaaacaaatttacataacggtagtaccagtgatgaatcaaccatggctcctcctgctgctgcaatagatatgcaacaaaatggcaatgtcaccacaaagaaattgggctttggtttagttgggtctggaaaacgtactacagtgccttctgtgtttaaggaggatgacgatgatgatgcacataaggataagaagatgaggcccttggttcccattgactattcaacggaggaactagaagctactcaaccgagtgtttctggaacaactcaatcacatttggttgcagctgctgaatttgctaagcgaatatcaaatgttggtcccaaggaagagaaatctgacaatgaaaaagaaagaagtaaacgcacacgagagcggaacgatgaggatgttgttcgcagtaaaagtgagaccaaggagaagactcatgatgcagatcgagaacatggtattgataagataaaatcgtcagacaataagaagcttctagatgcaaaacaattgattgatatgatcccgaggactaaggaggagttattttcatatgaaataaattgggccatttatgagaaggtaatcattctttctatggttttatttcaagttagtctggttgaactagttatgcttataaaatgctccattgattataggtagtcaagtttcctaattgataattacactttgcttaatcatacttgaaaccttatgctttcacagcacgctttgcacgagagaatgagaccgtggatctctaaaaagataacggagtttctgggagaggaagaaaccactttggtagattacatcgtgtccagcactcaggatcatgtggaagcagaccgcatgctgcagcttcttcaatcgattttagacgaggaagcggaaatgttcgttcttaagatgtggaggatgctcatctttgaaattaagaaggtggagacaggcttgtcatcttcaaaatcaagaacataatgtgtttgtttctaattctaagctatctctttcggttccttctatgttgctgtagaatgactaattgtagtacttttgccctaattcacatatgtttccatgtccttagatgtgatctgattctgataaattgctgtaaagtcttaaaccatattcttcagctttattggttttaaggttgtcttcaccataagcaaatgaaacccatttttgtactcttgtgtcccatttattagttatgaagagtctctctctctctgttccaaatttgtattttcagatagtacttgtcattggaatagtgtcaatctacaaattgaacaagttacaggtttgtttgtggtttgtgttttcctttcacagcaaatttatcacacaaattgaactggaatacttgtgaatttgctacaaatatagattaatttgcagatgtagcatctttcagtactaataaaattatagtgaatagatgtgttttgaggtggctcaaaacattatttacaagaaataatgaccatgttaagtttctctgtttgtgcattgtgtcccaagaaataataatatttggggaaatcggttctggaaccagaacaccacatcccaagtttcaattgattaattaacacgaaacaactaaatttactatcaacaacagcatttactatcaacaacagcataataacaaagagtgggatttacacagcttttaaagaatggaggataccagaaagaaagtggtcatttgtcctattcttaaacgagggatccaacaataaatattgtacaaattttgttcacaacttcagataacccaaaaccaagacacaactgaaccagcagccataccaaaaaccaagaacaatacactcacaatacctgcagtttctgaatgttgtaatggaaccaccttgggagccaaaatcatcaacacactggtcaagtagccattggtaagacccaaaaggcaagttaatattgtcactggaacctcagtccttaaaaactttggaccatgaatgcaaccatagaagagtgggaaaaacagcaatctcacaacagttccaccaacagctacctttgtattctgaaggagatacaatggggtcaaacacttaccaaccaagtcaaagatattgtagccagtaatgagaacgattgagtaccaatccttgagaagagcagaatgaacatcttcagttatgtaacctggaaatatagccaatgtcacaatgtagataaggataatccctaatccataccatttgattctacaaacaatttcccacaaagttgatctccatacagctccggtcaaaggacctttctcctcttcctcctcattcatagcttgaatcttcaactctctgtaatacttcataactggaagcctaagtgccacattgtatagaacaatgcagatcaccattacaactaccgacacagcaaagtaaaggtttgcacttttcctaagaccaacagcatcttgtgggaatacagcttttgtaaaaatccttagaaaagacacaagaactcctgcaaagacaataataataacttgaataatttgggcaaatgcaatcctacttaagtcaaattctatttgatgaaacagtgccatagatagaagaaaagacaaaaaaaatttcccctaaactattcacactacctactcttctctttcgaactatttcacttgttaatcccttgaaactattcaatgcaataacaactattcaatatgagactttctctaatattttcatcaaattatagcatgctcaagtttcaaattctctaaaaatagaataaattattgattcaacaaaagaagaaaaaattctttccttcctcttgaaatcaaaagtctaaacaaagccttaaactaaattaataagcacaccacattcaactcatctgcagaaaatggtaaaagacaaagttttgctaacataattgacacaataaaatcaaacccataatacaaaattatgtcaaaaaagttcagattccaaattagagccataaaaagattagattttgaaagaaataagaaagtaaagtaacccattgatcaaagtcaacaagagaactttacctgagccagcagttccagctacaacagcttgcatatacctctccggcatctcaccggcggacccaatggtcccaccttgaaccaaagcatcagaaatggacgcaagtacaacagcagccaccgtaacgtaaaacccaccgtacaacccgacccgacccttgatgtaaacggcgtcggtaatgggtacgacgagcagtgaaacgatgaagagacccaaacccaagttaatacggagataaacgtcggatttaagggagtataagatgattaagatgagggaaacaaggccgaccatcatgtaaacgacggcgattatacggtcgacgctgatatctgggtagatgaaggagaagtaatcgacggctgtgatgaaagcgttccatgggaagagataaccaagacccagaatgaagtagattatgtatgcgaaatggaatttgtcttcgggtactttaccggttttggtcaaagtctccgacgtcggaaggagaagaacagcctcggcttctccgttggggttttgagccgttaatcccatcggaaagatcagtcaaatttagaaaatgggtatatggctttgaatttggaaatgaatttttttaaaaataaataaattaatttttggtggttgctttgctttgctttccttagttgcttggttgtttggtttctttgtttactttagtagtcctacaccaataacttcggatattaaatatttgagtaattaagtttaattgatatgtgattcaaaaattgtgtttttaaaaaatgtgttttggaaacaagggtttgattggtttgtgatt

SEQ ID NO: 377679 - DNA, 3230 bp, Cannabis indica
ttttttatcagttttttaacgagtataatttttattctgataacatgttagtgaagtgagagagaaagatatgaaatgaatgattgagctcatctgttaattgagatggcttaatgtattatatagccaatggagtaatcgaatataaaaaatcaagaaagagctagccagttaagcaaagagctgagcaaaaactaagatcaattataactaaaaacaactcatagaaaactaactggtaattgactaccattaacaattctagctcaatcctaatattctccctcaagtgacactcattggacttggatgttaacttgttcatgagaaatgtgaactgaagaatgttataggcttttgtgagaatattagttgtttcatgtcaagactctacataacgaatatctaactagttgttttatgtcaagacttacataacgaatatcaatttcaatatactttgttatggtgtggaagactagattcgaagctagaaagctagctcccatgatgtcacaccatagtatatgaggatgtgtgaagttgatagataactcagaagtatggactcaatccatatgtgtttacttgtggccatagtaagagctctgtacttagactttgtattagtctttgcaacgttggattatttcttagagcacccattgaccaagttgttcttgtttatattatggtaataaatcaaatacgcagtgaaataaatatttttgattatcatcatatcatgtccccaagattaccgtacatatattaaaattgaaaggatagtttacctctcgaagtctgtcagggtatcctcaagtaatttttattttgtatccttggaatggtgacatcaaagtcacaccttaatcttccagatcttccaccacacacaaagagtagtgtgggctagtatgataaaatttatatgaagttcttgttagattctcaacacatgagcaagaacaatttgttaggatttatgctctgaaaagctcgtgagacatttttatttataaataagagttgaacattttcatacatacttaattgttaaattattaatatataatattgaaaatttatatatataaatatcaaaaaaattcttattcatacatgaggttgtgagttgtatagtacggagaataaatattataatagtcagcaacatattaaagtttaggaatctttaatcaatggtagctagtgcagttcactgatgcctgttatttggtgcaagtaatctcaattcaaattattgatgtagcatgacatctaagtgaaggtgctgaatataatagagattatatatgtcagggactgatgtgtaattatgttgtctttatcaaacatgtcatttactagaaagacttaattcatatcataatgatgatcaatggtagatcagcttaaatcctaagtaatcatgaactcctgttcatgttagtttctttaattcactcgttaaagtttctcacagaacataattcttacaacttctattttgtaaatctaataatattgatgactgggaacatgatctacaattatagaatcttgactttcctaatagatcgaatattggttccttttaaacgttaattctggaactaaaaagttgtgcacaaatttagattagatctaaattatactttcagcagttaattaacggtactaaaggatacattagtaattagaagagtaaaacagtaatttagccaaaactaattacgaaccaacacaaggagggctaatcactagaattgattatcaatggatattgcagtaaaacttagtaaatataattctatatttactaatagttcaattccatatttatagtgtagtaattatgaaattaataaacatgataatttggctgaagagatccaataaataatctaatttattggagcttagaattatagttctatagtccccgaattgccaccttgacagactgtcaaggggagagataaaagttgtatgtgaaagtttgaaaaaatctattttaatttgtaaaaatagtaattatttattttgtaataaataatttatgtaataaataatttatttctttttaaattaattaatttaataaattagaaaaaaaaacaaaagttgtcaggacaaaaaacacaacccttgtcttaattaagacaaagggagacgccacctacactgtgctgagacacagtgtaggtgccccattaatagggtgtcccaactagatttatttttgggttaattaattaactaattcattcaaaagataaatattatttaaatttaaatttgaaaagtagctgagatattctctcaagtagttgtgagattcccttaatcggttataggaaaaaaaatatctataacataattcgatatattttttttataattaaatataatttaataaaagatttgaatttaaataattaattaaataaaaatatttcatgggtttttttaatataccgtataaccaatttgagaacaagaacttttaacgtggctttatgaatgcctaaaaaggattaatatattaatatttctctccatcacaataacagaattattcttgctcatgtattgagaatataagaactttatatataaatataaatatatatatttatcctattagcccacactagtccttgtgtatggtggaagatttggaagatcaaggtgttactgtaaacatcaccgttccaaggatacaacatacgaaagactcaaagataccctgataggattcaagagataaataatcttcacgcttttactttcaaatttgatatatatacatatcgtgatcttgggaatatagtacgatgataatcaaaaattgtttttttcactgcgtgcctgatttagtaccataaaaccaacacaatgttatagtgtttgagagaaaagattaaatcagattaatcctttttaatctttccaaaaaattacgttaaaaatatttcttcttgaatttggtttatacgatatattaaataaactcaataataattttatttaatttattatttaaaaaaaaaattattaaatcatattcaattatttgaataaataatctaaccaaattctattatagatatttattttcaataaccgattgaggaaatctctcaaccacttaagggaatctctcaactttcttgagagaatatcttcaccaaaaaaatatctataactacttttcaaattcaaat

SEQ ID NO: 377680 - DNA, 8582 bp, Cannabis indica
tttattttcgtgttgttatcgacgttttcaggaacaagacatatgtaaacctacttgtgggcccattcacaaggcccaagtaagccaacaacttggtctaagaacaacattgggctgggattcaaattcaacctttgctctattacgggtaaagttggaccgataaatctaaaagattgatacttaacctaattatcaagcatccaaagaagtatagacggttaccctcaagggtatcccaaaagagtagtcgaaggagtgtcgtagagtgtcgaccatccaggaccaatctaacgtggagtgcttccaacaccaaatcgcaaagaatcgggggtttgtcaactttttcaagccttgggaagacgcacataaaaaaagcaaaccacattgtgttcaatatccactactctgacactcactatacttgatcgatgatccacacccacctgtcaccatcagtggtatggtcacgtacggacgaccatcaccccttaaattgggcctcaccaacctgacccaaagtcaatatcctaatgtattttaccccatcagtgagtttttttacatgcaaatcctaatgtgttcgagtttacctaaaaacctgactctaccctataaataaggccctaacccttcatggaaagggttacaatttttggcttcaaactctggtaagaaaatttggcaagaactctcttgcaaaaatactccatagccaaagaactcaataatattgtctcgtggagcaaggctctttaacacctcaaccacataaaattctttatcttctttatttctaatctcattttctttagctcaatctatttttaattcaatttttaaaaaacttagtaaatattttggtgctttcattgagagccaaaaaaggtttccaatattattgtcatctacaactatggtcacaactagaattgcaactcggaagctgaccactcacaacgataaggaagacatggctgtcgatgacataaatatcttctagtgaacgtttaggaagacgtcgaaggagacggtgacgttgatgcatcataagtagctagcagtccccctcagaaagtctagcaaccaaaaaagcatgttgacgaaactccccttgaggaggacgaccaagaaggccaagatgagaattaaatggatgactatgacaaagagtatgaagaatactatgaggaagaccttgagattgtaacgtagacaaaaaatttctcaaagaattttttcgtaccaaatttaattttttttatgaatttgaaggacatgctacatggcccacaacaatttggtactcaaagtttgaagaaattacttggtaatttttcagtagatcaagtaaagagaagaaaacttaagaactaaactattgagagaaaatggagaggcgattagtggtagaagaggtgagctgccaagttttgatcccaaaaatacttttttaattaacaaaataacttatatgatgacccataaaaagaagataaccaattaaatactattgttttccccttaagacaaccaattaaatcaaagaagatcaagaatcgctaaatcatctaaaaaataccaattactaaaagttctaccaaataaattcatagtgtattctgaaatttttggtacatcctaaaattatgaattgtgactatatcgccaaatccactagtaccaaacaaaagacacactatataataatatagctttagtgcacataaaatccacatttatatcctaatgggtaagaattaccaaatgcgcttataatttaaatagagagtaattatggcattaaaagatataatcataaaatgttctctattggtactctaaacagggtaccaaaccacactaactaagatgaatgttacatcactccacctcgactcgagaagggctcccactcttacactacaccccacgcgtggggactccaagcctcactccacctcattttatgaagggcttctacctctcgcaccacacccccaagaaagaggaccctaaagctgatctctccaccactcataagaggagcacccccatacttgccctatattatgcttagaaggtttctcttattcaacaatgttataaaataacattgtaaggagaaagccttataagtttttttttttttgaaaatgataaagttcatttaacaccaaggaaaaaatggggcaacagggggttcaccctccccttgaaaatgtttagcaccctggctagatctcctagcacttttagttaaactgtcgacaaaagacataacgttcctactaatgtagataaaactataactagaaaaagactttaacaaatctaaaaccttgagagataaactcatgattctccaatccggagggtacaaagagttattcaaggcattaactacaacttgagcataaaaaaaaatggtgatatcctcccatccttgatcttttgcccaggtgatagccatcaaaattgcttgaatttcagcatccataggagagatagcctccttcttacttgtcttcacttcccactttgcttcagccctgttgatggaaagggctgccaacccagccacattctgggaccaagaagcgtccgtaatcatgtaattgtttggaaaaaccaaattcataggcacagaggcagttgtagtgctctgatcctcaactatcctatcctgaagagtaggggagaactctttgagcttgtggtggacacgggcaagaatctcattactgtccattagtttcccttttgtcgtgtacaagtttctcgcataccaaatttcactgaaaatgcaaccagccaccttcaaatcttcggttctggtactttaagggagacctttcaccaagttctccaagaaattaagcatatcattgccaggtgtttaagatgagaggtaggggaacggacctgtaaaccagatggcccacacgagagggcattctttaaagatgtgcactccaaattccacttcggcatcacaaattagacaatccttctctgtcaagaaatgcaaattgtcctttgtggggatacaatcgctgatcacacgccataacatgattgccaaacaaggatgaatacccgggttcaatatccatctccagatttctcgcctattgttgaatcgatgttcctgatccaagtagtatgcagatttgactgaaaactcccattgccattgcccttccataccatactatcctgagaagaaactagaagtctaggaatttccaatattcttctccccagatcatcaccaaaaacattgaggaccaaatcctcgttccacatgtcccctaaagagatatctgcaactttgtttaagcaaggaaaatgagtagaaatagtagacataagttctttaaactcaccaatctgcatccatgggatccatggttgattccacaggtccactgatttgccataggagattaaccagcaggatccctttgccactatgtttcgagtacccaggatgtttttccacaaggccaaatctccacttttcggttgaactatttagaatgtctgattcctacagtaattttgaagcaaacaattcacccaaggcttcttttcttgttgagccaaactccttgccagttttgagagtaaagcccgattcatgtcttcagatcttctaaaacccaggccaccggattgttttggttgacagatagtgtcccaagattttagtgctaggagtctttccttttccacattccccaaccacaaaaatttcctagccaaggcatctagggatcgactaaatgaaaggggaattttattagttgacattgcataaactggcatggcagctactattgagtttaccaaagtagttctactagcaaaggatagtagtttcattttccacccttccaatttttgtttcatcctttctcttaaattctcatatacttccttcttccttcttttaaaaatgaaaggattacccaggtgtttttcctcccccgaagcctgctggacatggagaagcttgagaatagtagttctcctttggtgattcaagttgtttgaaaagagtacactcgattttgccctgctacatttctggccagaccatctctcataagtaaagagaatctcagagatgttactagcttccttttcatttgcccttaagaacaagatagtgtcatccgcaaacatgagatgggatataagaggagctgtccttgcaatctggatcccgtgaatgtcaccattactctcagccttcaaaattaattttgacaacacttcttggcaaaggaggaagaggaaaggggataaggggtccccttgcctcaaccctcttcccggataaaatttcttccgaggacttccactaagaagaatggagtaagagactgaagtgacacaagccataagaagtttgcaacttttttcattaaaaccattagcaataagaactcttaaaagtagagcccactccattcgatcataagctttgtgcatatccaattttaacgccatcaaccctccattacctttctttcttttgatattgtgcaccaattcctgagtgagaaccgaagattccgcaatccgccttcccgggataaaagctgattgtaatggagaaatcagcccatccatgaggtggggggagacgatttgctagaatctttgcaattattttgtaaataaaattgcaaagattgataggcctaaattgatccactttgtcaagaagttctatcttggggatgagacagataaaggtgtattttaatagtttattcatctccccagtaacaaagaaatcttggaccgttgagcaaaccgagcctccaacaacatcccagaaatgtcgaaaaaagcaaccagagaacccatctggccctggtgcctttaggggatgcatcatgaagactgtatctctaatttcctcctccgttggaatagcagtgagtttgagattatcactctcatctactttcttatcaaacaaagtatccaggctcaaagggataatcggctcatcagatttgaaaagatcaataaaataatcattaaagatacctgatatacgcctcttatcctcccagctatatccctgattatctttgattgtccaaatatggtttctccttcttctaatcatggttgacagatggaagaattttgaattttgtatctcccagtttgagccacacttcccttgatttctgacgccactgactctcaagtctgtagtattcttcttcaagtcttgcttgcaatctacattcttcctcacagaagtcattggaaatgttttgttgttgtatccaatttatgcgagcctctagattcttgatattctgttcactgaccccaaaatccttctttttccactgctgtaattttctcctggtctgagttagattgcgaatgcaattagtaacccccagctgagtgttttccttccaaacttgtttcactgttcccctacaggagctttccctgcaccaagcttcataaaatcgaaaaggtttgaaaccctttgaattatcagccatcgtatcaaggattatgggtgcatgattagatgaaataatggggagattagtaacacaagcttttggaaagtggctgatctagccaaaggagcctatagcacgatccagcctttctcggattagaccacccttaaatcttttattttgccatgtatactttccccctctacagcccacatctatgcttccagtattatgaagaaagtctgataatcatctgaagtccctcgacgaaactttattaccccactcttctcattcgaactgagaatggcatttaggtcccccatcacgagccaggagccttgacaatctaacatcctgctttccaattttttccaaaaattttctttctcactgtcgtaaggagtgccatacacaccaaaaaaactccaaatgacattctttcgagcttcccaaaaagatacttcaataacattactatcaatcttcaagacttgtaatttaacatcatgtttccacattaaacagacaccaccagcaataccaaaggaagagcaactagtgatgcccgagtaacctaacatcctagcaaccccttccattctatctttatccacttttgtttcaataagaaaaatacaatcaggcctgtattttctttcccaagcacgtggagcttgggttgccggttctcgtagcaagccccggtaattccacgataggattttcattgggaaggagggagcttgataagggccgcctcgtcgcccgtctgaaaattttggacacaattgacatgaacctcaaccaaattcaaggtgtcttccagatttcttaccgtatctccagttagacagttgttctcaaccaattttaacttgcttcgattcgttcatgtggaggatcccttcttttgtcgtttatcgttcttggttgttgatgaagaggctcctgaacccattttgaaacaagcagtattcttgtcgatatcaatagctggtagatcaggtaaagtttgttcaaattctctggtattctcactggttccagggacagaaggaactagatgtaggctggctttccttttcctggcttgtggacatgggtggatcaattccgtaacatctaatgggtcatggaataaagttgggttgggttcaaacttgtccacttgcacagggcccataagttcttctgctaacccaatctcctctgtataagtgggccaaggaaaataggtaacttcaggatgcttgtggggctatctagacttgcataagtcaacatgtgggccttctataatttgattgtaatggggtccaatatcagccattatagtagtaatgactcttgcatcagcaggggtaggtacaggtttatgagaaacgttttttatgatatcattctcattgacaactgttgcattgccttgagaacgatttccccatattcgaggagaggctgatcgagcacatttgtccataaatagagcctttggacttgcttcccttgaaactagctctccactttgtttgtttgctaccaccaatgttttctttttcaccagtttcaatttcttacctaaattggaccctggatgttcctgcggaactctgatagcttctttgtagtcttgacaacaaacttaggacgtataacattctgactctcgatgctggtcattggttgctttcctttttccttgaagtccactagtttcatggtgtttccctaacttcttggtctttgaccaatgggatcttcacgaaaatactccaactggtttctggtattgaaatagctgtagactgctgtttcagccttcatccacaggccaaaggcaggaactgcctttccctctggcggataaacatacaccgtcgactggaaacaatttttcttgtcatgacctagatgcccacagttgtaacacagtttagggagtttgaaataccgaaattgtatccattccttcctacctcttcgaatatcaagatagaagcctgaagacagttggtgagccgttgaaatcttaacctgaaacttgaataaaccccttcgaataatcaacttttgatccactgtatcacatccaatatagaaccctgcttttgctgccacccttgaagtgttaattggattgagatagggagtgggaagtccaaaagcttggacccagaaaatggcctttgtcatatccaccttactccaaatgccgtcttctggccattccctaatgattaggagtttgccattgattagccatggcctgttgtatagtatttccacgcagtcatcctcttcatcgaaagatattccccaaagacccgcactaagagtctttatcttttagttgcctttcagcttccatatcttgctaaggatatccttcaatctatttcttgagaccccaactcctccgaaaaactttgccaggactccaatgttggtgatatctttagttaactcaaagtctggttcaagctccagagtcattgagtccaaaaactctttcctgaggtcttcaacttcttcctccttatcctcggcaccttctttacattcttgattcgattcctcgttaacagggttcccctaaccctccagtgggacttgttcttgttgctctggccccatttcttcctcattccttctgtcatttgagttgagttcattgatgttcccatcagccatattcatctccattgtggatgttaggtactattcaactcagtgttgacgtgtagggaaaagcctttgagaatcttaccaaccaaaaaccgttaaaagccttaaactttaggaacagtaaaagcttttaagatgaaagagatagaaataaattcaccagaagcaattataagtaataactacagggtgagaaaagcctcacagttggactcccgacactctcatcctagagagaaaagccttataagttaaggcacagaacacttagcaatatttttaagtttctatgtgacacaaccaaggtcaaggcagtataattgatacaatacattgttgggttttatgccctaaataaaactctttacaatctgattagttatc

SEQ ID NO: 377681 - DNA, 5149 bp, Cannabis indica
gtatatatatatatataaatatatataaattggttggggtggaatactagcttctttgcagacttcgtgagcaaatcctaagggaattggggttcagagacatattcaagaaagtcaaggcaagtttactttatgagcatcagatttgctattactaacaccatgaaatttcgaaaagggcatggttaagttttaaattcatttaaaataacggttgtcatggttttcttgattgtgaaagatttgtgtaaatctaatgttatgcttgtgtatgcatggttatgaagttgtttgttagagacatatgagagttttgactgagtccctagtccttgtcctcttcctcagtcttgtatatcccatttaaacgtctaatcaaaagagattttgttgtaaaaaatggaacaggatgaagagaacgcaaaagctatatctttatttgagaatgtagttcgtattaatgatgctattgaggatgaaggaaagcgtctagataacctggttcgaggaatttttgcgggaaacatatttgatcttggttctgcacaggtaggattacctttctgctaatgtgtctaatttatgattttttttttgttcactaatggtagaatgggaaacataaaccaaaaatgtagattttttaatgagttttgtaagaggtacttgagatgataactgcttcttactttgaagcttgcagaagtattctcaaaggatggtatgtccttcttagctagttgtcaaaatcttgtccctcgaccttgggtgattgatgatttggatgctttcaaaacaaaatggagcaaaacctcatggaaaaaggtatgttgcagtgtaattttttccctctcatgaacttatttactctacttaattagctatgccaaatctatgtttctgaaatcttaacttgcttttttttcggtgctatttcaggctatcattttcgttgacaattctggtgcggacataatactgggtatcttgccttttgcaagggagttacttagacgtgggacacaggtttgctctcaaaaaggagttgcttctatgttatgcatatgatatgatacattttttattatcttttcaatgaaaaatttatagtatgggttcagagattttgtttgcctgttgatacaaaaaaaaaaaaaaacaagattcttttggccttttgggttgcaatttttgtttgtattagtttcatgtatactgtgtgctcagcttcatgtcttcaaattttattgcttgatcatcttgtgcttgtattgagctcagtagtgggggttctcttgacataacatccttttcttgttgtacaggttgtgttggccgccaatgacttgccttctatcaatgatgtaacttatcctgagctgattgagattgttgctaaggtgatttttttttcattattattttactcctaaattagaattttggctcttgtagttcttgacaaatacatggtgctttgccagttaaaggatgacaacggacagctcctgggggttgatacttcaaatcttttgattgccaattctggcaatgatttaccggtaaggggctggagggtcaattttggttgtatttggcttattaaaatgaggacatcctgctgtagatttaaccttttgtttttcaacttctttcaggttattgatctgacatgtgtgtcgcaagaacttgcattcatggcaagtgatgctgacctagtaattttggaagggatggtaagttcttagaggtttggtatttgcaaacttacagttttccttttaattattctaattatttaggggaaaaagaaaaaatttacctaaactaaaagaggttgcacttgtttgcggtttaaatatgcgtggagtagaatcatttgagaaacaaaatgagttctgtccattgagtacaatatttatggaatttcgcagggtcgtggaatagagacaaatctttatgctcaattcaagtgcgactctctcaagattggaatggtaagataagatttcttgctgtgtaatcttgctcgtagtagttttgagattcacggtaagcttatgatacatttttgatctttcattacaggtgaaacatccagaggttgcacagtttcttggaggacgactttatgattgtgtctttaagtacaacgaagctcaaagctaataatcttgatactgttttgtaatcctcacccatttatcaaaggttatgccattcaatacatgtattactattatgtaatgctcaatggaacttagagctcttaaaagtccatcctaatcaataaaaatgacatttattacatgaagtttatattcatttcatgttcctccattgactagtagtaaatttcatattcaattatactgagtcattttattgataaggttacaagtagacagttttaacttaacagcaaaaggcaaatgtttgcttttaaaggtaaggcaatatatactagtacaaaaatcattgtttcttggtgggaaatgaagccattttgttgatcccacaaagtccttcccgtttaccagtgttcctcttcattcttatgtaacccttttcaccccattttggtccccatgaattctttactatgatgttatctgttccatatcccacagcagtaaccccatgatttagcatagttgtacagtgcccgttaaacactccctgtaaaagctcaagtgtcaagaaaaataattcacacatcatatatatatatacatacatacacttgtgtttgacaggcttaccccactatagaactggaaatttctgtcagaagcatcaatagctacactaacaggttggtgagccaatgccttgataagactttgttcatcatttgatggcacatcttgataaccagttatggtcactacctccatctcatcctgccacagaaaaaaatgatgaaatagatgtttttggctcaaaagaaaagggtctatataatgttccttaccttcttctcttcacaggtaccttcctccataagataagggtaatcatcttccttgtgaagtccaccactagactttatgtactcaaatgcatggtccatcaaaccaccattgcagccattgttgaatgatctgtcacaatcgatcagttcttgctcggacaaggatgtcaaatttcctgtcacaatctggtttatgccttcaacagcagcaacagtggaaaatgcccagcaacttcctactcaacataaacaaagaaaatattaaaccaatgtagaagagcaccaaatagtcacaatatcaccatttctttctgtacttaccacatgaaccttgattcttgactgcagtgacagctcctttctttctccaatcgacagacttgggcaaatccactacatctctataactgaagttctcaaaggatcctgttctcttagtgaaatcaggtttgagtcccaaatacttgctcttaaactcttcatggctcaaatcagcaaactcattaagccccaaccagtaatcactaatttgcttatttgtttcatcaatgtgttttaagttatctctgaatatctcaaacctctgaaacttctcttctatactttcataaattttgccatgtttcgagatccacttgtcgaaaagatggacaagtttgtcaatgctagtgaggtgttcagaagaataccccactattgaaaaatcatcatgagctaatgaagagcaggcaaagagagacaaagataacaaaggcaaaattgaaagcttagaaagcaaagagaaagccatttgggtactattcaagagaagaaaaagcagggttagattttgatattgaatgatttagagagaatgatatatataggtgtattttgaggggtagcttttaagtgaagtggtgtaatatatatgctttgtttaggtgagtatatctttaagcctggttctctttggcatggcatgcttttcttccaagcatgatcatgatcatggttagtcatagactttgacattagaaaatatggttcaacgtgacaatatgataataataataataataattaagataaattattgttttttaactgacttgtccactttcttcatataattgctggtcttttgggtttttgttttgtttatgattcataaaacttacaaaatatatatttttatatgagtttaattagttattagtgatgagatgatgtctttgtaactttatggatgtagggatattgctttaaaaatatgctgagaactgagatacatggcgaaggttttaagtaggattttgtgaaagtcatggtggagagtagtgctgaaaattcatgagtgtcgtgttggccgatccacactttttttttatgttttctaaaatatgagtagtgttgtgctctgcactaaaaagaataggtagtgttgtgctaacattttcaaaaagtaggtctgataaggctcgtaggcttggtttgttagtccgtttttcttaaactaatcaacccgttttcatatccgtgctcaaattcatgttgtattttttcattttttttccaattaatgagttcgttattaaactatatacatattttatagtttcaattatatttatgcaatttttagtaaatttacaatcatataaaaaaaattattagaatttaaatatttacttataaatatttaatttttatattacatcctgtaaaataaagtattatatttaagtttaataattattttaacttatttataattaacaaatacatatatattattgttatatttttttttttttgaatgatttattgttataattattaaattatagaattttttaatgttttgtattatgcttttcaagctagtttattatgcttaccggtcgtgcttaagtatatattttttgtgttgtgttatatcactttatagtattgtgtcatgtcatgcttaggggtgcacatttacattagaaacccactcggtctgaatcctgaaaaactcgaaaaaatcgggttacaattgttgtaaatccaattcgaattaaactcggttcatcattggccgagttcaaatttcattaatccaaaactcgaaaaaattgggttatacccgaacccaccccaacacctgtatatatatagttttttttatatattttttgaaaacataaactt

SEQ ID NO: 377682 - DNA, 1662 bp, Cannabis indica
ttgacactttgctgatctccacaatcccttgtgtcaccttctctcttatgaaataatactcgatgtctatgtgcctggaatgattatgatacataggattcttacacaaatgtataaaactttgacaatccaagtatatcacaatagtatccttgagaaaattaagcttttctcacagtccttgaatccacaaacactcctttatggcctcagtagcaaccataaattcagcctcagttgtggataatgcaaccacgaattggagctgtgtttccaacttacatagttcccacacaccatgaattgaaaggttgaggtagacctccttgaatccttgtcactggcgtagtccgagtcacaatacccttccaggttcacatattccccgttcttcttgtaaaccaacccttcttcacttgttccaattaaatatctcagcaaccatttaattgcaaaccaatgttctttccttgtattcgacgtgtacctactcaagcaactaatgctatgtgcaaaatctagtcttgagcacaccattagaaacataatggcgccaacagctatagcataagggatcttttccatttctttcttctctttctccgtagtgggacattgcttgttggaaatctgatagtgggctgtcattggctgtttggtaggcttagatcccttcatagaaaacttttccacgagcttgctgatgtagttctttagcatgatgaccaagcttccttcttctctatttcttctaaggtccatccctagaattcttctggctgttttatatcaaatttagtctctaggactttcttcaagttttctatctttgcattaataagcaacatgtcatcaacatagagcaacaaaaattcggaattctcaattgtactccctctattgtacaaacaggtgtcatgatggctcttcataaattcttgtttcatcataagctatcaaacctcttattccattgtctaggcgattgcttcagcccatataatgatttccgtagcttacacaccaaatccttttccaaaccttgctcaaaaccctttgtttgtttcatgaaaatttcttcttccaattctccatgcaaaaagactgacttcacatccatttgctctaattccaacttgaattgaaccacagttggcaacattatccttatggtattgtagttcacaattggagagaaaatttcaatgtaatctaggccctcctttggtgtgaatctttttgcaaccagcctagcctcgtacctaggtttctcttcaccaactcctccatctttgatcttgtaaatgcacctattggaaactgcagatttctcgtgaagccttggaactaatatccaattcttgacgttaacaccttgagattgattctgggtccgaacccagctgtaataccgggtattcaatctaacaccaatcgcaaatccttgcacacaaacaataataaatcataaagtggagcacaaaaacaagaacaaaacaatacacaattcgaaccaatgaaaaaaagtaaaatcaaagaaaaaatacaaccgaattatagaggtttgtacttcctccaacatagttgagagcctatccctctctgaactccaaaaggaattagattcttgcactatatcgattcatgtctgaagttcaaccc

SEQ ID NO: 377683 - DNA, 1587 bp, Cannabis indica
cttaacaaactcctcgtaacagttgctccacgttagcacaagaagaagtgattcagatgagatgtacgcttcctggaagaaagagcaaggcgtacgcagaaaggatctcctgaataggaaagatgccagctggagccgactattcgaaacttccttccaagagagaacaactagccacccgcaactcccttctggaatacatctatctttctatgaccaaaacaactttggagatcttttcatttggatgaactataccacattatttttatttattttggattgagatgatttttccttttattttaaacgatattctagcactttaaaatattccaaacaattatatggtggtcgaccatatatggtggtttaagctattctttaggctcatcctaagaatggtgtgatgtaacagtgacatcagatataataataaacataaattaattttttattcattaatatacattttttaaaatattttgcaaacatttaaaattcttattttaattcattactataaaattagctttatccatcggtttataattttcttttattatttcgcatcggtttctaaaatttttggctatgtgggtgttataaaaatgtggaattttaaaagacagtttttaactgttagaaaaagttattttaaatgaatgtttaaaattgttagaaaaatttatttaaaatgattgttataactgttgacaaaaaatattatgtagattaaaaaaatacatataagctagtttatcatatatgaattattatttgaatttcactattttgtattacaataataatataaatttaatataaataaaaaaataaagaaataagaatcataaaatataaatttaaattattatgtttacaacattttcttagcaaaatataaagtatatacaaattatcggtttaatagacaacaaattcttaattcacaaacgtatatccaactcaaataattatactgaataataaataaattatacccaaacaattacactcaaacatatattcacaaacgttatgaatttcaaaatgagattcgaagcttaagagaagcccagaacgctaagaacagtggctggctgaaatgctcattggagctcctccacgggtggcggcggttcttggtcaaagtggatgcatgaaggatcaggccataaattcttgaaactcacaactccgacaaccctttttatgacaacagaacggtgagggagcttcaagagttatgaagctggggtcttcagaactaggcaagtctatctatggcatttgtttggacccacggtggttggagttagattcatccatgcatagtcgagaaagaagagagtggcaacgagagagttgatgtaaggggtttccaagggttgcaagcaccgtggtatgggtcgtttcaaccaccctcgactagagtagagagaagttaactaaaattattatttgacttaactaaaatttatgttgaacctgaatttaaaatttatattgagagaagttgaagaatactttttttttatatatatacattaactaaatttacctttaaataaaatttaatttaaa

SEQ ID NO: 377684 - DNA, 6752 bp, Cannabis indica
tttcgaactttacacttgataaacaccatatcttcaaaaccttttcatcaattggatcttgggattcatctcagcaaaaccagagcagtagcatttgtaaccatatttttataatctcctaaacaacagttgctgctagcatgaaattcaaagccatcacacaactttatattaataacgtacacataatatgtgtaattatttcgtcgcgtcgtgatacattacgtacatgtatagtttgacaaacttttatatatatatatatacccatttttatattcaataattaactataataaatatataaaatcgaaaggaaaagaatgtgtactaaagtaatatatcactatcatcattattacatatatatattaaaagacagaaaaatactattcatggacaaaatatatggaagccaaataatgtacgtactttcttattaatcaatattaagtataattataaatcttccttattaatatataatacatctgactctagctaactctacatatatttgagagaggtcgaatttgtaggccaaatatttatcaaattctctctctctatatatatttattattatacgtgccaaataagttttctagatatacatatatataactgtacatgcagtatatattataatttttaaagcatacatactaaattatattatgaagacaaataataatagtttcatgattgtttctttcttcttattaccagtaatccaactcttcattatggcatctccgactgacgcaggcggcggtggacggtggcaactcttgcagccaagcataggcatttcagccatgcacatgcagctgctcaacaacgaccgcgtcgtcatttttgaccgcactgattttggcaagtcaaacttgtcgttgcccgccgggaactgccgtagagacccgtcggagatggctctcaaagtcgactgcaccgctcattcggccgagtacaacgtcatcaccaataccttcaggcctctctctgtacagaccgacgtgtggtgctcctctggttctttaatgccagacggaaccctactccaaaccggcggtttcaacgacggagaacggagggtgaggaatttcaagccgtgtagtggaacaggagcaagttgtgattggaaggaagtgaacatggcactggcggcgcgtagatggtacgcaaccaatcatatattgccagatggaaggcagataatcattggtggtcgtagacagttcaattacgagttttatcctaaaagcagtgacaaaaatgtgcacagtttaccattcttagttcagacaaacgacaagggaatagagaataatctttaccctttcgtttttcttaacgttgatggaaacttattcattttcgctaacaaccgagctatacttttggactacgcgagaaaccaggttgtgagaacttatcctcaaataccaggtggggacccgaggtcatatcccagcactggctcagccgttctcttaccattgaagaatattattaacagcaataatgtggaagctgaggttttggtatgtggtggagcccccaaaggttctcgtgctcaagcggaaaaggggatattcttaccagctttgaacacttgtgcccgactcaaaataaccgacccgaaacccaactgggtcgtggaaaccatgccttcagctagagtcatgggagacatggttatccttccaaacggcaacgttttgattgttaacggagccgggtcggggaccgcggcttgggaattgggtcgaaacccggtactgaacccggttatttacagacccggaaataaaattggctcaaggtttgaacttcaaaatccgacaaagattccccggatgtatcactctacggcggtgctcctccgtgatggtcgggttctggtcggcggcagcaatccccatataggctatagattcagtggtgttctttttccgacggaattgagcttagaggctttcagtccgtcgtatttggagaatccgaatcttcggccgaccattgtttcgcccggttcacaaacccaactcaggcattcacagaaattcacagttgggtttagattttctggtaatttaaatccgaattccttgtcaacgacaatagtttcgccctcatttacgactcactcattctccatgaatcaaagactgttggaactaccaaagacaggggcagtgaggagtttaggaaaatcaacgtaccaagtagagattacaactccttcttccggtaatcttgctccttcagggtattatctattgtttgttgttcaccaagagattcctagccagggtatttgggtccacatcagctaattgagtaggactatacataagaaattgatgttttcgtaagaaagccacgtatatatataaataaatttattgtatttcttatataaacatatatgtattattatctctatctacgtgtgtattttatattgtgtaaaaattcacaattgtttatgacatatataaatttttaattaatgtattgtaacaagactctttttcccttcttttttaacattaaatttcgcacaaattaactgcaatggagaatctagtaggaaaatcttgagcaaagaaaaggtacaaattaagcgaagatcattgatgatggagcttatataattagtccttatgaaaatgttacgctttactaattcaaggaacatattacgtttaattacatgagttaatattaatacgtgtttgtgcataatatacttgaacccaaaatgtaattaaaatagaaaatagtaatgattaaaagtaaatccactaaaatattttagttaacgatatagtggtgtctaatacttttagaggtgacatttaacaattggttaacgatatttcttaaaaaaattatattaaattatatgagacccgatagttaattgaaccaatagcgatatgacaacaagaaaagtatttaatactactggtaccttttagcattttttttttcaactagctaggtcgaaaaaatctgctgtccctaaatctgtgtaagcctaaatctgtgtattaatagtaaactccacattagacagaaatggtaactaagtgtaacctttgttactctataaatacgcattaattgaatccttcatgcaaaggattagaaattcttaaattgcttgctcaagaagagaatagagtactcatactcactgtaattcttccttaggattttctagcctatctgataataatactagctcgtgaactaagactcgttgatgtcccaaccacgtaaaaaactttgagagctttcttcatattttattttcataatcgtatttgctttagctctaatattaaaaaattagtttccaaaaatctttctaagtcaatatcatttagttgatcttaggtcaatagaacttaatcctgagatggttaggttctagcttaactgtattatttgtgtctttgacatgttcgtcaaaattgaccaaatggatcttcccaatacttacatcttgggaacatgatagtacaattgagtgggagcgatagatcataaaatctataaaatctatagatgatatagaagatataaaaataaaatgatgatttggtttgagcttggcttaatagacataaatggaagagctcttatttcagtaattatattagtttactgaaatatcatttatagaaagctaagtgtttcaaggataaaatacattgaggggtgaaaccataaatttattttagtcgatgtaaattatctatagaggatctataattatttagattgaaacaatggataattaatagtgtatctatatttgaaacttatagagcgttctaagtaaacaagagtgcaattcttaatctatagtggagccaggatgaattaataagttaagaaatttacttgataaatttaaatttcggatctacttattaggatcgcttggttgcataggcccatagtctccacattgtctgagataatattgtcttgtagactcaattaattggttttaattagtcaattagaattataaataagactatgtcttgtttatgaattttcactaagcaagagcttaattgagaagaaagaggtgatttaagatttatttattaaatgagagactttgtaaggtctaattaattaataagttaaatgacaattttatttgataattattaaatggatagatttgacatttataagattagaagtaaaatatttcatttgtgaaaaaaaaagtgaagttgttaaataaaattgcaaaattgaaacctgtagggctcacatagggttcggccacttacactacaaaacctcttacttttagtcacaacaaaatttatgactaaaagtaaaaaggttttgactaattattaattatcatttctatgttgtgactaaaaggtccgtggctaaaagtattaatcacaaaaattacaatttattgtgactaaatgtagttttagtcacaatacttgttatgactaaaagtaaattagtgacaacttgtgtctaaatacgatgttttaatcccaagtagttttttgttgtgaccaaaagtcacatttagtcacaaaaaaattatattgtgactaaaaagttgttactaaaaatagctattttttgtagtgttaagggtttattaagacattattttatctttttcaattacgaataattcaaattctaaccctagatgaagtcctataaatagaaagagatgactcttattttctaacctaataacttaacctagtttttactttgtcaaacaactttttaataaagagagagcctctcaaatttcaaaatccattcttcctcttttggaattttcatgcccgttagtcaattgagaaatttttcatacaattcaagcctatactcaagcctttgtggaagattgtgaagaattctaacaacaaaaaaagatccaagtttagatcttgatcatactcgacgacaaaaatgataaagagttcgatatctaaacgaaaaaaggcattatattctgctgccaccaatgtaagaatttcttaatcacttatgtgtttattttattgttttaggtaattcatatttaggatgttagattatagaattataatcaagatacatgttagtaaatctaaatcctggtaaaataaattccaaaacaaaagcctaatgggacatggagaatatttatagatttcacagatctgaccaaagcttgtctaaaagacttttttctacttttgtcgcattgatcagatgttcgatgcaacctcggggtatgaactattaaccttcatggatgcatactcaggctacaatcaaattaagatacatgtggctgatcaatagcacataagctttcaaactgacgaaagaatctactgctataaggtcatgccatttgggttgaagaattcttcaaaatgtttaaaaatatattggagaagaatatggaggtttacatcgatgacatgctagtgaaatcaaaaacttccgtgagccaaaatgatattttctgaaattaaggcaaacaaaatcagtctcaataattttatgtcaataaaaaaaagggaagtaccccatagattattttttttattttattattaaaatttacggttcaggtttctaaagtggtttcttcggtggtttctatgtgggttgttatataatttttggtttcgatttaggttgctctgctagttgtaatagagatttttatgtagaattctgtaaaaatgtaaatatatatatatatatatgttttgaagtagtaaaaataaaaaatccctcaaaaaatcattctcaataattcagttctttcttcttttttttttttttttttttttttctttttaatgtgaggtagatagtagatactacatagttctttgatactttacacagctaaactcttaacaaactatattgacatatttactccattattatgataaatgaataacaaatctcataacaatgctcaaatttgaaatagttgtccaacttattctacattaatgaataatcttcaaattaaaagcgtgcacacacacacaaacacatttttcgcattgggccatcccagccaccatgattgggcccagtagtgaagtgacttgggtagcccacgtccaaacaaggtgaactcatcatggttgcttcaaaggcataaccttgttataaattggatctctacgtgggattgtgagtcaaaccaaacctttgctgttcatttatagaaaaacatcaactctaattttctcacattaattacattagtacgtacacatatattatgtacctaacattctttttcccaatcacaaaaatcagattcacatatatgatatatatatatggggttctattgggagatgacaattttttttaaaaagatattgcaattttcttaattagtaactattgataaataattagaataattaacaggtcttgctaataaaaatataactgtcacacatggatatagacattgaatatgtcgagttgggcagtcccattaacgtggtaccatatgattatctgtagtttcggccaactatatatacaaaataattataaatcattcatggttacgtaactttcttctaataagccaactagtttctttcttccaattattatatacaaataaaaccatatcctatttgcatcattcctattttttttttttttttggaagaatcctatttttaaattgaattattatt

SEQ ID NO: 377685 - DNA, 2565 bp, Cannabis indica
agaaaaacatgattatctttggtcagtttcgacacactaactaggttcttggtgatatgagggacttttaatatagagttgagctttaaaggacgagaagaggaaggtaaagaagatgtaccaatatgggagattggaagttgcttcccatcgccaacagcaagagtttcttggcctggatagggagcctcataatcgagatgttccatcccttttgcaacatgactgttagccccagtatcggcataccattcttgatcataagcaaaatcaggaatggtgtgggacgagtaatgattctgatctccttcatccatttctgtcaagaatgcctgagattcaccaagcttgggaggaacgaatgatttatcgaacctgtagtggcacacagcagctgtgtgaccacttttgtgacaaacttgacagattgtgcgaggattgccatggctacgacctcctgagccatgtccacgattgaagggacgattggaatatccagcaccataaccacgacctccataaccagcagatcgattgtttgtagaacctgccccaaatcttgacgatccaacagataaatttgcagaaagaccagataagggggctccagtggtgtaatgacgctccaaccgactttcatgagtaagaagcaaggattgaatcgagtcgaaagataggttatccaccaaactcgtgacatgaaccacaaccggatcgtattcggggcccaagccatttaagagatgcataatgagatcactttcatcaagagggtggccagcagtggacaaggaatctgcaagaactttaactttgtcaaaataatctgcaattgaaagactacctttctgaacggtggatagctgagatttgatctgaagtaatcgggcttttgactgagatgcaaatctctgttcaagggcacgccaggcagaggaagacgtgacatggtgagctactgatccaagaatcgattccgacatcgacgatcgcagccagctgagaagaagctgatcttttcgtttccacgcaagaaacattgggttttcttgaccattaaccatcctttcttgtggagccacaccagcaagaaggatatcatccagtccatgaccaatgacagtagggataacttgtgatttccaggcgagaaagttggatcgatccaacttgacggtgagtgaggagttgagggaattttgaaacgggttccagttgttctggagagtagcattttgatgttgaggcccttggttctgaccagaggggcgtggtgggttttcaacaaaggtaggatccatagaagacttccgtcaatggctccgataccatgaacgatcttatcaatacaagcagtaagaactcaagcttgcaaaagatgcagagcttgaagacaggtattgtatttataggcaaagagtctttacaccagaaaagcaaaacagaataaagaaaagaaaacagacaaataaccaacttggacagaatacagttggacagagttaactaacagactaactaacttctgttacaggttttgctttatcaaagagaattaacttgcctcgggagcatttttgagagctgcaatatgtagcactgtgtttccttctccattttttccattcaaaatctgttttttcaattcttgactactctcccaattattcaaaatccatttcacaagccactgaaaaacatcatattttcctcttttcacagcaatatgcaaaacattatcctgataaattgtgacatcttcaatggcctgtgggcatgccaataaaacataatttataatgtcaatgcttctgctttgatcatccctttcgactgcgcaatgcaaagagttcttccctcttttcctttgacacgaacaagttgagtgtcggcttctataaggcgatgcaatatcctagttctccaattcttcaatgcaagatgcataggagtgaatccatctgggttttgctttcttgcaaatgaaggcttcaacctcatcatctccatagtgaatgaggcattatcataagaagctgatatgtgcattggtgtgtctacaaatgatatggcatcaattcgatccaataaatatggatcctttcgaattaatatgtatatcttgtcgttatccccttcacgagcagcatcttccaactcctctaaaatacttttctcattgaaataattaattttaatatttgtaacaatataaattacacgttagtcatgattaataataatactgattatgagcatatgattgaaaatgaagtattctaaaaagggttagttacagaaaatacaaaaaatgtaaccaaacttctagtaatatccgagttggccctgagaatatatggacctaagtcgaattaaattttagggtccttagaaatatatataaaaaaaataaaaaaaagtgagataggagattcgaattggataataatatatttttttttaattttttaattttgataccccccgaaatgagtggaccctaggcatggcctagcccgcctatgcctagggccgaccctttatacccctgtatcatatgaggtt

SEQ ID NO: 377686 - DNA, 2515 bp, Cannabis indica
gaaaatggttcaccaatctttaaagacaatgtatgagcggaagtagtgggacttgggcttggtttggctccttcgaagttgagtttagtgagcagatccgtaatatacttggactgagaaaggtataaaccagtatgattgcgtagaacctcaactccaagaaagtagtgaagattgcctagatctttgagtgagaattcagtatttaaagaggtaattaagtcattgatgagcgtgcagtttggtccagtcacaagtatatcgtcgacgtatactaataaaatgatgagagagttggcagcaccatgaataaacagagatggatctgatttagaggacttgaaacccctggagaaaagtgtggccttcaacttatcattccacgcccgtggagcctgcttcaagccatagatggctttgtgtaatttacacacatattgaggatgtacagggtcttcaaaccccggtggttgagccatgaatactgtctcctcaagagttccattaaggaatgcattagagacatccagttgcttgataacccagttgtaagagactgctaaagttaatatgatgcgaactgtagcagggcgaacaacagggctaaaagtctcttgaaaatcaattcctggagtttgatgatatcctttagcaactagccgtgacttgcatcggtcgagacttccatctgcatttagtttgaccctatgaacccatttattgccaaccaaattcatgtaggactgatatggaacaagtgtccatgtgccatttcttttgagagcctgaaattcagatgtcatagaagcattccaaataggattagcaagggcctgtttgagagtttttggttcggttggtaagagagattcaggcagtgggtacttggtggcaatataagcttttggtttagaaatgcctgctttggatcgggttgtcatgggatgtatgttggctgtgggagtaggctgtgggatgagtgggacagtcgagacagctgtagcagttggtaattctgggtgagagtgagatgggaaggcatgtgtatcaggtggatgtggtaagggaacaacagcagggtcagcagatggggaagcaagagtattgcttgttgttgcaggattaatagcagctgtggcatgagtctcttgattcatagggacaccagcagtgatgacatgttgagaagagctgcaagatctgtgtgagggtctcatggtgggaacctcagaggcagtagaagggcaattattaatatgtgatggtggaaaatcagtagtgaatgagcagtgggaaaagaatgaggtgaagtggacattacctgctgagtattattgggcagtaaggctggaaattcctcctcgttgaagacaacatttctggtaatgtacactctgcccgagctactttcacatagataccctttatgttgcatggagtaaccaataaaagtgcatttttcagatcttactgccatcttgtgagtattgtatggccttaagtatgggaagcaagagcaaccaaatggtttcaagaaggcataatcgggttgtttgtggaacaaacattgataaggagatatgttgtcaagaacaggtgtagggagcctattaatgacatatgtggcatgttgaaaagcatgccaccaataagagagatgaagacccgattgagcaaggagggtcatacctatgtcattgatatgccggtgtttccgttcagctcgtccattttgctcatgatcatgaggacatgaatgttgaaattgtatgccattttgagccaaaaatgcagcaagagagcgatactcccctccccagtcagactgaactgacttgatagggaggttaaattgtttttcagccaattgtctaaactgaaggaaggtagaaaaggcttgggattttaaggtgagagggaatatccaagtaaatcggctaaaatcatcaataaaatggatgtaatagcgaaaaccatccttggatggaacatgagatggtccccatacatccgtatggatgagttcaagaggggaggaggctctacttgtggacagggaataaggtagcttgtggctcttacctattttgcaagcatcacaaaatttgagactttttaaggtgcctgtatggttgatattagaaagaactctagcaagagttgcagggccggggtggcctagtttggaatgccagatattaatatcttgtgcaacattaatgtggaaaacttcactagctgagacaatagatggagaagaaattgtattgtcattaatattgggaaaagtacattgagttgggactgatgacacagtccctttattacattgacaattacaaacagaagataaatctgcagtagatacagaagtgggttcttttgtagctaggtgacattgaagttgaattggggtatttgaggcagatggttgagttagcatgtacaagccattcttaactctccctttgagcaaaactttcccggtgctcttgtccttcacaaaacaacaagt

SEQ ID NO: 377687 - DNA, 2585 bp, Cannabis indica
tttttatataaatatatttttttacgtagtgtaaaaagaattactttttgattttatgttataatgaagtagttaattaaaaatagaaatttttctcttttattatttgtcattggataaaaatctaatgttttaatatttttaaaattaatatttatagttaaatttatttagtacccatcaataggtaatacttattgagatctaaaatattaaaaataaaattttacttatttatttatttttagattggacaaatctagtctaaacaaattattagatctaaaatattagatggatatgatctgatcaaaaaatattaagtctaaaatattagatatatctgaactagtccaatagatatacatgaaatatatttagtggatagaaacggatttaatgtagcatgactaaaattaattgattcggtggatggtaaaatataacatctaatatataattgaatcaaatttgaatacacctaaaaatattaaatatggtctaatgaacatccaagtgagattgaactagaagttaaccaaacacacaaactttgcaagaccataatatacacaaccttctttatcaattcataaatagggtgattttttgatagtaggactacactggttaggatatgatttaaaaattgtagtaaaagaagaaatatagaagaataaacaagtcgtttattatctaataataaatttgaagtaagcaaattgaatgcaaaatacatgattaaatagagatttgatatgagaataagaatgcattttgagggtcattaataattgtaatttattgcaattaacaattgttcagctgaattttgtttcacaaaataattttacaatatttattcatctaactagaggtaattgagaaatgttaatgacacttttcaattctgattctgatagtcccaggagaatcagaggtaattagactacataattacacagaaatattattatttttaaataattagttattataaatgtatattttttcttgtctaattattaactcgatcttttctaacatgtaagtagtatacttgataaaagcataattatgttgggtaaaaactatattacactatttttttttgaatgcactacattactatttagtactaaattggtaattgccctatatgttattaaattacactatttagtaattacttgattggtaactacaatatctctggtaatcatcctaaggcgtgtttgaaagtactaagtaatgactaagttttgcaattatgtactaaagtagaaattaaattatactatatttttagattaaaattacatttaaatttataacattaattacacatgaaattttagtgtcttataagcttgtaattgcaaaaataaataattaatatttcaagtaaaagtttttagtaatatacatcaactttatgaagatcatgagaattatgactcctaattacatgtaattacagtatattgtattctattattatattaaatggtatgttgtattgtataattatattaatgtattatatgttacatttatttttgtataatattatatttgatattgactctcaaatacatgtaaatatataatattttaatataaattaacatttagcatatagctattatataaaaatatcaaaaataatacaatttaatataatattgtataataggatgaaagatacccatattatgcaatttaatatggtcaaaacaaaatgtaattaccttaaagtttacctagttcaattagaggagactgtaccacaagttttcaatcagatcaagttaaacgcaaattattgaatttcttttttttttttttttagttaatagactttaatattttaaatggcatgctaatcaattaatgaccaattcatttttacactcccagcataaccaaattgtttaattcttcaacatgatgaaaccaactttggttaatattatttataaaaatgcctatcttatcaaataaaatgattatatttatcatcaaatttgataaaattaaatgtagagtgttgcatcaatttgattacattacgtatataattactgttatatattgtacatcataatcatacatgtttatcttattttgattaataatttatttttacattataataaattataaataattaataaattattgcaatattcttataatcacaggttgtgcgtcttcttgaaggggaaaacgagcatttccatcgctttggtgatcaattcataccaccttatacaaagtgaagcaagcaattatatatactccactcgttcatttattaattaatttatatggttgttattaaaacaagattacaaatatatttttgatcaatgtccaaatggcgatcactaaactaaattatcaaaacaatatatgacgtatagtaagcttgtcttcttgatgccctatatttcaggcaaaataataaaattttctatttaaaatttacaatttgatgttgacatattgtttattttttttcttctaagaaagtccatttattaaaaaaaaaaaaaaacaaaacaaaggctaaaagccagcta

SEQ ID NO: 377688 - DNA, 2309 bp, Cannabis indica
ctttttctttttttttttttgaaatatttttaaggcaaaaagaaaaactatgaatggtcaagagaaaatataggaaaaaggtccattttgagtgtttccatagtcgagatggaaaaggaataatgagcactcataaatttacactttttttttctccttctcctcaaaagtcacaaaatactatttaaattattttaatgctataaataaagtaggggtaaagtactcaaagactcatgaaattaccaacacattggaatcatagatggttagaagtttgtgtagagataacaaaaaaaaagattttatagagtttgaaaccaaaaggaaatatcctctattcctcttgcattagactaaaagaaaagatatttgctttgataaattttatgtaatgtgaatgtgatgtgactccaaaacttgtctaaaactaaaagcatcactaaaagtaaaagaaaccaaaatagaattgtatagaaagaaataataatagtaattgtgggtgttgtactttttacaagcatgaaggtagtgaagtaagaatagtgtttgatgagatgaaacaaaatattgatgtgtgttttagtacattctctaattgtttctatatttatgagagtttttactcagttcctttattatcacatgtgttgtacttatttataattatttgtaaaatttaaaaaattataaataatttatagtactaaaaataagattaaaataattattattaccacacctataaaatacagtaatcatgtgtgcaagaaaaaatttaaatattattttaaacagtctaaattatttataattttctaaaaatttataagtactcctaaataattaaaacatacacaattataaaaaaaaaaaactaaactaaaaactcttctaaataccgaaataaacagaaaatgtatcatctataaatttttccaaaaatattaatatcttttttctactgtgttttacaaaaattaccaattagaccttctattttgttaaatgataaaatagagtatgtattttctaaaattgtataaataggatcttaaactaattttttgtcaaaataaaacttaataataattttatctagagatgttataataaaattggttacattttctgtatttgttcgtgttagaaattatcttgaagtttattatattaaaaaataaaattgttaaaaaattgaacttagagtcttatttttactattttgaaaaatatagagtctattttattatttaacaaaatagaagatccaattagtatttttttgcaaaacacagagtctaacattatatgattcctaaaagaaattatgatattaggcattattatacgatataatttggtgttagattttataatttattggtgtataaaggaaagtaaacttatgctctcaaaaaatgtatttggcttctttaattttaatttttcttcagatgatgcttaacaccacagatatctctagtaacaacattctaataaatcttttgcatatataaatacccctacaaatgatcataataatttcattgctttatgtgacaaagattgatatatgtgatatgaatcaattgaccacaaactctcaatatctttttttattaattttttttaattgattggctttatgggtcggtagccttagtggggtttgctatgtgtattgttgtttttcataataaaaatgcatcttcttttttccccaattcaaaggtaatcaactcaccacaccacataccataccaccctttccattaccaccaaagccacttcaaaattaaaatacaattttgggtttgatgaaccacaacaagaacctaagaaaaataaataaataaagattaaaactttgccatcaaattaaattatttaatgattttctttaagtaagaaggtgtactactgtcaacttctatatccaaaaacatatattagtatattttttttcaatttttttttcatggtagtatttattataattacagtatcattcttgtaaattttaaaattttttgaataatttatagtgccaaaaataacttaaattttttttgaatacacgtgctagactggaatatcaaaaactcaattttctgtatggtaaactattttgaattttttaaaactttacaaggatgatattgtaattacaacaaatatcgctataaaaaaatattcaaacatgatttcgaacgtagaaattgactaagaaattataattagcattcattttagagcattgttattgggcactagtgatgcttagcacccttaagacgtgtcgtctt

SEQ ID NO: 377689 - DNA, 2115 bp, Cannabis indica
aaaaaatactaattattttatataaaaagttacatatggaaagcagaaaaaagttactaaacaataaaaaaaaaaataataaaaaaacaaacatgtgaaagacctaaaagaagatctatagtataataaaattaaaaaaaaaataataatgagattagtatataaaaaatgaggtttcatattaatgacaaaaagttgttattattatttttggaaaggtgtaagtagtcgattttgtttttaacgagtgtagtagattattacatatgcattactgaattctttcatctcatttggaatgatttaaacttaatagtgataattaagttaagatgagagagaaagagtcatgtgaagtgtgtgaggggtgacagaagcatcgtggttgtgtgtattagttataaacgtgtttattgctgggtgtgtgattagattactcatccactactactaaacttgcttttttcgttagtctagaaccaattggccaattttacggatagatgcgatcaagtttgctaaaaaatgcgatgtatgccaccgaatttccacctatgttaacagacaaccaaatcaattaaattctatctccaatccaatggccattcaaagtctggggcataaatttaataggcaaattcccaaaggaaaaagaggaataaagtatacagtagttgcaatttaccaagtgggttgaggttaaggctttagcaacaataatagctgcaaagctacacgagtttctttatcaagcaattatttgcaggtttggaattccataaaaattaatttctaataaaggaaatcaatttaaatgtaaagaaatgcaaaagatatgtgatgatctagggattcaaaaagcttttcagtactcacatattgtcaaagtaatggtcagaccgaggcaatcaacaaaataatcaagcacaccataaaaggtaagctcgaagaacgaaaaggcgtttggccagaagagctgccgcaagtattgttatcaaacaataccactcctcgctccataattggtgaaacctccttttcactctcttatgggtgtgaggccatggtcacagttgaggtaggagccgaatcgctgagaagagatgttttcaacatcaaagccaatacagaaaatcagttacttcaacttgatttgcttgaagaaaagcgcgatcaagccaaattaaaaatgtggcctaccaaaagtgcacagccttctctttcatttcaaaagtcaaagaaagaagtctacgaataggagacttggtattttgaaaggtcatgcctaatgcacgcaactcggcgcatggtgtattcggtgacaattgggaaggtccttacctaagcgctgagaaaattggcaacacaacttatcggttatctgatcccaatgacttagtcctcaatagagcttggaatgaagagcgcacttaaagtactattatcaataatacctgcatgtatatacttagttaacttatgctctaaataatctaagtatagggggtataaacgtattgtattactatactattaacaattttcaaagattgaagtttttatacttctcgcatatttgtacttagaaaatttcgtggaattttttacttttaaatgtgaatatcgaaattttcgtgatgttgggaatattttatcaggatctagatttactaacaagtatgttgaattgacatcctaaatatgaatatctctaaaacaataaaattaaacacataagagtttaagaaaatcttacattgattgcaggggaatataatgactccttccattcaagatctctagcccttgaatgctttctgtcgcagagcattatcaagatctgaacctggatctctttctctccttcgggtttggttaccgctgtcttactcactatgattgagtacttgactttctatgtgtgggcatagcactctttcactcaaggtttgaatatggaagaacaatgatggaggctaaaatcactaagcaaggaactctctcatccactagttctcagagaatgaaaactagatttttgtaggtattgaatagtcaagttgacaagctgatgagatgagagcatcatgttccttttatagtgtttcaactagg

SEQ ID NO: 377690 - DNA, 7572 bp, Cannabis indica
tttttcttctttcttttctaccaagcaattctaacatgtctttggttaaatatagttctttgtgcataatatattagatgagaaacaaactagtgatgaaactttccaataacaaagcaactgagacaacttctaatttcttttgatgaaatagtcatcggaacagaataaaaagctttaaattgaaaattttgaaatctgagaaaaaaatcaacccctccctaaatttgatgaatgcaaatcaaaatgttccattgcaacttctaggaatcaaaacagaagatcatttaatcaaatgagccacaaaactagaatcctcttctccaaggattcttccaagattgagaggccaagccgccttgacagtgatgactttcaaagtgtttagtttgagtgcataagcatagttttgtaaggattgttattaagtattttaaggtatcaaatacaagtgggcaactcttgactgtgacttcgagggagagtcatgttcttactaaagttgccagaaactatgggtttcttgtttacatactttgatgcatttgtacctcttgtatttactaatggcaaatattgcccaacgttctgaaatgtggatttacttggtgtcatatttgccaaataggactggataagtgtttagggttgcaaactctacagaaaataaataacgaaacaaagattataacagagtttattatgtaattcgacttttaaccaagttctaactggagtgtttgctagtcctttgcttaaagcatcattttttaacagacattactcagatcagaagttatgctgacaagattctttttgcaatttctatccattaaattttactccattttcatgctaattttagatacaacatctagagtttgagctagaagtgtatgtatattacttaaaaattaaattaaattccgattctaaagtgcatattctgttaagtatcaaaagaaaaaaaaaatcaatgaatttcaaatatacgtccaaggatgtcctcaacaaacaaatacgaaaacaggacctaaaagaacctaattagttcttatggaatgtgaactatacaataatccattagacaccaaacaaatacacatcacaccacattttttggaggttgggcacatccctggttccctatttcgtttctctttcatttaagtgagaaatgacaaaactaagcttaaagttacacaactaaaaacacatcaaaatcaaagtaactattagccctccatatttgacttcttccttttcccttttcatttaaccactagctttattctcttctgtttcttttcttccttgttcctccttcaaagcacaaatttgagactttgtaaagcttgcatcttattagagcaaacttatttctcaaaatcacacttccaagcttcgaaaagctgttcaaaggcttattatgtacagctaaggaaaagactaaagtcatcatcactcttttttttccttttttttttgtttgcttaatctttctgttattctagattctttttactaacagaaaagaaattgggtaggtttcatcccccatgaaaaataataacgggaggaagagagttagtaaagcattagtcactaagctggctttcataactagattgtgatcttatgatttttgtatatcaccttcgcagaatttccacgaatcatcatcttgcctttgcagaacataccgaattttgtaattgctgcaataaatccgaaagagacagaaaagtatcgatcaaactcgacatcaaatatcaccgaaaagaatgctcagaagactctacattaaactaagaaaagaacatgaaaacatacagtaccaaagtattccaattaggtgtgctaacaacaacgcaccgagacacttacttacctataataacttgggttcttctttagctcagattcactaacaagttcagcagcttcctccaggagtgcttcaatttctgctatctcttcagtcccatctgacaaaatttcagctcggaggacagacaattgtagcaagacgaacttccaataacaagacttggcttgtgcagcatcagccaatgtatgccactaaaaggcaaaaaaaaatcccataattagcaaagagccaaaaaagtagacttgagactaagaagtatatttcaataactgagatccaaaatctactagttatgacttcttctcgggatgcataatattaaaaagtttccatcaagtttaaattttgtatttaactttgacaaggtgagtcagtatttttgttcaaactatgtcaagataatgtcgatttcttgtaattgctagtactttaatctaaccaaatatcatttctttcaaaggccaattagataacgttagaacataatttaaaagctgatacgagccccagtgtcaccaatgttggtggagatgaaattgtccataatattaatcatacagtagtcctagttaaaatgtgttacttatttgattaggtagctacaccaacatttaaataataataataaaatatagctgattaactgaaattatattataaataaaataaattcacaggccaacataggactttctataagtaaaagacccaactgcacaagattattaggacgaaacctatgataaacttacctgaacgagcatcgatttgtcaagaatttcagagagactatgaacttgatggctaggacccagagcttccgccttaattgcttgccattgcttgacaagttcttcggcttcttctataggcatgcgcctccgagacattgttcgcatagaagacgatagactggcagcaggcaatgaggtttgggaatttctagaatctgagttgttttttagaagtgttgtaactgaagccaaaaagtggttaagtctcccaggaattccatcccccttgatatatgcaggcactgaattgttatctatagaagaatctgttttccaactaagggaactgccattcgaatttgatttatttgggacatatttagaagtatttctcatcttgcttacactcatgcttgttaactttaaggtagcaaagaagatgcaccccagaattgcaacagaagtaaacctactcaacaagtatgcctgagaaaaccaactatcccaaactttactattatgcatgcttaaattccttttcaattgcacaggtgatgcattaccactgctttcattgttacttttatccaatattaatgagctctgcaaatcgattggagtcaactgctttacagcagtacctagatgttgagaagagtttacacaagaaatggaatcctcaaattttttacgctccgacaaaagtgtgttttgcattggtctgtgaccaacaggagaattagctcggagaccacctacatttttcttgctcccgagagttctcctttcaccattaaaaaagtttacctgcataaacttaaaatataacaacattcaagttcgaaacagtgaataaaactgatcatatatgaatctcaccaaatttggaggacaatctcgtgtatctggaaacacatgaagcacagtatccttcaaccatgtttcctggtgaaaatggagcagacagtcagtcattttgaaaggggaaacaaagaaaaaagaaaaaaaaaaaaaagagaatgatttagaaattatacgtattttgcacagaaatttttttttcttcaaataaagaacatgttgactaatggtttggaataggatctgtttcttacgaaacaacagtatacataattataactatatgcaagcccatcagagttttatatttattggagaaggtcttaggatccacgttacatgccactgaaattatatcaagaggataggattatatctactagccaatctagtaaactagaaagacaatgctgaccaggatgatttacttcagatatgacaatgtgaggcaaatgcttctagcggaatgaagcatggtatataataggcattcaagataatgataatgtgaggctcatattaatgttaggtatacattttaaaggcggaattttaatgcacgataaagcataccaacaattgatttccatcagaagcatctttgatatccctccccgagattgatttgtgtggactactattcaaatttgaaacaagctgcttaagtttttcaattatctcatccttagtaccctgaaaccaagatatcaccaaagtacacctttgaggaaatgcaaagacaacaaaaggcttaaattcatagctgcacaacgcaagacaagaattaaataaagtaggaaaataaaatatatacctgaccaagaaggaataagcaaaaagcttcctccaattttagatcaataccttctgatgctatcaaacactcacagatggttttagctttgctaatctataaatgaataaagtaaatgagacaaacaaaacagagagggaaatgcgaaagtcatcagtaggtaaaagttacaatatgcagcattgcatgtctacaaaaagttaccatctctctttgcttgcttgaaaacccaaccgcaatatgagctactaagaccacgtagaaacaatgaaagtcaacgacaactctttgattttgtgactcaagtgatttcttattcttccgagtagttgccagatcatcccatgcatgaagatcaactatctctgcagccatgagtttattaagcgcttggctaaagaagcacgaccaatcttggacttggcatgatgcctctagatcaaggccttgtctgagcaattcacgtaatgctttaatagctccttgtctacgctcagcattctcaggtgagttaggcatccccaacaactctaatgtgcaagcaggggctagctcctccaaagattcttcgatctaaaagcacagcccaaaaattgtggaaaagcttaaatcaaataaatctaatttctctctttcaaaaaaaaaataaataaataaaaaataaatctaatttctatatatagtaattgctgtgcagcaatagatatctgtggttataaggataatcaatgtcagccagtgaaatatacaatattgtcctatattctttcatgatttcttcatttttaattgattaaaatacccttgctattgatttttgaacacgttcaacatcaatctatcacttttgaacaaaaattctattaagcaagagtgcatgcatctatgtctataataatcatgaaggaatagttacaattcttaaactaataacaattaataagggaaaaatagaagtcaaagatcgtacctgagataataacgttagttcatcaaaaactttttactccttagaagagattgagctcgagcaagagcttcaaatccttgggataccttgttcttctcaaaactgatctttgcaattgcacacttcaagaaagcacctatgatagaaaatgaggcataacaaggcagctagaaaaagaaacaagatcctagcatctttccttcaatgtcttacctcagctagcgccatggaaagaagtatatcatgaatatatggtttagcatctggatgctgaagagcaacacgaccaatatctaggacgagctttacttccccacctggaatggaaatggataacaaaaagcataaatctacttgcaggttgaaagagaaattactaacgattatttagagttactattgtgaaaataaaaataaaagttcaatttttttgataaatgtatccattaactgaaaacaaattacaaatcaaacaacattcacggaagagaaattaaacaaaagacactctacctcttgaagtaggcaaagagcacccggcaaccaagtccacagaacccgaagtgacgatttaggtgggatcttttcccttgtattaccagcatattctggttcaaagagaagcttatctctcacatccattaaaagaccctgcaagcaacacgagaaagaaaaagtatagtgttttccctttatattataaataaagaaaataaaaggtcaaaaggattattctttaaaatataagaagaagaacattaaaagcccatgtccctaccttacgacaagaaacaacatccatgctataaccctcttcaatttcagcattttttaaattcatgacagatttaacaatctcatctttctcagcttgatcagtcacaccaataagctacaagattattcattgtcagaaaaattctaaacagaataataactgtcatcacatgatttacaatgacacagagatttataattaaactggtaccacagacaatgctaatcctgaaaataatagtgataataacaatttcagacataatcttcctatacattgcaaagtaacaaaaattccagctacaaaacaaattatgaaaaagaatagagagtttaggggtaaattgacctggtagcaagtaacagggatctcaacagtggtacgaggagcagcagcagcattctgaacaatgcgggtatcaacagcgctcaatctccaccgtccattaacagaaggagagccacaattacccttcctccacacataaaccctagaaatggcgatcccagaggaggaagaagaagccttcttctgatcttccttatgaaaattggaactgtagtagtaataacaatcggtagtgttggtggtattgctggtcttggttttggaaccggtcttgttgattcggcatagccaacaggtagagggaaggcgaggcagagcttgagccaacgccatgggaggaaaggaaaaaagctcagaaggatgaacaagaagaaaaagaagaagaagagataagagggagaatcagacattgcagaaaaggttgagagagcttattgaatggaaaaagcaaggaatagagattggtgccatggctttcggaaaagccatcagaggaagaagaagtcactgcaaaatttttggtcagagaaagagagattgtaagtaaggatgatttttattttaataaattaattaacaaaaaaaaaaaaaaaagagagagagaaaatagttgggttctgctctagaatacaatacagcggttgctttttttattattattttttctttttgggtgcattaaaaaagagtccattttactctctccatttatttcagtatttttttactaagtgattagaatttacaatgcatatattcgtaattaatgttcgaacctctttcaatcaggataacttatcgtctaattataattatgggctactaaattctcaaaacgagccacatagaacaaaaccgtctctgaaaatttagataataaaactataatatcttcaaacaatactcctagctcattgaaatacatcttctcactattgatagtcgtcactagagctaacgaagctgaaaaaaattgtatgaattgagagaccatacatatggatttaaacagtatgttacacacaagactcctttattttatacgcaagtgaaatagattgtttgaactatattttcgatgtgttaaattttacaagatgtcctaaataattatgacatagataactataaaaaaaaaaattagactaatttgttttttaaatgccaaaataaata

SEQ ID NO: 377691 - DNA, 6514 bp, Cannabis indica
ttgttttttattattattatttgttgttctggagtgtatacgtatgagttatgaccatctcataatattagtgaaaatttatagcattttggtctcaatttcaagttcattgttcttgtattgctaatctgcttttaaagaaatggataggcattaaatatgtgtttagtctctaacttaagtaatatccatgtatttgtaggatctcacaagcccgtgtatccatcttcgaaaccaagatcaagagactgggataagttagaagctcaagtgaagaaagaggtataagccaatgaataagttgttctttctgttctacttgtcgttcatgacaaattggaaggaatttcagttttgcatcatttcccaataagattttcagagatttgcagtgacaacaagtggtcactttctcttgttcagtaagattttaaatgactgattgttaggcctcaaatatatgctttcatatccaggtgtatgaataagttgttcagtttagttcctttagggttggtcgttttgttaattaattagttagattactggtattgcttttttagttagtagccgagtctatataaaggctagtcctatcttactagagatatcagttagaatttgtgttaaagaaggtgaaatactttctggggagataccaaactgtcttgaaaagttttgaactttgtaattatttgataataataagattcttatattttaattctttcaagaactgaattgtatcaatagtgtatcactgatccactaaatttctaaatgtcaggaaaaagaagagaagctagatggtgatgcagctctgaacaagctattccgtgacatatacaaagacgctgatgaggatacgaggagagctatggccaaatcctttgtaagatatactttgtatctgtttcaagagacctctagtgttatctcaattgtctcagttttcaccattttcttcatttttaatttcttcttaactgctaaaaaaaatggtgatgataattgttaatctggatttgttttatcgaataggtcgagtcaaatggaacagttctgtcaacagattggaaagacgtgggtcaaaagaaagtcgagagtagccccccaagtggtatggatttgaagaaatggggttcatagattgttgtggacaaaagcagtaaaccacatttggttagcatcttagacacattagaatttgacccttgttgtgttaaaagttcaattctaatgaaatgtgaattatcggtcaaatttgtttctttctcatgtcttttttagttgtctttgactgaaccacagaacattcaaatacaaacatttaatttactgttattagatagccaagccaaaccaatttgcttgtgttgtttattatgattgaattgtagttcaaatggcactcttcttaatccgagtttgagatggaataagacccggacataatgtcccgtcggtaggaaagtgtaattttctttcaaaatgagggaaagctcttttagatttgtgttagtaattacccaaatccctcttgggattaattatctataggtgtgattagtataaatcaaaatctttgaggctttattgatgatggacttgtccaattttatttgtagttttttaaattcgtaattttatcttatagggaagttacccaataatttttgtttttgagtttcttctgttacagaaaatctttgctgataaactattcttgccttctttacaccatctcatcatgtctgaacataatttcagagacttgcaaaatgttaagccaagttgttaattatcagttgaaataacaaaattaactaaagtggtctcaattagtaaactttagtggaaaaatggaatggagctgattatattgataaactggataatgctattatggatataaaacttacttgaggaaagtcatacttgcatgtctttggacacagaaaatgacaattttgttgacaaatgtattcaaaggatttttatgaaattttgtctagtgtagactgtagacagtattaaaattggtgttagaaattagaatagataattaaactagtaaaatttaaggggagttcagtgataagatagtcccctagcaaaaattttgaactctatttctagtatggagacatgttatgactaaaaataaacactatgatagtgaactattcagtttgcaaatcatttaacaaaatattaagaaacataggccacactctttccaaatgtaataggcaaacactgaaaaatctataaatattttgaggatgaaattgcaaaatacaaaaagtatgatgactagaaatattttgccttaaaacaaaaagatgctaatgttgaggagttattacaaactagcaaattcaaaaaatttaacactctaaaagaacaaataattactctttaacaactttaaaacatattttatattttctcttaaattttttgtatgtataagataatatatagttaatattaagataattattataatattgatctaacttaatataatgggaagcttatccctatttataactagtgccaagtagagctaaaagaattatgactacatgagaattatttcattagagttacacatcatggaagcttttccatgcggtttatatacacaccctttcatgtgaataatctcccataaccaaaattctcacaaaacggcattcaaatcagtatgattgcgtggttgaggttctcgggcgtttctgctgtcgacaggaagaacctgaagttaaagtcgaaatcatttgtgggaaggtggggctgggatcgacggtgttgttgtagcttgagacggttttggtgattgagtaggcttaatcatcaaccgattaagggcagacgaataagcctgacctgtaagacttccacgcatacgacctgctggacgccaattctgctcagatgccaaattcatcgatttagcagcagcccttctcggccttccttgtgttaccaaggaaggctgcgacgaagatgggacaacattggctacttgaggcggctgttttatgagggattgaaagaaatgtttctgtctttccatatcactgtatactgtgtcagtaggtgataaaccacccggagaaggcacagcagaagaagtatttctttgttgtggagtttgtagggtcggggactgggccgggggaacctgaattgtaattggtgtcaccccgctatgcatttcagaagcgatgagattagtatttacacgatcatcagcttcgtgaggagtatgcacaatagttgcgggattagactgagagactggaccgaacaaggcttctgaccacactgtggtcgacaagtcaggagaattatagagagcagtccaatttgtatcctctacttgatcatcaaaattttgattttctatattgctcgaatcaggcgaagaacttagatcacccttggaaggattcatgtcatcaatgtcacaaacattgatatccatttcattgtcgtcgtcactagtgagatccataatactaggaacatcgtttggggtggcagtacatgtttgcagctcagacttttctttccgacaaccaaggtttgtatcattagccttatctgaattatcattttcctgatcaaccttccatgacccgtctgtcgagataataacatcagtgacattattccccacctctttcaagacctgagagagaaaacatcagaaatctacacaacaacgataaaacccgtaagtaacaaatgtctatccacttaccttaaccattttttgatctatacgaatttctgagtaagaagcatgctgattacagtgagggcagcgccaagatggtcttcttgaatttatatcaatgtagttattgaagtcgaaacactgcataaaataagaagacaagaaataagatactccgaaatcacatcaacaatgtcaaattactaaacttgcagctcataaaaataaaactacacagtccccatcaacaatgttaagttcattttttcatgagaaaaaacaaagagaaaattttccatttgctgatatgccaagagataggaaaatgtatcaacaaaagaaagacttgtgctttttttttctcttttttttcatgttttgccaattctgtttctctactctgtagctactagacctgatcaccaattcataaagtaacattaacattgttccgatttcatttgattaacttacatctagatacttgtaattattttactacaaaatcttctgttgtcaaaagccatttatatgtatatatcatttttagagaaacacaatttcaggccttaaacaattaactgttttaagggttagaatcccagaaacaaaacaaattaatcgataactacaatgctcggcctaatcttagatagctatttcttttggaatcaatgagcaccaatctaaaacttaaaatttataaatatcttgcataataatcgtgtgtgcacactcacctgaagatgtttgcataaatgtcctttgactggagttctaatacgggtatagctacaaccaaattaatgaaagattatcagttctattacaatgaagaagaacaatgtaagaacatgatattcatataatatggatatgaaatttagcattaacaaaaaagagattttagaatgatataccttataggacagttcagtgatattcgggatggcccttcaattagatcgagatctttaaaaaatatacacataccaaagttagctccaagaaatcataaatataaatggatattcaaaaacatacacacacaaacagaacaaaaaatacaacacgttcgcgtccaacaaatattaaggtttgtatatgtatgtatatattatagtctccaagtggataagtaagaatgattgagagcagactggtagggggtaggcttatgtcgaaattatggccggcagcagtgctagccattatgtggacagtgtggggtgagagaaagaaacaccagaatatttgaggattaagagtctacagtagaggaatgttgggaaagatgaaatttcgggtagcaactcagagttttaatcaagatctttttctcctagatttgtttcgagagtgggcaaacctattgttctagctgttttgttctagttatctaactggtttgagcttctgtaatcattttgtaattttagaactttcttatttctttcggttgggagtccaacgtccaagtttcatgtaaccatggctttcctccgccaaaatgtgagggtttccaaactgcatggtcggtctcagaagttcatgatcctgttgtagtagttgttgttgagttgtatattaatcagggaaaatattcaacctttctccagctgatccatagaaactactactctgtgatatatgattttacgatcataagtacaactaatcacgttgccatcttgtcaggtagttcgagaaagtgaatcattaccattactattattatatagtacttgtcatggtattggagtaatgatgatgatgatgataattttgattagtactagcggctttaataaggttattattataagtacctaattgatgatcacgagtagaagtagcagcggttttagtcctagattttccttttgctttagctctttctgggaagttaaggatagctttccttccatagaggcggagagcggtctcatcataagcaagagcagctgcctctgccgtgctgaaagtcccaatccacgccttagctctactcctggggttgcgaatctctgtcacccatttgccagatttcctttgtctcacccctctgtagtgttttttcctaacaatgtttctcggtaggtcatcttgaagagtacgagatttgctgtgctctagggttgtgataaaggaagggtttccataaagacgccatagaagattgagtggtgaggagaaagatctaaaatatcaataggatataaacagccaataaaaattccctatctttgttccgtttagcacacctgaatcgactccatctgcaggaggctgaatataatctggcaggactggaagttcacacaattttgtctctctcataaaggcaacaacgataacgtagtgacctgaaaatcagtagccgaccgtcatggaacgataaaatgtcatcactattttaaagctaaaagactattgtacatgcttactattgaactgccccgcaacttgaagtagatttgttccgtatttcaacaacggggtcacgttagttggcatctgtggtccggcatcctagtaaaaaagaatacagggagatttagaaagctactatattaagccattataaagtagattcgattcacaatgaaagagacaaaccacataaacgttcgttctcttatccactcctcttccattcacaatgaagctacagatgtcaaaagaaaatcttatcagaacaaaattgtatcaaacaactctcctgatttctccagaaaaattgatccttactttacttgttga

SEQ ID NO: 377692 - DNA, 5076 bp, Cannabis indica
tggagtgtatatgttacaaagccttcattttatcttttaagacttgaaattgacttaggaaatagagctttagtacatatatcagcaacttgatctttgctggaagtatgcacagtttagatgaccctttcttggactttctcccttacaagatgacaatcaatttctatgtgcttagcctctcatggaaaactagattggcagctatttgttgagcagcgttattgtcacaatacagcaatgcaggcctaggatgctcaattttcaactctttgccaaaccaattcacaataagttgtattcaacatggcctgtattcagcttcaactgaggatctcaatacgtactctgcttcttgcttttccatgatattaatgagtctccaaggaacacacaaaaaccagttgtggacctccttgtatcaacacaagctgcccaatcagcatctgtgtaagcttgaagctgaatgtctgtttttactgcataaaatagatcctgtctaggtgttactttgacatattgaagggctcttattgcagcattcatatgtgtagctctaggtgcaaccaaaaactgacttaacttattcagagtataagctgaatcacgtctggttattgtaagatattgcagtttcccaattgttcttctatatagctttggatctgcaagagcatcttcaccatcttgattgagttttaggttcacttccataggagtattagcagctttacaacccagatggcctaaatcttcaagaagctgaagggcataatgtctttaagacaagtaaataccagcactagatctggcaatttcgagtccaagaaaatattttaagtcaccaaggtctttcaatttgaacctatcattaagtctggtctttaaagcttgcacaatattcatgtcattgcttgctatgatgacatcatcaacataaataagaagaacaataatgttggatgctttgtgttgagtaattagagggaatgatcagatgctcaatgctgaaaaccttcagcaatcaaagctgtggaaaattttttcgaaccactgccttgaagcttgcttcaagccatatagacttttgcaacttacaaacagcattgtgaggcatctcccccttagggctatacccaggaggtatagccataaagaccttttcatgcaaatctccatggagaaatacattattaacatccaattggtgaagaaaccatccttgaatagcagccagggctaaaatgagtttgacagatacaagtttagtcacaggagcaaaggtctcattataatcaactccttcttgttgactaaaccctttggccactagtcttgccttaaacctctcaaccgatccatctacattgtactttgttttgtacacccatttacaccctatggcatgagcactagctgggagactaacaataatccaagtaccattgcattcaagtgctgcaatctttttatccatggcattatcccaaacagggatgcctttggcttgagaaaagaattcaggttcaaaatggcttgagattgctagcataatagcacgaaatttaggggacagcctgctgtaatcaataatgtcagacaaagaatgattagctgaacatttgggaacatgagattggacaatgttagtggagagaaaacagtggtaatcctaaagataagagggtttcttagtttttctaacaagcctgtgagaactagaaggaataggagcctcgacaacattaggattgtgtatatagggtggacttgtaggctgtataactggtgcaggttgaaaaattagatcaggctgagtggggacagtaggctgcactggtaatgtgttttcatgggaaatggaaatgggagaatcaggctgaggtgaagaggaattttctggttcagttctagaagcattggcagggaaaaaccagaaaattcaaaagaaataggaccattagttgcaaaagggaaatatgctcatcaaaaataacatccctagaacaaaaaattttgttggtataaagatcaagaagcttgtaagctttcataccagtaggatatcccaagaaaacacaaggaatggctcttggagagaattttgatctccctgcacttagagtagaagcataagccaaacacctaaaagccctcaaatgttcataatttgaagctttagaatttaatatttcaaaaggagatttgtgttttatattgggtgtgggggttctattaataatgtatgcagcggtgctaatgcattctccccaataaggcaagggaatgtatgactgaaataagatggccctggcaacattcaacaatgttgatgttttcgttccacaacagaattctgctggggcttttgcacacaagagtgataaagcacaatccttaaagatgaaaacaaatcagggaattgcaactccttagcattatcagacctaatgcctctaatctgagtgtgatattgagtttttattaactatataaaggctggtataactaattgagcattagatttgttcttgataagatgtatccatgtatatctagaacaatcatcaacaatagttatgaaatacctaaagccttcaacagtttgagtgttgtagggtctccaaatgtcaacatggatgagatcaaaataatttttagacagattgtgattactaacaataggcaattttctttgtttggcttaatgacatatcgaacaatgaaagtcagaacaatagagtattgaaactataattttttattcagaggatgatttttgatacatgaagcatgtccaagtctataatgccacaaatggtcattattgactgtagaatcgaaaacagaacaagctaaagaaaaattttgttcagacatataataaagattgccaattctgtcacctatcccagtcacttgattcttggtgatatcctgaacaatgcatttatgaggaaggaaaaaaaacagtagttagctgaattagctaaagcacaaacagaaatgagattatgttggaaatcaaggacatatatgacattagtgagcagtatgtcatgaatcctgacattcccaacaaaagcaactttggtattacttccattaggtaatttaactgaagtaattttattgtgcttctgaatagaacaaaataaggatggattggaacacacgttatgtgtagctctagtgtgtatgatccaactatgttgaggagtacgaaaggccttaccagacacatttgaaatcacaagctgatcagtttgaatttgtttattttgtgaagatggttcctacattttctatgcaagcatagccattaacatctaacattgtgcagcaatatcatgctcttcattggatccttctttattttcactacctgttgtgaaattagcattggatcgattgtgctgattagcaggttgatttggagtttccctaagaaacctgccatatagacgatgaccaggtggatatccatggattctatagcatttagctatagtatgacttggaataccacagtgagaaaaaataggcttgttataatatctattattagatctgttattgccacgattggcatatcagtgtttccagcaaattgattggcaccgtcattcgaattttgattagtctcatattgagaaataataattcatctctgtctttcttcttgaattataaatgcaaaagctttgttgacattggaaaggagatcttggagcaatttgagacctagcattaagatatgattcattgagccctatcaagaactcaagaaccttatcttcatcatgatattcttgaatgattttcattgctccacgggtgcacacaggttgatgcatgtactattgtaaaagattccatagccctttgagtcgagtgtagtaagatgtaatatcattcaatccctgagttaaggtctgcatcgaccttttaacctcaaaaactctgggagcatttttctggtgaattattttctgcaactcagactagatttgtgaagcatcttccatatacatgatgttgtcagcaattgttggtgaaacagagttcaagatccacgagattattaagctgttgcatctaatccacgaatcatattcctcatcgtcttcatcaggttcaggaagttttccgttgatgcacttgatcttgttcctagccagtaaagctaccatcatcgatcgcctccatgaactgtaattgtcaacacctgtaagaatcttaggaacaagcgaagacgatgcattatcagcactagataggtagtaaggacttcgtggatcaatggtagaaaatgtgttgctctcatcaagagcagcaaaacaattagattgaccaacagtttcattgttgccactgtttcgagtatgagttcctcttcctcgtgccatgaaagatcagaggatcagagataagaagattcaaaacgcagaagcatgagctcaacaatcagttggctctgataccattttagttttaaaaagagagaaaatacagagaagaaaagaagagaaaatgaattcaacttttattgataacccaaaacagagtacagtaagaaattttatgtacaagctcgaagaagaagaagactaactaacaactgtaacagaataacaaacttgtaacaaactcaccaacttttatgacaccttacaaatttaataatcatgtgtatatagtgatgatggataatatttctattgatatgagacattttaagaaagtatttataaacaaatgtgagcacttatcaagtccaaaatagataatattatactaacatagaaatagatggtgcccaaagtcaaacatagattaatatttatgtaatataaaaagaaatataaaaataattaattgatatatatggtaatatatatatacaaagatatatgaaatatttacaccaacaactattattattaaattatttaagaatttacccttacctattttaatactcacaaatagagcaattttttttgtataggtataccaatgtatatttattgcttctctctcctaaactctgcctacatgctagttttttttttt

SEQ ID NO: 377693 - DNA, 2554 bp, Cannabis indica
acacctcatctttgtaaacataaagctaatcattacaaaaagtattgtaaatcgaaagttgtacgattcatgtcataacaatatgtaaaaactatagtctatattgacttcatcaaactttgcatagtaagtaattaattaagtttattattattattatcattataaaatttttggggaagatacataaaagagttgggatcccatgaggaattaacactagtactattagaattagaattggaattggtaatagaattattagaataacctccaaagaaggtagctgatgctgagtctataatttgttgttgttgataatgattatcaacatcgtttttgttataagtaactgcaggaggagaagggtactgatcaaccatcatcatcatcatttcctctgtttctatacacaaattactattatttatgctaagtactgatggtgatgatgatgaagatgacgaattattattgttactatggttggtgattatggtcgatggctgcagtttattgctgctgcttgaccactcaccctgcacctcaccgtgcccaagtaccccatcattatattgattttgatgatgaggtagtggaacagggaagagtatggcagcggctgcggcagccttggtggtgggcttggcatcgccattggtatcgaaaagcttggctttaagtgctcctagtaagccctctgaggctgcagagctagtaggagcacacacttgctcgaaacaaaagggctccaagttattgttggtgttgttgttttggtcatcttggttgggtggcaattcaaagttggtgcgcgcgttggcacctctcaatgcgcgcgcagcatcgtcatacgcgcgcgcagcttcctctgctgtgtcgaatgtgccgagccaaagcctgactttttgtattgagtcttttatctcagctacccatctgcctgaaggtctttgcctaactccaacgaatctttggtgacctcttgtgcttgtggtcgatgattttctcctcaaaccacctgttgttaccataactgattatcacaattcatcacaacaatttaactgttgtgtacatttatatatataaactgcttaataatatatattaaatatggtatctgcagttcattacaaatggacaaaccacaaagtaccaaccttagaaagagatttgttgtttattaaattagcaggccttggccttcacgttatagtttttgtttgtcatcagctgttatatattttaaaatttgtaaaaagacagataaaatatatatgtgataatatacaaaaacatcattgaccttattatatatatatatatatttattatttcaaaatcaataaatcgataataacataagaaaactacaagagaaacttaataatgcgtaaacaagacttttttttcacagttaatatctaccaagtgatgattgttattatatagattgcaaactttggaaagaagaggaagaaagaaggttattgtagcaatatagtgttattgttcttaggcaaaccataattgactttatatgtagaactattattaagaagtggatcatatatatatgggtattatggttgattatatggctaagacttaagcaaggaacttataaatcactgcgcgtgtgcatgatagggatgttttccaaactattattatgtgtgtcatatatatatatattgctaatttgcaaaataacaataactcatgtttatctcaaaattaattagtaatggatgaagtagttcgtacttttataataaacaatcattatacataatattactatgagatagcgcttttgtataatataaaaaattattaaattaaaatagataaaaattcaatatttatttacactatgtataataatattgagcactattaatactatatttgttatctatacatgagatttaaataaaagtacaggctatataatcacacttggtactaaatattataaactaaatttccatgaatcttctctcccacttaatacacgcttttgagttctgaaatttttttctttcatatatatattataattatataatatggtcacatggatcatttgaatggaagaagtaactttgtgatgagactttgtcaaccccaaaaactaaaaagaatggtaaaaggaaactttgttggagagacaattgaactaatgtatcttagatagtaagcaacatacattggaggctaggttctattccaaatgtttaggttttagcatattctcttaaattaaattaaaatttgcaagaccaatatgattgcccaatagggttttttagaagtgtatatatgaatatgaatatgtttggagcactagaatttaatgccccaactttgttgatttatccattgacccaaaataaaataaaataaaacccaccttttgattttccttttctcattcttcccttttattctcccctattgaaattcatcaaaagacttgtctttataagtggggctaattaatattattatataaactgtcaaaaaaatacatattcaaaaaaaaaaa

SEQ ID NO: 377694 - DNA, 4160 bp, Cannabis indica
gcatttcttaaacaaatcaatccattttctatattccgacttaaattcgtgttttattttttcattttgttttacaattactgacgtatatagtaagttatatttatatagtttttcaacaatattttacaaataaaacttaaaaaaaaatattaggtttattaaaatttaaatatctacttataaatacttaattttttatatcacatcttataaataaattaataatatataatcttaatttttagtattttaattattaaattattatattcagtattatatttaaattttattattattttaatttatttataattgataaatacatacatatttattattataagatttttaatgagatattgtgcttttcacacttgtcgtgtatcgtatcttttgaattaatttattcgtgtttatgtgtcgtgtcgtatcgtacttaaagacatatttttctttatatcgtgttaatttatagcatcataccacgtgatgcttaattatgctcctgtcttctgaattcgtaccaattttgtattgtgtcaaaaaattcaatccataattactgcaatattatagaattatccaaaaatatacttgagttgttggcagacttgtcacttcgatttcaatgttgttggtctgggaagtcagtcttgcttccaagaaagaataataagcaaagtaaacaaaaaaaatgttagctgctttctattatatattcccaaaagattcttcacattcatgtgtcactcaaccaggacttatatgtggcttggataaataaatattgaaaagagctaaagctgaatagtcattaaatttcatcaaatcagattgcttattgcatcctttttcgattttctatgcagagaagaaaacaaaaaagactgacaaagagaagtgttgggtctacaaacttcaaatcaacatttcccatcaatatacattaagtaaaaataagtctgcagagtgagagaataatgtgtttacttatacaactattcaaaagcatttttcactcttcaatttggcttaatttgagttgtaataaaaagctttgagttgagaaagtaacgagcaaaaaaacataagaggagtgttcagcaatggcttgtgtccagcctcattttttcaagattattcttcaagaaactcttttgaacaacaaaatagtaagtattatatccgttttcactaagtttgtctaaagatatctaataggatatgacatgttaaactaaaaatgaaatgcttttgatttgtgtggaatggtcactgtcaatccttctagatcatatacatatattgctttagtggcataactaattttcccttgtgcagcaaattccaaacacattttgggtcaagtattgtggctgtgtatcaagtcaagtaattcttaagcttccatgtggatcaagatgggaggtaggattgaccaaaagtagtgatgaaaaagtatggatagccaagggttggaataaatttgtacaagactgttgtttaagccatggaaatctcttagtttttggatatgaagggaactctcagttcaatgttatgatctttgagaagaatactttggagagagaatatcattttatgcctaaaacaagagacaagtctcctccattaccttgttcttctcaatcccacaagaaaaggaaaaccagtccttatgttaaaactgaaggtattgaatcttgatcatcctaaaactttaaggatagatataatttaactaatatgtttgatttttcagatgacatatgtggagaatcttccatgccaaggtggatggaaccttcaaatatttcaaggaagcaaatgttgagaggaacagaaaaggttgaagctcttatgagagctaatggttttaagtctgatgatccatttttcagtgttctcatgcaagcatcgtttgttggaagttcatcttataatatggtaattacttaataggcttcttacattaaaagttcatcttttgagtttaaaatttaatgcttttcgtactgactctgttcatttgagaagattataccatttggctttgccaagtatcacctcctcagtcacagcaagcatcatgaagatgtgatccttaaggtggctgaggacgagaggttttggcctgttaggtgcaattatagacagtacaatggacactcacaaatcagattcgagtcgggttggagggcctttgctatggacaatgatttgaaagttggtgatgtttgtatctttgttatgagaaagaacattgtgataacatcattcgaagttactatttataagaatggagtaacgaattcacctaacgtaccaggtaactaaaacaacaactccatataatttgaatgtatatatatatatatagccacggagtttaacatatacaagtgttattttcagctacttcagtaccaaacacaacaccttgtgtgaaaattgaatcttctttcaccagcaattacgacaaaccaagcaagatttcacaggaggacttgattccaaagaaagaaatagttgaaccttcaggtaataattagtctctatatgattcaagaatataaagtcaaaacattcccaatgaaggcactaaagatatgcattcaccttcaggacttagtagatcttataaagctgccagccaatacttctcaaacaatccttatatccaagtggctttgggatggactgcaatgcatagaaagagactggtatgttgaaatggttgttttttcatatgatgaagagagaactagtaataaatgtttgagtattaattcttgattgtgcagtatattccattggcttttgcaagcctttgtttcgagaaaaaggcacaaactgtaattctttgggttggtgaacaaaattggcgtgtgaatttaactgttacgagatctcgttctggatcagaatatcacttttctggtggatggtctgcatttgcaagagagaattgtcttcagcaaaatgatgtgtgcatctttgagctgatacaaaggattcaacctcagataaaagttaccatatttagacaaattgctctgcctcaacaataatctgttgtaataagttaaaactttgtagcctagcctaatagtttagccagaattttcccccggctaaagttttttttttttttaccaacctttgatatcaatatatatagtaaaaattgactaacaaaaaaaaaaaataatatatatatatatagtaaaaaatcttctgtagaaataaccaaaaattacttgaaaaaaaagtaaaacaattttgaagtataaaacgtgcatgcacgtaaggctggacattcgatctaatctaatatttttctctccgatccaattagacttcaaatttaatccaattcaatttaaaaattaattggactgaatcgattttctaatgaatatttaatgagataattacaccacatattgaaaatttcaacttttttacttttataatgtggagtgtaattttttttttttttcaaaaatacggtgtaagttttatactgtgtaatgtgttaagttttcactattgttctactgttattttttagttgttccactgttgttttagttgttttgttttgtgttccactgttattttataaaaacacaatatttttgaaaaaaatttcatgtaacagtatttttgtaaaagttaacttaaatttcagtatttttgtaagttttcatatttaaatacacactcaaattttaatattaattaatttaaaaatatgaagaaaaaatacctataaactaaatattactttttatttaaatttaatactttataaacataagtttaaaataattaaaacattgccaaataataaaataaaacaaatcacataaaaataaatacagaaaataatttaatgatacaaattcaaaacaaaaaaattcaataaatataaaatcaaataaatattatacagtttttagattgagatacaataaccaatccaatttaaattgaattggtgttatccacccctagacccaggaatcaacaaagcttctaattctaaacattgtattagtgtcttttaaaaaaaaagagagagagagagagagagagtagagagagagagagagagagagagagagagagagagagaagagagagagaag

SEQ ID NO: 377695 - DNA, 4936 bp, Cannabis indica
gtttgtggtcgcggaggagagagagccaaaatataaaatgaaatttacaaattactttaaaaaaaaatgagatctgattttttggggaggaggcgtggggttatatcttaagaggcgagaaattaaatttaagatgcgaaaaataaaattttaaatttgaaacgtattaaatttaaacatgagaatcaccgacaattaaaaactatcggcaattctcatataaaaatacacgaaaatttttaaggcacgttcaaaatcgtggcttatgtatttgtgtgggttggtgaagcttctaccgtagctttgttgcaaccaatttcatgtgattgttgaatttttttagtttaataatttaaatatttgaatgatatactaaaatgaaagatatattaaataatgatatgtgtgaattcataaatgtattttttttttttttagatatgctcaatattggagtaattttaggtgtggagtagcttaagataatataaatgaaaaagaaaatagaatattatattttgagattatatgtaaaaataactcatttttttttaatttgctttttttttatgaatttaatataattatttattcatgtgttatttaacaactcttttctatcctcttaaaacaaaagatatagacaataacgacgtcgtacagcgtcggtagccttcggagtcagtactgttaacaggtgacatacgtcaaatcaagatttaaataatacttttcaaggtattaaaatccaagggtcagaattctatctcagacgctcagtagatcatcaagccataaacacaccattcaaggtcaacctaaaaacaatataatatttacatagtggcccccacaaattaatattatttcgactataacccttcttcatccttctcatcacacagcgacactctttctttctctctctctctccctttcgtatcagatcgactttccatttttcttcttctacaaatctcagcaattgaacgttgtgaacccaaaaatagtattaaataattacacagaaaatagggaattttactgttcatatatttctgtatatatcgttatcggaaaatgaaggacgaagatggccttccgacaacgacggcgaccaccaagaaagaaagttcggattcgggtcagtcatttggtaaaggaaggtacaagttttgggcattgggtgccattatattgctcgcactttggtctatgttcaccggaaccgtaactctccgatggtctgccggtaatctaaatcgtatcactgatgattttgatactccaattcatgacgatcttgatgtccttgttagtattcccccattttgtttttattcattttttgggtgttggatcttgggtttgtgtttgtgtttgtggatctctgatttgatttaggtttttgggtttaggaaatggaggagagggagaaggtggtaaagcatatgtgggatgtgtacaccaacagccgtcggatcagattaccaaagttttggcaagaggcgtttgaagctgcttatgaggatttgaccagtgatgcacctggtgttagggaggctgccattacagagatcgctaaaatgtccgtacgctccattaatattgaccctcctcctgttcaatcaacggttagtaatcaatgcagtttgaattaatggagaagtcgctgttaattaagcttagaactcttaactaattagctcgaattatcgtttattaactatgttggcacttgaggatcttgaatttcatgtttattgaactttgtgggatttatgattgtgttttgtttatagaagaacagttgtttttttgaatctggtgacaaaaatcagaaagcattacttagattagcagcttttatggttttataattgggttaggctcagtaatggattatgcatacattataaactagtgagtagaaaactcaggcttttgagacattttgggtgtaattcctttccacttttcagttatcattagggttgaaaggaataatggtgtgtttggttgggagtattgaaaacagatcaataggaatggaaagagaaaggaaataggaatggaatggaatttaatttattaatatctgtgtattggaatgatctttcatctagaaaagccatttaaggacattccaaagctttatagagcaaccaaacaaatgaatgaaatgaaaatggtttctatttcattactcccaaccaaacataccctaaattgttagtccaatttcaatcagtagtatacttgtgcattgtggtattttaacttttaaaggttaaaaggatcaaaatattgtagtaaaagtcagattgttgtacatcgtgtttaggtgatacacttttctgttgaaagggcatgaaccaggtttatgagtggattattttactcaaaataacttatgtgatttgatttctcttgcatatgttttgcttgtttctggtttttgttatgtgtaattctcttaggaataatctctgtatacccatgttttgtttgtttcttgtttgggtcatgtgtttatattctcagaatcttctccttggcctattttgtttgttgtttggttgtgtatgtctttgggaatcatgacaaattgcccaaagttttggttaaccaattattctgcctagatgatgtatcattaaaattttacgacgtcgttttttcgtctagcaagtatatcttttgttatctatgtaatgattttgataaagttctaccctaggcaaaattcttataattttattgatagttactttgtttgtctgtctgaaattggtcaaagttctgtccttaacaaaatttgtacttaaaatttgtatcaagattatggctctattatttactttgttaatctttctgaaatcattttgcaatgattattggccttcactatgcttatagaattctactatagagaaattttaatctgacagttaaagtttgaagtcctttaagtgtaaaaagtattgaatacctaagaaccttttgtagattattgaattcattataattgctttgttattgtgtctttcctgccgctaacagagtgcacgagaacttacaaaggctttaaggcaagcagatcgaggaggagaggctgcgatttcgactaggagcggttgatatctgaatagtgtagggtttgaaatctacattattctgcaaagtcacagctcctgcacataatttgtgggtttatagtgatatgtgcaaaagttcacagttgggaaaattttatgtatcttattaggtattatcattcttttaattttggaatgtcacaacatgtccatgttaaactgtgaacaaaccttttgagcgtgtaagttcaagtgaaagaattttgcaaccatattttcatttcttcatacaagttagtgaaaaaaaagaatatatgtgaaagaccagtataacaatttgttgctataagtatcataattttgtagtggtctttgatatgcagaactgttgtgccttaacaacacaatgagttattaaggttgtaacatcccccctttattaaactctatatatataatatcagattgagtcattttcttttctttaacaacatgggatggcttggtaatcttggctatatttgtcaaaagtataaatattattgtttttattttcccattttctcaatgatagggtttctaggacatcatttagaactagtggcaacaagttttggaaaacaaaatattcagtcttcctcaaatgaccaaaataaaataaaagtttagaaaaattagaaatataaataaaccatatttttccatattgcctattaaaattttaggggtatgattttgtcccgttattgtactttcatgaattgtaatccgtgatgtacggcagccgtcagatgagagagttatttgatctgacgactgagattgatctaggggtaattagggttaaaagtaaaacgtaccttggtattcatttaatgtaccctgagacccatctaatgtaccacagaatacattccgtacatcacgggacaaaatcacatcccaaaaattttataaataataaaggaatgttctcgtttgtaaatgatttaggggtcattacatagaatatacttttgttaatttcttagatcctctccttcactcaactccctttccattgagctcgtgattattcgaatgctattcgtgttaattagggatatataatacgtaatggtcgattattagattttataattgaacttcgtattactcatctcaatagtaaggacctttaattataaattaatgaattttttctttttttttaataaaaaataacttgctcctttaacaataatactaaacaaagtaactcatagaatgaaaattagagaaaataacaaaaacaaatatagagaatcctagctatcaaagaagactttgcacacccaaaaatgcttcaatatctcttgatgaagtgaccaaataggaaacatgtttaagtatagctgatttagttttcaaatcaaaggggtttcattggatcacattcaatagatttggatccatccgatccaatccaattatttattgaatattagattttgccaactgatccaatccaattgaattgagtcatccgatccgatccgatccaatggatgtattggattggatcggttccatccattggatgcttttactggttttttattggattggattggatccattgattcatcaatggatccaatccattttagccactatttaggcaaatttcattaaaaaataatgaaaaaactaataatccaacatagataatataataaacaatagtttaatccaaatctaacctaattattatgatccctgtaacgcccttacttacgtaaaataagatgccataaataaactggcgttaagatactaatgttgcctttaattaaaaa

SEQ ID NO: 377696 - DNA, 13348 bp, Cannabis indica
agatgtgatgagtcactcatttatgatttatcacatagcaaacaaagccacacatgttcccctcacatgttatgtttttattcattattataattattatgatattggtattgctttattttctttctttaccatataccatgaatcaattaataaccacataaagatgacaaaaatatcttcttatgcaacacagtaaaaaagaaaaaaagattaaaactttcaaaggtatataattaagagagaataaagaataagaatcctctttcaaatcttttaacttaaaaaaaacattcataattaaataactaataataataagattaagaacaaagccagccaaatccacttataataaccacttttagaataacagtatatattatataaataattggagagaaaaacaactgtcaaccacatgggattggcagaaaatgcaaccacaaatataaaagaaaaagaaagaaaaaaaaagtatcattggcagcaatgcaaagacaaaacaaacctcattgattcattccatgagtaactgatttgagatttgattattcctttcctctcttcaaaacctttagctttaatagtagtgaatgtactactacaactactacaacatacttagcttctgctactgatatactctgcaccttcctgcccaccttcatcaaaacttagccatttttctcagtaaatgttgggccaaccttgttgctttgctgctaccttccaacaacaacaaaaacaaaaatgaaacttcctcaagtaaagacagttagttagtccttctctttcattacaaaacaatatggtcttcatttcagttaagatgaatgtactgaaatttagtcctatattttgagattgagtttttcacaacagcaaatggggaggagttttaatcatcataggatagatgagaacttgttgtgcaaccaggtgctttgggatcttcagccccacaacaatcatagaatttggctgcatatggagggtcattagggcccaattcatagtaccttcaaaaaaaccaaacaaagagtagaaagaaaatattcatcagcaaaagaaaaaaattggatttttaatcaactagttaatgttttgcacacaaatcgagttagtcaaaagttagatactttagtattgtacatacaactattcattctcattctcaccacaacacagttatggctggtttagtaagccatattatacttgaattatatttcatgcaatatttttatataaaattatatgtggcaataacttttataagcacctaaatatataaatagtgttactacaaaaatataatatatatataacctaattcaatataatactacctagtagtatcaaacaagcccttaatctactatctttatctttttatacatttcataacctaatttaatacaatacaacctaatacgacctaatacactgtaccaaatgagtctttaatctattatctttatctttctatacatttacacaagttaagttactgtaaagttttaaactttaatgatagttttattagcaaattgagatgaaaaactaaaattatgaacctttcttatcctttcaaattaaaaaatgcgatttcgggtcgcactcttcgagtcagtatcaaactccgatcgttcctaattttctttcatctcattgattgaaataacataattatacaagctaatcaatactaacaatttactaatcagtcaaatcataaaattggctctcttatgatcaatcaaatcatctgaaatgctgtaatatgatgtattgaattgaatgaattacagtaaagtttaaacctttgtgattgtatttgtacggaaatgaaattgtaaagtcctaaagaagaatgtaagcaatgaatttgggaattgaaattagggttttgagttaccttttctgatcatcgtgacggcgacaaacgaagaaagaaggatgaaatcggcaagatgaagttgagtttgagtgtggattgaatgttgatttgcatctcttgcataccttctcctcaatttgaatctccatctccatcttcttctggttctgattcttctccattaatcaaaaatctaatcttttgcttcatttcatatattttcatattcatacttctatcccaaaacgacaatcaatttcaacatacgacaatatacttttcttttttctttctttcttttgttgaaaaacgacattacactttcacttcaattctattaagatgtgaggcatcatattaagatgggatattattattggtgcaatttaatattatgttctcgtacattttgatttaatagataacatgtgaaactgttaactactcacaacgtgctacatctgtatagtgttgggtaccttaaggtgtgacaatttatatcagttgttgtcatgtatataatttggttaatcgtaactatagaatatgaccctaatcaaaatgcatacatttgtcttatacactataagtgtagtaaaaaaagatacattttacattccacgcgaattttaatttgagataatattatgtttgatacataagttcttgtaaaaatagaaaatgtcctacctttgaatgtggtttgaattattgacgaaatgttaaaaacaattactcatccaatttaagtacctctccgatcttcatgatagactttaagaaaaaaaatcgaagagtaacgacagcaaatgattgagttcaatagttcttcatataaaattattgcctcttgagatataaaaatatatataacaaaaaaaaagaaccaatcagaagcaccccttatttaaaagaagaataattagcggtcaaattcctttaactttagagtttgacacgatcaacccccaaaactgaatctttgggggtaaaactcctcaaactctacttctgttttgatcttttaaatgtcaacgtagactatcacggtgtacacaagtatacacgtggtaaattttaattaatacacataatattaataatttaaatattaaaaaataattttaaatatttaaaaaaaataccctcaaaagagaggacaatgagttattgacatttcatttgatgataaaaaataaataaatttaaagatactttcaacacaaaatagacacaatgaagatttctttcttttgtaactgcagttgatatagttgttagaaataatcttcaaaccacccaatatatttttttacaattgcaacttttcgccttttttgttgggtttggtttgaattggcgggaaggacttattattcataaacagaaataaatatagtagacatatgtaaatatagaagattaagaagataataaacatgtcttgtgttctagtctcatgatttatttattattattattgggattaaactcaaatcaaacaaatagttactcccgggagatttatttttatttccatagctacaaatcccatcaaatttcaatatttccttccaaagcttaaaaaaaatagaaaagaacaaatgaaatacttcacaactaggaagaagaactggtctctctactccacaaaacaaaacacaagaggttctctcctctcctttcccctttggataatctcaactctttcttcaataaatataatataatgtatatatatatatatataagatatataggccagaccccttaagattcagtcatctaacagaagagcagagtttccttctcattcattcaccaccatttcgccattaaaaatagtctcaaacctgtaagaaacttgcgtacttggcacccaagaaaagcctctgaatgcatagtaatgcgtttttggtaacctctgcattctcgtgattcatcagtttcattactcgttccttcgccttcaggtctgtcactatgattcggccagcggcatggtgttggatgaactgtgacagatcaaagcaagcaacagctagagctctcgggtcacttgatgtgtccaatatagtcatcaacaccctcagaatctgcaagatattggaaattgtttgttgtccaataatcatatccatttttcggttttcacaaagtaaagagaaaaagaagtacaaatcttaatttcatacctgaaaatcattctcttcaaaatttgaaatattttctcgccaaaatacagcatctttgtgcataggagaccagtcgagatggccaaggaggacttcttgcttatatttatcgaaagagctcaatgtttttatcttatccttcagacccacatctagttgattcaaggcctccaataagtcctgacaaaatcaggtacattacccgtattggagagttagaagcgtaagaaaagtcaaccttttctatgcaaaaacaaagccaaaacaggttgacattctaattctctaacctcgtcactccatgcttgcgctttcaaactcagaacaatttgcggtaggccaagatcaaccatttgtgcaccaaaagtccctttggagagcaagttcttgaaggtcaagacaacaaccctaacaacctgccacacaatattcataccgttaataaataacacacattgtgcctgattactatgcttagcaagggtaaaatctgtaaataccgtatatgatgtaaattttttaaaaaatagcagaacaatgaaatgaaaagggtacatacttaacaacaaattctgaaagtaactgaattccaaaactactctaaagtcgcgtgtgattacgctgttaaagaaataatatacaaaccgaaacacaagatcctcaccttttcctttgtagagctctttaccacatctatgagtcgtggaagagttctagaagtagccaagtactcaatggcaggttcatagtaggataaaagccacacacaaaggcatgtttcgtaaagaagctggttcaaaaataacatacagttagctccaagttccctatatggtatatataaaaaaactcttacacagaagcttgaattattgttacaaaacataattaaaaataaaccaaattgctttattactacaaaagtaatgcaccaaaacttggacactttaattgaccccaccacatgctttattctttagcaatcacacatttataacagttcacttctctcacatcaaactcacacacttagctcacacttttttagactaaggacccaaggtccaatgagcttggccctaagggatccaataatctacaatgagtttggccctaagggatccaataatctacaatgagtttggccctaagggatccaataatctacaatgagcttggctttaaagctagaattttcaagcaatttttaaacttgataactctagaaaattctacattttagcagaaaatctatttttcatgctcgaataaagcatgtggaggtacattacaattttttgagagaaaaaagagcgaagagcaaatagtagactcgttcactagaggaatcaacactacaaggttctagaagctaagagaacaagtaagcaagagacaaaggatgaatgggttggtgacaagggggagtattgaagagtcgtcaccgacaatgtgataactctaatactctagaattctctactgtttatatttgtaaaaactgctagacttttctagctcttaggccaagccaatgtaagactattgctagaattttctagcaaagacaaaatcaatcggttccttatgtggtgtgtctagaaaatgtgaccaaaagtgtgtacgttgagtgcaaattagagtataatatatgttgtcaaaaagagaaatatttatggccaaaaaagaatgtgagaaaagtgaagagttttaagtgtgtgagagtccaaaaataaagagtgtgtaagtgcttgttgtgtcaagtggtcaattaaagtgtacatgtcttggtgtaattacttctgtaatataaagtgactgcgttcatttttacgttttgttgttctacaaatccaaagcattgtgttgaacataaatggaagcagaagtaatacatatcaaataaaagttacctgaatagactgctgagtggatgctggggtaatcaagggcacaagcaacttgactccgtcagcttggacaaaggacgatctaaccacaggttccttgagtagggttgaaaggcagttaatagcagttgggatgccacggctaggatgggaaggcctcttcggctgtagatgacatttggccatatgattaaaactaatatctagaaactaataaattgtacttgaacaagttttaaagcttgctaatagcaaaatggctatcaattgttggttgcaaaacaaataataacaagttctacactgcatagtgcttgttaaccaaaaaacataaatcacagaaagttggcagcataaaatgaaagaaaccaaagaacccagaattataacaaaatatgttaaccgctatccaacaattacagaaacactctacatcacatataagctataaccaccatatgagttgaaacatccaaaagctgaaagcatacctgtacacatagccagtccaccaagcctttcagcacatcatcaatagtagctgatgttctcttcgaattcgaggctcccccatttgccataactccatcatgggattttggccttgcactgtattataagagggaaaagaaaaattattacgcttacaagaaaatgatcctcactagctcgaagtgataaatgcagtgttgagaaaatctatcatgtttaaattacctcactatagaagcaagtatcttacagctcttctcttgtgcaaaccaattaccatcacaaagcaatctgaaaatttcgataattcaaaggtttcgcattcaccaaatactaaagtggtatcaaattaattaaagactctaaatttgtaagtctttaaatttaccttaagaaaggattgtaagtatcctcaccagacagtgaattgtcatggaataatctagctcttttcgggtttgctacaaaaagagaatctcggaggtttaaatcacaaaagataattcattttcattacaaagagaaagaaattgaaaaaaaaaagtacctgcaagcatttcatcaatcaatgccagtacatattcaacagtttcttctttatgaatgtccctcaaaatgctaacaaacacccgaacataagccggtccatcctgcgaaaaatcgaaagcaactaatgtaaaaagctacaagaatgtagtttgaagtaaaaaagaaagaaagaaaagattacatcatcaagcaattgggctctgtaactctctgatctgttatcataacgcctcaagagttgaagacaagttccagtaatgagcttggtggtcatgtaggtctcccatgggatatcccttttcaaaaccttgaagaaaaaaaatcaagttattatttttctcggttaaagtttcaagatttgggatttaggttaaattagaatcgattgattgaatgatctgcaattgaagttgaaagaagtaagagaagaacctgttcagtggagagttcagcatggtcgatcgtcattggattgaaattgaatcacctgttactgttaaagataggttagatcgagaaatcagatgagaatcgagatagaaatgggaatcgggaataaagaaattgaaacctaaagagaattgggattggatttgaattgaattaccttggattgggattgggattgggatcgattgagagcttcggaggaaggagacgacgatgaataatgggacttcactcactacaaaagtacaaaacaaacgaaactgtaattatgtcgtgttttacatttgtacacgtgtcatttttgtaatttacttaatatttaattaaataaaaattacacaattaagtaatttatttatttattttatttttttcagcataaaattttaattactagatcaacatcaacaataacatcaacattgtaagagaaattagaacttgtttacaatccttaacttgtactaacaccgtacagtcagatttaataatactaacactcgggaatcacgcttcaatcatgaaagaagttctttcagaaccacaactttagccatttctagcagaactctcccatatcacaacccataaattatagtcactacatgtccacgatgatttcgaataaccccgccaaaaccataccttccttcatcgtcaaaaatagcagcttcaatattcactttgagttttttgaaacctagtttagactacaactcagccccatcgaaaggtaccatgtattaactgaagataacaaacttctttcttaaacttttctccactgatcaagagtgatatgagccatattgacaacaaactccatccgacttttcctaccttccacaaaagtttattatgcatgaactaaattgtccacgtcaacatcaccacctgagcactttgttcctcacccagccgagaaaacaagtgaaagaaccagtccccaaacgaccttgcatcaaccggaatcatagccaaactaactacctgccaataattctgagcaaaataacaagaaactaaacaatgcaaaactgattcacttgctccatgacaaaccggacataacaataaaaatatccacatgtttagttttcaaatgaactcttgttggaatacacccattaactgccatccacacaaaactttttgcctttggaggaagtcttaaacaccaaaatttcttccaaaatgccacaacatttccatccacgctaccaactcggtctacctgtaacaatttaaaagcactcttaattgtatacctgctagaagagtcaaaactccaatacgagtaatccctcaaggtcgacttagatagaataatactaagaatacttgccgcctcattctcagcaaccaaattcttgacaacatcaacatcccaagctatctcacccactaaaaagactactaacattttcattagccaaaccaaaattcaaactagctagacttaaaattgaaccattcaaaagccacaaattatgaaacaaaaaggtcttctccccatgacaaattcccttcctctatccctcatgaaccaactcttacatttcaacaagacttctcaaattataacttggattggtactaaattgtaccgaaagaaaggtctcattttttttaaatatcgagtcttgtacactctagaaaccaacgagtcgggcttagtcagaaagcaccaaactagtttacccaacatggcaaggttgaaatcatgaattgaacagaacctcattcccccaacctccttgatacgtgacatcctctcccaactcatctaagaaatgctttgacgggaattcgcagacgactttcaccaaaaattagtcataaattgttctaaattatgacaattaatttattttttaattggtcttataaataataataaagttattagcagcaaaaccccattattttaattcttataaacttaacttccaaattttttttgtggcaatatccattgagtttacatttgttacaaatttgaggtgtcaattaatttttactgttaaatgtcaagagggcttgccactgtgaatatatgtgtacacatgacactaaaagcttgaatccaataaaaatttgactagtgccttaaatttgcaaacaaaaataaatttaaaggagtattgccacaaaaaaaaatagagaattaaatgtataaaattaaaatataagagaattttaccgctaatcactcataaaaaaacaaataagaaatgataaaaaaaaacctcacaagatttaatagtattgttattaggcatatggtgccgttacgaggtgacattttataaacgaagtagatttctataattattattaaactaaaataagtgagactgaagcttttaaaaaaaaaaattagattcaatattaaattgtattaagagtgatattttataaaaattaacatattaaatcatgatatattgtaataatatttttttatgaaatatcactaaccattttaaaagtcatattacattattaatgcttaatagtaatattctaaaaaatatatatcgtaaatatattcatttttcttggatattttcaatttttagttcaaagacaaattatattctaattttgtcatttatagtgatttatattattgttatactaaatatcatgtgaatttttaaattactttgaataatttattgggatcaaaatagtaagatgcatgtgtataaaataaaataaaataagcacctacaatttattattttaattatatttttgatatcataaattattgagattttttttaaaaaaaattagattaatagtatgagtaatattaatagacataaatgatgagtcattgcgtatggtatatgggttttgggtgtggcactacatactccacaaattaaataaaaaaaataaaataattgaaaacacatgacaattatttcccccaaaaatattaaagaacccaacttttttccctttttgtttgacaaatcaaagtagaaaacccaaagttggtatttttgtaacttggtaaaaaaaaattaataccattttttgatattgtgtttttttaaaagttatactctctgataaattgaattatataatttttaaaataatactaaataatcctccaaatttaataaaataaaacttaataattatttaatttaaatatattatgataaaattaattacgttttttatattttttattaaaaattatctttaaattaattatattaaaaaaattataaaaaataaagtttttttttttttatcattttaaataatacataatttacattatcatttaacaaaacaaatattctaacttttacaaaacacaactgtattaaccaaaagaaagaaaagagagaaaaaaacatttggcattgaaaacttggacaagttccctttgttgttggtctggcttttcttcctcttgtggatgaggccgccaccaccatcatcaccaccatcaccaccaccgttttactcttccaataaagaatagaaaccccattgaagagaagagcatgtctctctcccttcttcccatttcaccttcttcttttcattcccttacacttaccaccaccaacacccttcttccctcttcctcttcttcttcttattctttcctcagctttagcagactaagaaagctctcattttgtcatagcttcactcctaaacaagatggagtttcccattttgatgatgatgaagaagaagaagaagaagtattagtagctttgaaacaagaagaagctaatgtgttggaattgacagatgggtcttcttcctctcacttacctgacaaatgggatgttttgggtcttggccaagccatggtaattactacaaatttacttccttttttcattttttgaactttacttacccccaaagtttcaatcttttttaggtggatttttctgggatggtggatgatgagtttttggagaagttgggattggaaaaggggataaggaaggttgtgaatcatgaagagagaggaagagttttgagggcaatggatggttgtagctacaaggctgcagctggtggctcactttctaacactttggttgccttggcaaggcttggtaataacaagcctattgggggtcctcctcctcctcctcctctcaatgttgccttggttggaagtgttggtagtgatcctttgggtagcttctacaggtcattttacttatcttttactagcttaatgttttggttggtttactggtttgttagatttgataatgtagttgtggattgaatcaaataatgacatgaaattgtgttctgagttaaacttaaatttgtttcaattttgttaacataactaaagttttgcaaattagtgtttcctttgctgttatattgaatttggttgtaactagcagctagtagtttctaaaaatttataaaccagttagttaaatcaatgcaacaattgacttttctgtaaagagttagttgttggagaggaaattggtgtgatttgagtgtctttgatagtattaatcttgttgaaagagctttcctttccatggataattattttttgttgtggtttgaatgttcttttgtttggttgatcagacaatgttacaagactcaggaaattgagagttgaggtctcttgaataccctttagggagagtcggggtctcttgaatctcgaattcctcaatcttttagtgtgttctttcggtttgatcattcaataacaattcttatatttgctcttatgtgtaagttagacaatgaaatgtattgtttgttctcagcatttagagctattatatctatgttttctacttacactagaaaatatctctttttatagggcgaaattgcgtcgtgcaaatgtcaactttctttccgaaccaatcaaggatggtacgactgggacggtgatagttctcacaactccagatgcccaacgaactatgttatcgtatcaggtaaagtataactttttacaatctattgtggtgccaaacttaatctttttcggttggcatttggagttgtgagaacaatcttgtcctttataaagtttctaaactcacaaggagttttctatgtactttaaagttgttcttgcaagtaaaactatatttggggtaaacatttcaatctcttcgtttgatttagcttatgatttatgaaatgtgaacagggtacatcttcgaccattaactttgatccgtgcctagctaagataatttcgaatacaaagatacttgtcgttgaaggatacctatttgagcttcctgacacaattaaaacaataaagaaagcatgcgagcaagcatgccggagtggttcccttgttgccatcacagcatcggatgtttcttgcattgagagacactacgatgaattctggtacgcgattgttgttactttgctcgtttgtttcatttgcatttacgaatgaaattagtctttagatgaattcaaggttaaggtacacaaggaatgtttctctttcgattagttgcttattgaaaatggtttaaccaaaaacaagaacacacgagatttttacatggttttgtgtatacaaacacctactccatgagaccttgtctacattagagaaaatccactaagaatcagtaagagtttttcctagatcaaagaacaacctcgaatccctcgagaatctttacagaactatgatcttccatcaagtttatcatcaaaagcttttagctcaatcaagagtaatctatcataaaaaaaattctagttatgaatgggggaatagaaccggggattcttggttacaattttgaatctgttattatatgtttgctctagttttt

SEQ ID NO: 377697 - DNA, 3197 bp, Cannabis indica
tttttaaaaaaaattgtataagataagacaagatattatatattttttgctgtttattttgctgaataaacaagtataaactataaattattggaaaaatgataaaccccttattttattttttaataaagaacccctatttttttagtacaccctctaaattattattaaataataaaataaattattattaataaatattggaaaatcatacaaagtagaatttaaggaccataaaatagtttacggcaaggttggggtattgcattaaaacttatctatcatcatcagcacaagcatcttcttcaagctttggcatctccgaatctcttaagcgaatatttcactgattttccttcaatctcgtttcatttttaaatcaataaagtcgaagatttttttttttttttttctttcttttggtgggtttttcgtactagtaaagaatttcatcaaatttcgtgattctagatattgtaaactgcattttcttagatattttttttctcttggaatctaagaacaattccttcttcaatttttttttgttaagttcgacgagaattcccctaattgggctctgattttctccgtcgatcctgtatttatattttcttgtcattcaattcagataacacaggaggaggatcaaaaaaagaaaaaagaagacaaaaagaaaactacagtacttgatctcagctggtatttcttcaatttaatatgctgttcttttgattttctaatttgggttttggtttttaggctcaaattttaaatcaccgccctcaaatttcttctgttattgtcaaaattagaaaatggaataacttgattcataccgacccaaaactgagtcagtttttctttttttccaacttaattcatcatatttctatcttcttgggaatctttcaggaaatgtggcgttaagacatttttttttttttttaatttgagcaggagaagagatgaatagtggaaaaaagaacggtgaagattcaaaagtgtcgtcagagacgacggaaagtgaattgggttgttcttcaaaggaggctagaggaaagaggctatggaagaaggtgagatatcagctagttgaattccactcgttgcccgcgtatttgagggacaatgagtacattatcggccattatcgatctgagtggcctttaaagcaaatcctcctaagcatctttagcattcataacgagacactaaacgtttggacgtaaggtttctatcctctacagtattctttgttcttataaaacaaaaatgaatggaaaaaaaagatacttgttttaattttgaaacagttcccggctattttttcctcatgtggaaaattttaattgggtcagaacacgctagtgtgattttaataagtcaacaaagtgttgtagtaataatatgtcttgtttaaaacttgtgcaggcatttgattgggttctttattttcctttccttgaccatatacactgccatgaagattccaacggttgatcttcacactcttcatgttcctgatatgctgagaagggctgatctgcataaattgcaagaatgccttccttccttacccaacatgcctgatctacacagacttaaggagctaaagactacatctatggatatgcttccatccctctcaggatggcatgttatggatcttttgtataattgtttgccagagcgattctcccctggaaacagcactgacatttgtgttctggtactgcactttgtcctcaaaacctctgaaagatttatgaaatattacatttcagttgcatggttgtatttttcttgtaaactatctgttgaatgcctttctatatagctatcctattaaaccattaaaaagaacaataagagatccaacagatgattttactcattaaaactctatatttgttagaggctttggtttttgatacttcttattcttcttttcattgagcttgttaatatcttggacgttcatcttaatgttggtgtgcattttgctctttaggtgggagagtggggagataaagtagtgcattggttttaataatttcaaatactcaatccactaagcttatgttttttgttttttgttgttgttgattatttatgaatgcagcatagctggaaggatgattttgcaaacataatagcccctcttctggtgagaccaattacaagatggccattttttgcattcatgggtggtgctatgttttgcttgctagcaagcagcacatgccatctcctctcttgtcactccgagcggctctcctacatcatgctcaggcttgactatgcaggaattgcagctctgatttctacctccttctacccacctgtctactactccttcatgtgcgaccctttcttttgcaacctctacatgggcttcataactatactgggaatcgcaacgatcttggtttccctcttgccgttctttcagaaccctgaatttcgcactgttcgtgcatctctcttctttggcatgggcttatctggtattgcacctatcatgcacaagcttttcttgttctgggatcgacctgaggttctccacacaactgcttatgaggttttgatgggacttttctatggtcttggagcactaatttatgccacaaggattccagaacgatggatgcctggaaaatttgacattgcagggcacagccaccagctatttcatgtattggttgttgcaggtgctttcactcattatcgcgctggtcttgtttacctcaagtggcgagacctggaagggtgctgaaatttagacattagacattagacaaagtaagaaccttgtttgtcttgttttcacttatgtaacagtgaagtgcagaaatttagtataggtatatggcaatgtagaggaaatcctagaagaatctcagcctccattgttgccattcatctggggaaaagaaaaactgtatctttgtagttttgttggaatggaattagtatttttggtattattagttggaaattatgttccattcttctctatcagcccattgtaatctgtgatgataaggattgttgttagcatcaatgttttaatctatgcaaatgtagatcttaatccaatcccaagaacatatttctacattactcattatttattcgttaaaatataccagttaaagaatctcgagttttttctgtttttttttttttttgaa

SEQ ID NO: 377698 - DNA, 5502 bp, Cannabis indica
ttttttttattaaaaagtctttgactcattatgattgataagtgtaattcgtcacatgtttatttagatggagatttaatatttttttgtatttttttatgttttactattgacagcttattagtctcttagtttaaggtattattagaattttcttttctggtattgtaaacgatattaattgcctaattttattaattctactcattgaatgatttcatcatgcaattgattttttttttttttgataaaatcttgagtcattcattaaaaagaacaaaagatacaagaatcaggatattcaggaaggcaaagagccattccaaatgtattcagtgtctaaccttaatcctaccctagcacaagtatgcgcaattttattatgctctctacggacaaacattattaagatattaggattgaacggcaataagatccaaaagctagaaataatatcactaagaattgaattattgcaataatcattataaatcttatccactaagcttttaatgtccatttcaatgatgctaacaggaagcttaatcgcttgaatcagttgtagggccaaaagaagggccttagcctctgtaacctctggtggcacattacctgatataggagtaattatgcctgcaatcaattcaccatatccatcttgtttcacaattcccaagctatgcttcttcaagatattgtctaaggcagcatcagtattaactttgaacatgccgatcctaggttgagtaggctgtctatttgtaggttgtggttgccctctacttttggttgccatcggttgagatttgtaaaaatcctgtaaataagttgttgcatgatcataaaaaaatattggaggtaatcactttttatgatgaaaactattatttcgttgattacaaagcatccaaaggaaacataaaagagtagccgacacacacttatcaaaggtttcaaaagccttagtgataaaagcaataatattaagtaatttttttttcagtaaaataattatggaagggtgagtgcttccaagcagtttttgatctagaatattcaagaaaagcatgagttactgtttctagctttgtgtggcagagaggacatatgggggaaggaattatatgtataatacaaagttcaacagcacaggtatagagttggaaagcacatgccagacaaaatattttaccttagcaggtacacaagaagaccaaagtttagatcaaaatcgtttattatcattgaaagaagaggaggaagtaacatctctagagctaacagcaagatgataagcagtttttaaactaaaaacacaaagagttgtcatttccctacaccaagtcatcattaaagctatgtttggtaataggaatatctagaatactacctatgaggttgtcatcaaaataatgtttcaaactatccaggtcccaagaacctgaaggagagataaaaaaagataggtttggagaagggagaggatgtaataaggtgttagagctgcgaccaaaaccaggcagcttacgatcctcaattatattgattgtaagtccactttctaccttccaaataagtcatttcttgagcaaatccctaccccaaagtatacttctccaagagaaagaaggactatgaccatagacagcatcaagaatggaagaatggggaaaatacctagcttttagagtgagactcaacaaggaatttggacatttagggattgtccaagcttgcttagtaagcatgtcttgattaaaatgtgtcaaagacctaaagcctagccctcctataaacttggattgacaaacaacctgccagtttttccaataaatagatttgtgatcaatagaagacccccaccaaaatctagacacaatagattcaatttctttactgattttagtagggagacgaaaataggccattgcataagagggaatagcttgaaggacaaccttgattaagatttttttgccagctttggagaaccatttatgatgccaggattggacaacaaataacactttatccttaagaaaagtaaaagactggtatttagattgagatagacattgaggaagaccaagatgtatagtagtgaggggtttattgtccaggtggaaagtttgggaaaacaaagcacacattctatcatgcgtatttggggaaaagagaataaaggatttatcaaaatttataacctgaccagaagctttcgaataaatattcatagcactatttaaagcattacaagagttcatatcagccaaacaaaaagaatactatcatccgcaaattgaagatgcgaaatatgaggtgcattcctagagatggcagtgcctttaagaagttccttatcctgaaaagatcaaagaatggtagaaagtcctttagagcaaagaataaataattaaataaagggaaagggggtcaccttaccttaaacccctggtaggaagaatcctaccagcaacttgcccattaatagaaaaagagatagtagcagtagataaacacctcataatattagaaacaaaattgataggaaaattgaaatgatacatgatatttctaagaaaatcccattcaactctgtcaaaagctttcggcatctctagcttaatagcagcccacccaatttttccatgatgttattgttaatagcatgaatgagctcatttgctaaaaggatattatcaaaaatgatatgaccagagatgaaagcactttgttgaggggagataattttatccagaacaagtttaagcctattagcaagaactttagaaatgactttgtagaaagtggtacagagactaataggcatgatgtccttaagggaattagcacgctgctttttaggaataggaacaattatggtggtattaatgtcagcaaaatcaaccccattattgggacaatctaacactgcattagtaaagtcagtccctaaaacagaccaattcttttgatagaaatgggcattcagaccaccaagacccacaactttatccctagagatttgaaacacaacctttctaacttcatcagcaataaaatctttttctaggaaactgatgtcagaatccttaagcccataacttaaggaagaaaatgcagtggcagcagcctcaacttcactgccttgggaggaaaatagattttggaagtaagtagtgataaggctaattataccatcctgagtattaactatagcaccttcatcatccttaagatactttatagcattagacttctctcaaaaagaggcatgcttatgaaaaaattttgtattgttatcaccaacatttaaccatttcaccctagctctttgtctccaatagacttcctctttgaaaagcatagcttgtaaggccgactgaagatggataagcctaacagactcctcacgacttagaggaagcttattctgaatgctatctatttcaatactaagttgggaaatcctagacttaaacagaaagctatgctttttactccaggacttaagatgattgatacagtgtctctgcttatgaaggtaatgctaaaaaactattgctatgactatcattaacagaattaagccaagcatcttcaacagtcttataaaaattaggttcctctaaccaattattctcaaacctaaagctcttattaacaaaatttctaggtctaatagtattattatcaagtacaagattaagagattgatgatcagagccatagaaacccaaatgatgaatggtattattaggaaaaagatcacacaaggctttagacacaatagcccaatctaacctctcactaatattattattattagaccaagtgtatttattgccaacataaggtaaagggattaaagcaaatttatttaaaaactcaacaaaagatagcatatttgagttattaggaattctaccaccactcttatcactactgaaaagataactattaaaatcccatataatggccgaggaaagattaggggcattataaaataatttatgaagcaaatcccaagtaaaacgcttattattatgaacaggagaaccataaaaacaagtaaaatgccacatttcattactattaaaagaaatattacagtcgatacgattgagtgggtagtttaaaatatgtacaataacattagctttccaaagcaacataagatccccacaaaaatgcaatctggggacttcaataccaaaatcaaaacctgaagaagtcttaaaaaaataaatacagtgtagtttgagtctagtttctatcaaaaagagcacaacagatctatgcattttaacaaaaaaggaaagatggttgaatgcttgaggattccccaatcctcgagcattcctacttaaaagattcatttttttgggccaatattctccgcaacacccgcctattcaagactagcagttgtaaaggatgaatcataatccctatcaccagacctagcatgcttcagcatcaaacagagggaacttccaacatttgcttgatgagaatgaaacgtatgccttttaacaccagacgcataggctaagcccttacctttaactgaagggtcaggttgaggggtagccatctcagtagtggacctacctaagtcaagggaaggtatgtgatcagcaagggaacgggcagaaagcatcagttcagggttattaaactcaggagtattagaaacaataacagaatcagttgggacggacaccagatgagtagaactagtaccggggtgtggattagtattattgacattaaaatgagaggattctacctcagtgaagttgggattgacatgggtaggtaccatgacaacactagagttacggggagcccccagataaggccctagtcgcattgttgtgttcagaggagtagtaaagttaaagggcttgactaagaaagggtttatcattctttgatcatttgggggtggatgagtatgtagctctgaaatggaaacaacaggtggatgaggataatcaaaagaccctggtttatcaatagacttctcttttcccctaagtagactagtataagaactaaggtgtggaacaagacactcatcacacttttggagataggcttgacaatattttcaagtatgatctagtttaccatagtataagcagaaattaggaagtctctcatacttaaaatcaagccacttaataaattccctattcatttttagaaatcaaatgttaatatccctcctaataagtttattaacatccaatagaaaatgccctctcagatatggcccaataccctccttaatagtatcttcatctatctggattaaatctcccaaactcgtagcaataagtttggcaagttcataagacttgcacagaaggaatcccatagatttgcacccagaaaggaatataatgaagatattcaacagagatgggaaaagaaatgtctgggagggcaaaatagtagtgctttagaaaaatgctaaaggctgtccatcaagga

SEQ ID NO: 377699 - DNA, 1812 bp, Cannabis indica
ctatattcttatatttaattatagaccaacatcatatttgatgtggtggtccattgagagttacttatcccttattttttttatggatatagttactaataatgatattgtattgttattatttatatgtagattcctcaaccgagcagccttaaaaactgaaaacgataatcaagaaaagggcatctactcaaaatcatggaagttatgcacagttgaagaagtcgaagatttaaaaaaggtaataaaaatcatgccactatggtcaactggaattctcttaagcatcacaattgccatagtgaacagcctctcaactgtccaagccttaaccatggacagacgattgggctccatcaaaattccagcttccacattcttagtctccagcctcatatcaacatccatttcaatcttcatcatcaaccgttacctgctccctatgtggcaaaaaataagtggcaggcccctaactcacctccaacgaataggaatgggccacgcaaccaatatattaggattggttgggtctgccctactagaatcaagacggctacattggttcgagcagatgggttagtcgtgacgcctgaccagtctggctcagtggtgcccatgtcagcattgtggttggtgttgattctagccattatggggtttggcgaggcattacaattcccaggacaagttgcattatattaccaagaatttccagaatcactgaaaagtacatcaacagctatgatatcacttttaattggactagggtattatcttagtgctgtagtgactgatttaataaacagtgcaactggttggttacctgataatataaaccaagggcgagtagataatgtgtactggttgtgcgcgaccattggactagtgaatttcgtgtactacttggtttgtgcaaccatgtataagtatgaacatgaccaaaaaaatcatattgactcgtccacgacctgatagatttaacttaataaaaatgaataaaaaaatatatgtagcagtgtgtatgtttttttttttaaataataaatctgataaaagaaaaagagaaatttgtattagcttgctctgtattgtaatgtttttggtttcctcatttattgtttatcataaatttatttgtactataatttatggcaaattttcaaaaatcaataaattattgatttggcgattattttttgtttttgaaaatgaaaatttggtttaacctaaaactatgtttactagtccaatctctgacctaaaggaaagatatgcattactcaataacttaaacaacacttcagtgtgttaattataagttacaatatgatatttactattaattaaagtcgatggagagataaatcatgtgttcgtgcgttagcttttttggacgagtggaggacgacagcttggacatgggctgccttagtgttcgtgtgtgaaaaatggatgtactctattcagttgtgcggcatgccacttctctacactggtgaatcttttcccacacccataattgatattaccaacttagcttggtttggagatttgggccaagagaagtccaaaaaaatagagcaatttgcggcgaaacccccttatgttttgatttttatacacttaacccccttatctttatttttggtggcaaaacccccttatgttttaatttttatacacttaacccccttatcttttttttttgtggcaaaacccccttatgttttaatttttatacacttaacccctttatcttttttttggtggcaaaaccccccttatgtttatttttctttacaaatttgacac

SEQ ID NO: 377700 - DNA, 3106 bp, Cannabis indica
atcaaaagttgaaagtagaagtctattgcgttgggatgagtgatgtgatgaggtttcttcgcgaatgttccatatgccaacaagtgaaatatgcagctactactccggcgagtttgctccaaccgattgctttatctgctcaagtttgtgatgagatctcaatggactttattaaaggattgcctaactcggacggatggaatacaatcttagttgtggtggacaaactaagtatgcctattttatcacattgagacacccatttatagcagccactgtagcacaagtattcttaaaggaagtggtacgattgcatggactacctgggtatcatttcagatcaagaccgaatttttacaagccattttttgaatggcctccacaaatggcaaggcacaacgttgaagagaattacggtgtaccacccccaaactaatgggcaaactaaagtagtcaatcgaacacttgaaacttatctcagattttttgcaaatgagaaaccaaaacaatgggccaaacggttaacgtgcgcaagatattggtacaacacttctgccaactccgctaccaagtgtacgcaatttttggccctttatggcaaggatcagccacccttaatccggtatctgactcgcacctctcatgtctctgttgtagacattgtattggttgattgggctgccattttaaatgatctttgcatgcatttactatgagctcagcaacgaatgaagcatcaagctgaccaacaccgacatcacgaggaatttcatgagggtgacttggtatgtctcaagctccgaccacatagacagcagtccttggctaagaggagatttgagaagcttgcaacctgttattatgaaccactcaaggtgttggctcgcattggggcggttgcatacaagttagacttaccagctacttcatccattcacccggtgttccatgtttcccaattaaaaaggtcccataaagcagcttcgtcttcttcttcccttcccctcttgtctcctgaactagagctgcaagtggaagctgaggagctactgcaagtcgggcaacgtaccagtcgcaaacaagatggcttcgtcttcttcttcccttcccctattgtctcttgaactagagctgcaagtggaagctgaggagctactgcaagtcaggcaacttaccagtcgcaaacaagatggcttagaagttcttattaaatggaaatcactttcggacttcgaaaaaacttgggaagattttgctgatattgatactaaattcccacatttcaccttgaggacaaggtgaaagtgcacccagggtattttataccaccaattaagacctacactataagaaataagaaataagctatttaattataaagaaatttgttgctgacgtggcagtcaatagtgatgactttcctgctgatatggcagtctaagtttattagccttagtctcagtttagtataaatagaattttctttttatttcttattttttcatgattaaattgtaaaggagtagaatatactcaaggagtcacccttgccactcgacgagcttggaactatcttctgtaatttctccggacatcaataaaattcttcttcttctcttttctctctgttttgctatcttgctggtggaacagaattgtatcactatctttggcaatcggcatatttaagatcttgatgacttttcagttaattttaggctgatagcaaactctgcatctaaattctattctagtcatttgttgccttggtgagcttatattgctcgctaaaattttcccttcaccataacaacagaagtaataaaagtagagggtccaaaaaaatacctgtttaacgctttcaacagatttcccatcaaactcaactacaatatcaccaggatggaacccagcacgatcagcaggtgatccaggagttatctacttgagaaaattaagaaattattaaaacatgaaagcaccatcaaattcttcgaaaattgtatgtgattggtgcactcgtcattgggaagggaacatcatatcagcaaatagacaagaatacagataatatcaattgccatctcaaaaaataaaattgagtttaggtaaatgtaaacgaaatggaaaactagaggtgtgaaatgtgatggattcctatgaattgatatagttaattggaactagttcgtttaggatattaaattccagctagatcattacaagtacaaataagtgacaatcccacgaaattgtgaaggcatttgggtccttcaacccttggacctgagtttgacctattaaatactgaaaattatttagctattatcactatctttctctttcattttcatcccactttctctgtgacttcgcttaatttctttgctaataccgtatctagatttatagttcaatcaatatgtagtttaatataaagacgaaaccaaaatctagaagggaaaaacttgtaaagcaaaaacagcacaagtcaaatactacatgcttatcaaaacctaccttgccaaaacatatttcagaaatgtacaagtacataaaaagcactagcattactcacagtcaaaacaacaacaatgcagatattttcaacctacaggatgagccacattagaacttaccattactacaagaacacctttattgacatccggaaaagctgcatctctttctttaagctgagcaacaaccatgtcattaagttcaagcattttcaaaccaagccaaggtcgaacaactctcctgtaacacccgaaaaaaatgtcttaccaataacatcacaaccacaaaggaaaaagtgaagttctcaagcatactggcaccgttgttctgttttaaagtacacctacccactttttttgaaatgctcaatgattttgttgactgaatcaattggtacagcaaaacttaatccatcagcatcaaggactttcataatattcataccaacaacttctccatcaacattgacaagaggccccccagaatttccctgaggatgaatatgaagtgcaaaagaccaatgttgaagtagttggaaaaaaagagatgcaatataaatatatgtgtgtgtgtgtgtgtatgttag

SEQ ID NO: 377701 - DNA, 6569 bp, Cannabis indica
ttaaaaaagttataacttataagaatcaagcacattgttatttttcaaaaccaaaattatacttttcatttttgtggtaaaaaaataagaaataaaaattttacaaaactcatttttaagatacaaaaatacaagacaatactattgggaggcaaattgtaaaaaatattgatcaaacagcttttacaatactattctcttcatttattaacctttagtaatcaatttcaattcaactcatgttgtgaggtttctaattaaaagttgtttaagttgcttaattggtaggactactaatactatgttaaactatttctagggtaggtaatataattataaacaaaaggctattttggtcatgtcacatccaaatggtgtaattatctcacccaacacaaactctaattattttgtcctaaatttgaaggtaaagagtattctacaaaactttccaataaccaactatttagaaaagtataaatttttcatttataaaaataaaaaggaaaaaatagttctacttggcccaattgagtgaaaccgactagtttgacatttcaaggatttggctataagaaaaggttgagactcaaccatctattttgttagattttacttttaatatggaaaaagagattgatttgtaatattgcttttggtgttattagaattaattttgattttttgttcaccaaaattgttgaagatgagatcaaatagatcaaattatatatatatgcatgtataagaacacaatggctaatgtggagtgagtgagtttggaccacaattttaaaagacatgaaatgaatggttgctcaaaaggaattgtttaagagagaggggtctacaatatgtgcatcaattgaaatagagtaaggacaatggataagccctacaacaacaatttaagattttaacaaatatttatatatacaattaattaattaattataaacatttacatagcaaataaataaaaaaaagagtagtgttatatacacttacacattaaaataatacttgtaatagtgttgttgtgactaaagatgtagttaggacatagtaaaagctaaaaaaataaatattgttcagctcaataatgcatctaaatcatgtttgaatagaatgaataatttgaataaaaaaaatataaataattgaacacaaagttaaagtattattttttcttaccaacatttataaatttcgaaaattgataaaataaaattatcaaagtgaaaattttctcatattaggtgttagatagttgaattaagtttattaatattcctctcaatttcaaatagaaaaaaaaaaaatcgaattggataagattgtgcgctccaggccctttgggtgtcatattttggtaagaaaattacattatatacccattttatattatttattttagtttttaccttcaatttcatattttttaagaaatactcacttttatagatgatgtttccattatacccttaacttaatataaaatatatgctaaacttaagtggagagtgaagttatattggcaatctacttaaaaagtaagtatattttaataaaatataatgaaggtatttttgattaatggatacaaaaaaagaagtattcctcaatttatctctattttggtcgagtttaccataccttcggctcgtatgttacgcgccgtaatatttcgttaagttccaccattgttacaccaaaaataaatggtttcacaggagctcttttttttgcggcatggcgacaggaccaataggggattggctctaagtgtagatagggtaaaatctacggggctcatacaaatacttaggccccttctcttctcttttggatgtatggggtggtttagaatgtgctttccaatctatggtccctcagagcgagtggcaggtaatatgggccatctgacttccaactatgtgatgtgcgactcccacaaagcgaatgaagggaagctcttcgagctttcgagtgagcttacgctgactctcaacctctttgatgggtaggcagggctatttgtcgtgacacttttgttatgttactgctacttcttacacaaaaacaaagtattatcaacacaatagttatattttacaacataagtccttcaagaatactttcattgaaatggataagcttgtcttcaatattttaaagtgattatttacaagaaaggaaactcataatcctaacctaatgattcaatataaacataaaaaaaacattattataaaccaaattctacaatgtaaactaaacaattgtttttccattacacgtgtggtagagtgttgttaagaaagaataatctttcttggggcacatgcacatgccattgccaatgcaaattttcaaagtcaatcaaatgatcttctttcttgataatagtagtaaataatttgtaataaaatcccctttcccatagagaattttgtaatgttataacactacaaagatgacatttttatcagtaagttaaaactatataatataaatatgatctgacttgacattaaaggctgcacagaattccaataaaattaaacatttaatacaataaaagactctgcaaatagcggtgcagggcttttagtgcagaatttcccaattattttgacccatcaaatgggggcatattctggtatggaattagcattgaattttgcccatatatgtcattctcttatgcaattatttaaaataaaaaatacatataaaataaatatatttccacatctgtcatcttctgaaataactaatgagaaaaataaaaggggtcaaagaacttattttatgcagtcaagaagttagagctgaattaagtaataaaaaactaatcttgcagttttgtttaataaaagtcttcatttttccaagtgtcaaaatgaactgttatgcaattcatttcattttgggatcatcaagtcacagtcaatgcttttccttatcatcatcatagaagaaaataaataaataaataattgaaagagaaatatgcagaatgaactgagagtcaaaaaccaaacctttctcaccttctagttctttctatctttgagaaggtgtgacttttgttttgtactatatatgcctcaatttggtcactgcaagaaaaaatatctcaagcattttagaatagtttctctacggtcaaaatgatcaagtccacagagcaataagtctataatttgtaattgttatttgcaccttaaaaacaaaaaaagactgcatttttagtttccacaaagaaaatcaatagtcaaaattgacaaaaccacagctgtctttttcactcagaataatttatatgtgagtcaggttaagttggatgtgccactcattgtctgaaagttatctactttatagcttttcattcagagtttgatattatttgttactttgttttataagaatccaaactagaacctatactcaagtgtagtaaggattgaatgtaacaaagaagaattaattactaaagagacaaactttaatagattaaacccttaagaatcaaataaagaggtgaacaagacctgcaatgcaatactgtatcagccaatgaaaaatttctctgattgaataaacatgtaaacttttcttgacaaaatgggccaaagagaacagaaaactacatataatcatatataattcacataaaaatcagatatggcatgaagaagcacaatacccagataattgattatacaaaaagccagcatgatcaactaaaaaaaaaaaaaaaacaagcagccatggacatgggtaaaggtccatttgcatactcctaaatttctttacagcaatatatggtgaataataaatacaaagaaaccttttttttttcttcttcttacactttatactttttccttttccaatcttcttcttcttcttcaaagttcgattctttgaattacccaccaattgagatatcaaaacaaaccaacaaaactattattcagaatagctagcttttcccaaagaatcaagcccttctgtacggctccgaacaattctatgaaacacttccctaacttggcgttccaaagggtccaatccattctttaaggcaccacaaacttgagaaagctcttcaactctttgcctcacctcagttactttctcttccgttaatgggaactgaacagaatctgttaactcgctcataactcgagagcatttctcaatctgatgaatctccttcaaaagcccacaagcgtttttcctgtcccttttcttggattcctcaataatcctctcgtgtagagatgtcatggggccagaccacggtaagttacggtggaccacagggaaatggacctgaagacccctgtcctggcaaggtatggctgcaaccaaagcccacattacaaacaacaacaccgaattcatagtgaaaaccgccacggctaatcccccggtggccaccacttcgttggctcgcggtgcgctcacgttgttggcgatcgcctggagctgtctggcggccgaccaagaccgcgaaacgctccaagaaagtgatcggaaatgacccaattgacggtggtgatcgcgggaaaagttgttccggccaaatgagcggttccggtgagctagagttgagccgggatccttctcatcgagcataccgatcgctaaatcgattagggctttcttagctcggcggaattgaccttccccgaggtttctgtttccgtctaaggctatgagaacgatctctaatagcttctgccactgtctgatctgttcaatcccatctctgacagcattacaaacgtctaaagccttcacactccgttcaaagtagtctgaaaccatccgatccaacggtggtctgagcaccatcgatttatgattgaacaaaatagctctgaactcctcttgacaacagaggaaaacatctaaaagtttccgaacccattgaacagaaagaagctcctcagacccaaccacagccgccgccgccgaagatgaagaacacaaatcgagaaaacgatcagcaacttgtctctgaaaagcttcgagctcgatctcaagcccagactgggaatcatggtgactacctacgccgtccatggaccgaccaatactcgcaaacccagtggctgaaccttggtaatccgtagcgggcattatcacattgactaatttcaactcctttttattcgccgatttcgaaattgagaagtgaaattagggttctgggtttggtccagatagtgaaaagcttcaaacttgaagatcaattgggtattttagagagagaaagtgaaggagaattcaattgagaaaccctaatgtttgaagaagaagacgagagagagggtttttattaggggataattgcaccgcgtaaatgtttttttaattaattaattaattaatttatttatttatttatttatttgaaattaatattttatttttaattattaataattataattggtggttgggagagacaagaccatagcaaagtagagaattttcagaaagaatgagtctttaaagtttaaaccaaaaaaagtataaaaatcactactctcactcggtcacttaattaataacaataacaaatcttttttcacttttccctacaaatatttaataattatacttttgatcaaatctatattttattctgtcttttcttttctttttttaattattatgagtttcatattaatcctagtatgaacacagagaaaatttaaccacacatgattctcctaccacagtccacatgatctttttctttttcttttttattttaagtgaaaacaaattatgacatttgaacgtggcttaattttaactcatgtgtaaattattaatttctttttttttttttgaaaaataaatataaaaatattaaaaaacagcaaatttctgttttttaaaacaagtatattgtaacattgaccaccacaattaggattacctacaataataacttagcatttttataaattatgaagaaaaaaacataagtaaaaaagatatgagtttaagaaaatatatattaaaaatatagaataatgatatgtctatacacacatcaatgaatcatatatatgttatacatatttataaattactttaattaattatttttatttaaaataagttctacttataaaaatcgacttactttataagtatacattatatttgtgtataaattatttcatttgataatttttttttaaataggtaatgtgtctctaattgcaataatatatatatatataagtttcacaggctaatgtgattttaattcattcatatcaccataattattagtgatgctcataaagaaactaattataattatcatcttagggttaattttaatttatcaaaaaaataattttgaagtcttgatctgagcggaccttaggtgcgaatttagccgccttagcccaacctcagcttttggtatcacttacaaatattaatttgtacgaacatataacaaaattctaataaaatatttaaagttgtctataaaataaaattataagaatatgaattggctagtttat

SEQ ID NO: 377702 - DNA, 3362 bp, Cannabis indica
cttgctcaggaatcgtctcgtttggcgaggtacaataagaaaccaacaatcacttctcgggagattcagaccgctgttcgattggttcttcctggtgagttggccaaacacgctgtctccgaaggaaccaaggctgttacgaagttcaccagttcttagattttcgagatcttgtttatgttaatggcgatgatgatgatgatgattaaggctttgtttagttcttttctgattttgatgatgatgatattgtttatatagtgactgattttaaatcaatgagaaagtattatcagattttatggttcattcatcgttttcgtctttaattttataccaatttcatttctgcaaataacaaattgcaaaccaagaaaaatggtatttttgaaaaaaatgcgcgaaattattgttggtgggcccattttttgttggggaaagccctagaaagaggcccaatgttaagtcttgtcagaggacacgtgtacggttcagatgagataagaagaccgccattatagatgggtcaatgactcaattatccaaatcaaaatatctgactcattcccattattcctttaacctcatcttcttcttcttcttcgtttcgtatcagttctttctctctgtgatccgatctttaggatgattctccactgatctgaatctctgattcgtttattggtttgtgtttgatttcggtgacagaaactattagcagcgagctgttttgttgtttgtgtgtgttttttttttgaatctgtagaaattttagggtttataaggggaaagtgggtttcgaagagcatcgtataatgccttcggtgcccattagacgtcctttgcttccttgtgtcacttcctttcatggtggctcttgtactcatcgtctgaaacatcttgaaaaaagcgatcgtcgtggtaatcttagttaacattaggtttttttttgttctttgattttgatttggatttcttttcttttcctctatacctatctgtttacctcttagcttttagctagggtttctgggtttctgtttttattttttgatctttgggattgacgattaatacaaagcttggatcgccgtatcaatacgatttccaggtttgttttttaattttcttttgaatttcgattcattgatttgatatgtgttgttaatgtatgtttgtttggacttggtagaatctgtgtctgtagatggaagttagctcttgttctgataagtcggagtggtgtcaagatgtagccagctttggaagtttgcaatcttcaatcaaggaaaattactatactgaatttgatagtgtcgatgatttggtgaatgaacttgacactgcaatttccctcactttacatgttaaggaaaatgaacaagtggaacaattggaatgtgactttgaagattcttcttatggaaatgatgatggtgatgatggtgatgatgttagtaacgtgaatgagattgagtatgcaaatcaatctcagaagtcactgaacaaatgttcatccttaccatgcccccatagagaggatggggaacttggaacatctatgaaaggatccttctctaaggattcttcctggaatgcctactctcgttcaatatctttgcctgtgagtttttaatttaaacttaaagaaggttatggctttgttttcgtagtctagttactttaccatgaaagatgagtttgaatttattctcagtcgtatttgattttgttgattatctttgctttggcactaattagggaagtttgtagctttattacatccacaataaactagcttcaactgatgagcataaagaatattataagaaattttgttagttggattactttggggggcgatatctatgtttgtgctttacgaaatgagcttggatttgtactgttttcttttaatcttagtcttcacttgatattccctgtaaaccttaagaagtttgtggctttatttatccataatgaactagattgaactcacgagtactagtataaagagtattttaaggaatccatgttagtaatattgttgatgctatgagtgtatttaattaagttactattactagtaccataccatgagagaatgtggcattgtcaaagtttgaacttaaagaaggttatggctttgttttcatagtggagttacttttgtgacaatatctttgcctgtgattcctaatgagagatgagtttgaatttcttttcagtcgtattggttttcttaaaatgcttggtcagttggtattggcttgagctaatgagagatgtgtttgaatttctcttgcattggctaaagttaagggagtttgtggcattatatgcatagtatactagcttgaactgatgagcataatgaataagaaattttcacaattgggtcaataactttgcctgtgacagaatgcgtttgaatttcttctcagtcgtactgtttcttttctatgattggtcttgacttgatattccctgtagttgttgattggcttgctttgtcaaaatctaaggaagtttgtggctttatatttacactgaactatattgaactgatgagtataaagaaaagaacatgtgttaataatgcaatgaatgttaaatacttgttagtatctatgctcacatgttagtttttatatttttcttatggccagagccctttgaagcttgtatctgccatgaaaggtagccgtgagaaacggggtgcatcagtgaggaagcttagtgtgtcatgggcccctgaggtgtacgatcccaattccgacatccttatcacatacattcacaggaaacaagaaacagcagcacaagtcgaagaatagcaagaagaactggaagaacaacggaaagaaagggcagaagggaagctcttctagttctcgtgggagcagtggcaaagacaagaaacaccaccgcggtaaatcttctggaaattctagtggttgttatagtaaatcaattgatagtcgtgaaagggtggtggatgctaatgatgattttgatgattttacggttggtagcccagactcaaagtcctattgcgggacttcctttttgaagaactcgcatactaagatgcattatccggtggctgaagccttgtgagttaaggcgatttccgtccatctaagcctacacctacacctacatgtccatctatgctgtgtataaataattctagtgtttggtggttgttttttttgaagagaactatggatttcgtttttctttttttttgcgttgtgttgatcagaacatgaaccatatgatatgatatgttatttggttgtgtgacattttcattttgtcaaacaatgaacattgtggagttgatttctttctttcga

SEQ ID NO: 377703 - DNA, 1379 bp, Cannabis indica
tcttgaataatgacttttctcccaaatatttcatgtccaaatcaggtagttgttatccaaatcgggactgttttaatgtcttcctatttgaagtgattattagggtcccatactttcattataactggtctcttattgaaaaagatgtaccctccattaataatctcaaatctgtcttctattgcacgaaatcccactagataaactccatatgacagcatccttactctatcttctttggttttccaaactcttctaataaatccctctagaattgaaaatggtggattagcaccaagtacatagcaaacaattgaagatttccaaaattctacttcgccctctatatcttccattgtattcttgacttttcgatccacttcagaattcttgaaagaattggatagatttctcacaacaataccctatcataaaacaggaggagtagtagatttaccttgagatatgttgctagaacattgttgattggctttaagaaaataagtgaaatttgcttgaatgtcctcctgcctctgaagatattggggaaagtggttcttggaacatgtcttgtagatgattaatgtcctacttcagctctagtgactcctcctcatcattttcatcatccaagaaagcaataggttcgatccccatcacctcatcaatggacttagttttcttaatatcaactgtggatgatgggcctctcttctttgattttttagcatccaatatttagatctctcattgacttgcccaaccgctgtgatgccactttacgtggtcacctcaacctgtcatggcaccgattcactaaccagaatcgtgaaatacttataaattccaataaccaattttaactatacatgatcacatacaagattattttgttaataaattctttaataaaattattttgttaataaaagaatatatagagactattttcaaaaaatacttaatggtgggacaacgggataaaggctcaatcacaaagatttatggcatgtttactaaaggggaataggaatcaattgtatgagattcatacccattcatttgtttactaaattttggaatgggagaaattagtgggccccacacaaattaaggagaaaacaaaggaaaaggttcttccccattttcataaggaatacctttccctttctttaacttactttatattaattatatttttattgattaaaaataaaaaagacaaatatgcccttcaaaaatatataaataaaaaataactacatgttctaacaatgacaatttagtcatattaagtcattccgattacctatcctgattatgtaaacaaaataaaatgattctgatttcctttccggttagtttagtaaacaacaaaa

SEQ ID NO: 377704 - DNA, 8538 bp, Cannabis indica
gtaaccttcaactatattttttcatgcaagaatgcccaaaaattaaagaacttattcgtaaatataattgtacacttagtttttttctttctgggtaattcaaagaaatatacctttacactattgattttcacattattattaacttttaaagttggatttaaagaattattagaatatttccattagccactggtgcctagcaccttctcgacatgtcacgttgcaattagctagcgatactccctaaaaactattatattaaattatatgggattcgatacttagttggaccaatagcgatattgacacataagagggtgctaggcaccactggtgccctttagcatttatgagtattgttacgtattttatggttcttaatataccatattagtacgttaagagtacttactaattttatattatttattaaattaaaatatgaaaaactcaatattaatttatactaatataataatgtgctactgataaaataaggtgaggttaatatatttgtacatattgaacaattctcttctctttaatacataatattctatcatactgtgcttgatcacttgtgtcattttatggttggcgcgtgtagttggctatattttttattttatttatcttttttataaacatagttggcatatttttgagtctcataaataaaaagcaaagatgcggtcccagatttgcaatatgaacaaatacgtaatatatatataaaaacaatatataaaatatatgggtgggatactttaatacacccattaatgaggattagataggaaaacattggaccacctcatctcaaacacccaaacagtcccttattatgggaacaattttcacaaagcccaagcagcaagggcagcatctattctttaactcaagtcacttacccttccttctccagtttttaactttaataatttaatttgtacataaaaaaaaaaggtggaccacaactacacgccccaatcagaacttctctcactaaaaaccccttctgaaaaagccgggaaacaactccaacttaggaattttcttcttgggttttgttcccaatctccatttatgttttttagtagtaacttttcttatcccctctccgccctccaataaaataaaataaaacattattaataaataaaaagaaaattggattttgggttttttgagtaaaaatcattaggagtactaacaaacagaaaaacagggatcagctggcggcttgtagtatgtgtactaggctgaaggacgattttggttcatgatgattaccatctggttgtagtttttctcagttggactctatttcacgaaaaagtcaagtactttttggttggagttttttttcatttcttcttttttttttatttatactgtttttaattcattaataaataatgaatataatagtattatcagtaattaaatagtgacttttgtcgttttttctaccttaattacttgtttaatagcaccataataataattttatattgttgaggcatgaaataattgaggtggggtagatgttatcagaattttccttgtaggaagtctattttggatgtatttaatcttggagcattgacccacttgagctagggagagagagagagagagagaaagtacttagtcaggcaaaggcatatatggaaactaaagaaacgatgtgaagaagaagaatatggtatcatcatcatcttcatggtctacacctgatcccttgtaatatatataaatatatttatatatatatgtgatctttctttctttcctaggtttgggctttcatggcatcctatatcgttggcttattaggagaagaactcagcaaaaaagagaccacacttatttttccctttctctctccttcatctctccaatccaccacatacatattttccactatcccatatatatatatatatgtatataaactctaattatctcttctgttaatcataaacagcttttgtatggctctgatctcttagaccccgcttctttttttaatttcttttggttaatgtgttattaatccgatgaaaagggcgaaccccttttctgcagggtcaagttaattttgatgaaaacatatatatttatatgtatgtatattaacttgcttgatatgtttacacatgtaaatattctacaatcgatttgatgataaaattgaattttaatatcttggttttttttcttcttaatttgtgatcagtgaacaatcttgtacagtagtacttactatatactactatgaagagaagaagtatagaagcggaagcaacttaagtaatagttgagaagaattgttgaatattcatacataagatggtctcatcagctgggttttgctactcagatgtttcaccaaataacaataatattccgagtagtactacagctccaaaccatattcaacctcagttcaccaacaaccaccagatccaagagtttcatcaccactccaaccctgcagagatcttcaatttgacaacaggcatggagatgattggcttttccaagactagtaataaccaaagtacggatcatcgatcatatagaaaattagcttactaataataatactattactaatacttatattacaacttattatatttaataatccttattccttttcaaaggtttcagtactatttccaaggcagcagccggtccatcatcttccaagaccatggatgagtccaccaataccaaccatcatgatcaaaatcaagatcatgatcatcatcaccatcaattctatgatcatttcacgactgggatttcagaaacaagttgcgagaatctaatggttggaccagatcatgatcatcagcagcagccttggcaagagaataggttcctggttgatgattcttctttgagatgtgtttttccttgtgaaggaaatgagaggccaagccaaggcttatcactctccttaagctcagccaatccttctagtattggactacaaagctttgaattgagacaaacgaaccatcatcatcaacaacatcaagatcatcatgatgatgatcatatgaggttccttagtacttcatctcgagatgggtattttgggaaagtggcaaatatgcaaaccacccaacaaatgaatatgaatcacaatcaagatgggtttttgggtggtaataaagctgtcaattttcatcatcaagtacagtttcaactgaaaaactcaaagtacttgaaccctactcgagagcttctgaacgagttttgtagccttggaactaagcaaacagatttgataacgaagcaaaaatctcaaaagctgagtaaacagacatcatgggacgatcagactgctgataataatggcgccagttcttccaaaaataaatccctttactcccttgaattcatggaattgcaaaagagaaaaaccaagctgctttcaatgttggaagaggtaacacaaaaattaaaaagatagtacctttatatatatatggccattaaaataaaaaagttaatttattagagtagtttaatttcccgtctcctttaactatacttacaattaattcctatatataatacgaattatgcaaatcatgaaaaagtatatagtgttaattgatcatcatgaaataatatcaaaaaaagtacatcctgatttaattcttgagctaattaagcgacttgggggcctttcattaatgaccgcaacgtctgtgatgtctgcgttcatatattttttttcttcttgtttattttactcaattttcataaaattaaaaattaatatgttttagaccatgtgtgtataggttgagagaagatacaagcactattgcgaccaaatgaaggcagtcgtgtcatcttttgaggctgtggctggggctggggcggcaaccgtgtactccgccctagcttcgaaagccatgtcaaggcacttcaggtgcctcaaagatggaatagtgaatcagattcaggccacaaggaaggcaatgggggaaaaggatgctactgggggcgcaccgggcactaccagaggtgagacaccaaggcttaggcttcttgaccaaaccttaagacaacaaagggcttttcagcagatgactatgatggagagccatccatggcgccctcaacgaggtcttcctgaacgttccgtctctgtcctccgagcgtggctcttcgaacattttttacacccgtaagtgaaaaaaatattacgtacagtaagtgtagagatatatttaattttgtttggtaataagattttaccactttttccttttcttagattcccatcgaaaaaattgtagtttcattataaaagttataaaaattgaagtgttacatatgcaaattaatgaaagaagagaaatgttttttccaaattcgaaggaaaacaacatatgaagcttatgtggtgtagtctcaatcatttttgtcatgtttatatatacatttatattatatcatcaattatttggtttctttcgttgattttttttctccttctctctttcataccgttattctcttgtgggtctcataatattctgaaacaaaagtaccaatatatacaccaaacataaatttctcattttaatcttttatttaattttcacccaccaaagaatatatcaaataaatttctcatatgatataaatctttgtaggtacccaagtgatgttgataaagttatcttagctcgccaaacaggcctttcaagaagccaggcacgtctacttaaacccatattattatatgaatattatgtacatgtatatatacctatcaacaaccaacgaatatatagtatatcaatgcatatcaaatatcttgatcttatgatattattatatattaatttcatgtaattgatgttacgtttatattattgttattaattaatatttttatacatttgaattactgcaggtatcaaattggttcattaacgcaagagtgagactgtggaagccaatggtggaagaaatgtacttagaagagacaaaggagagagaattagccaatatgggagcctcatcatcatcacctgatcatgatcaattggataatattctgggcgacccgatacgactatcgggtcggagtaacccacccgacacagaacagaaaccaacccacgaccaacttctccgcattgactcggaatgtctctcttctatagtcataaatccagaaaaatctccacaccacgggcacaacaacatgatccatcaaatacgacaccaaaactttggtggtggtagtcgttttggggaagtagtgtcgttcgggtcatcatcctcacagcaggagcttgacttttcttcgtataacaataataataataatcaacaacaacaacaacaaaggaatggtggtgggtcagttttatactctaatcatgatcatcagaaccctagtaatgtggccggattcaataatggaggaggagtgtctttaacattagggctacagcaacatgcaggaggaggaggaggagctggtcatggtggtggagttagcttagccttttctcatcctggttcgcaaagctctgtattttactcttcgagagatcataacattgatgatgatcagtgccaacaaggggttgttcagtactcgctcttagacggagaaggtcagaatttgccttacagaaatttgatgggggcacagttgctccacgatttggcatgatttttattactatctctcatgacatataatatatgctggtgatgatttatttagatatttaaaatcatcttcttcatcttttttttattaggtacatcatctttctatataaaatatagtcaaaatatactttcatataattatatatatatctagatacttacgtacatacaaggtatactgggggttcaattactagacatatgaacatgataatatatgtatatgatcatgttcaattttcttttcgctagctagctagtaattttggtacactatttatctatttatctgtttttatatattacgatcttaattttttaaattaaataattactatatggtatactaattaaagttggtgcagcaatatatatataaattaatgctagctagggtacaacaattcacaataaaatcattattagcattataatagataggctttgattattttccacacacacatgtttcgattaattagagccaatttgtgcgatggaatcatttgtggtggttcttgttcttgtatataaaggatggaaaaagattttcgcgggtgatatatacacatcatcattaattaatcaataataacaaatatattattaattattgcccctctcaatgaagaaaattcaaattgatataacagcagcataaatataatttaagaaaattgtttttcctttagttttgatgaagattaggacaagtctaacgaagctacaaaacatgggtttgctttgtttggtggtacttgtggtccctaattaatttcacacgacatttcaatatcgatccatatgccattaggaatcaacaagagagaggcagcctcttttttgttttgccctcacttgatcgaggtggttcattattatatgcttctgcttttgcatatcaaaaagctcactttataagcttcttttttgtcatgtatgctaaaagcatttaggcttctagggatcctttttttcttaacaattaacttccattatcctattgttctttcaacctttatgatatactaggtaataacaacataatgcacctattaatttgtttaattaggcttacattgtatattgctatatattacataattcttaattcaaattataataactaaaaaaaaactaaacataaaaaaaaaaaaaagtcaattcaattgaactttaggctgataaaataataaataaataaataaaacattgttaataggcatctacacgttccatatggcaagttggcaagttgtaatggtgtttggtataagagtttctcacttggtgtgttttagttgagaggggatgacacccaactaagagtttgagatttattacccccaaaataaatttaaaactccattaaagttataccaaatgtaagtttagagttatattcttattctctagaactcaaactttattagagttattcccacattgttaatgcgtggaaataaattatcatatatgagacgaatgagctactcctctcattgctaattggttttgagatggaaccacattcaccttatcccaaattctaacatggtatcagagccacttgtgattcgttgtgctgaactaaaaagataaatctgctctctcccctttgaccttcatttgggacctttcggccaatgtgtgatagtttcagtgttagggtctttgacctgattcaaaatccacaaagttctcgacgtgtacacccaattttttttgatatttggcttaatgggattctttcaaatgtcgcgttcggtctcgtgatctcttaaatgtcgttcattatacccacacttttcaggccgaaacgtgaggagggtgtattaaagtttgtcccacattgctaatgtgtgggaataaattatcatacataagatgaatgggccactcctctcattgccaattagttttgagatggaaccacaatcaccttatcccatattctaacaaaccctcatatcaaacaacccataagtagcaacaatgttccataatatttatttaattgaaatatgtgagtctcaataataaaattacaccaataacagtatgtcgcctcttgtggttcttcaaaatttaagttatcctttagcattttctcaaaacaaaatatctatatcattattttattttgaaaaattagaaagtgtattgcaaaaaataccaatttataacctaccagtacaaataaaggcatggaaaacaaaactctatacaatctttgccaatcattatcaacaaagattctcaaacaatttaatatcctatttacctgtatgttttggccataccattaaaacataattttatacactttaaattaccttcgtaataagagtatgtaatctaggtagtcatctttcgagtccacaaaacttcattcctttcatgccacaagtgatacaccagagtcgacaatgcaacagcgaagagtttccttcttaatttgctcaaattagaccaagcaatccacctaataagatgtaaaattgagctagaacaggattgccaacctacccggtcacgacccgagcccgaggccatggcaaatatgtaatatccataacctgagtcaaaggtcacactttgacccttgtaggaagataaagcttacaaatgatcctttaatttatattacaaaatacaaattcaaaagtaatagattaactcctatattaataagaaaatattagtaacaaaatcaggaccactcatcaatataaaagaacaataatatccacatagttatgtaatcactaaatagatagattttataagtcaataaaataccaaaataat

SEQ ID NO: 377705 - DNA, 2807 bp, Cannabis indica
tatatataaaggaaagcacaaagctttccatgtggcagctcaattagcatttttttcttagtctctcttttcttaatttttttgatttaatttaattttaatcctatttttgtattttaattttatttagtattatttaaggccattaatatttttaattctgaaaggtcattatcgattgatttcaatgtcttttaatttctttttgtactatatcgtttactatctcaatttatttccttttttttagggttatctcaaaagtaaccctcaaaaccgcaatcgtctccatctactttaaaaaaacccatcgcatcatctcccccctcatcccctccctcctctgctccaccaccatcaccactcgagtatgaaccattgcctccattgttccaccaccatcgcgatcaagattgagaaactcgggccttcatatattcttaggtttctcatgtctcggtgagtggagaaagtttcttctgctcaagttcttcctataggcggcgagtatgagttggatgatgaatcagggagggagataatgttgatgatgatttgaatgacaccaagttgtttccaagtttcactcacaccatatcatttcacaaacgacaagctttaagttaggtgaattatgtatatatttatatcagcaaaacttatcctatgtatgtgtttgttggtatgtgtgtttgttgcagtgacgtatttggagaataacaaagtaggaatcacagtgtttggattcatgttggacaacacattgcttcactacatttaagttatttcttaaatctcttaggagtataatttctcatattagttttttaaacatgtactctgttaaatatatttctttctcttattttgtttcattttgtactggtgatttacttggcgatttttcaaaaattttatagcctctaaatctctcgatacacaataagacagcattgaagctttgcatctctggattgcattacagagagaaaatcaggtgaagtagatgaaaatagaattggcttaagatttgagtatgtctctcatctttggctacaagttttatttttgtcgacatgtgaatttgctaattgttgatttgtattcaaactatggatactctcatctttccttttcttttctttagattttttatagttgttctttttctttgttcaataatatatatcaaagtatatatatttcaagattttcaaccagtattgaataataatattcaactccaataatattgacaatcctaacctcatgcatcaaattcccttagtacaccaagccagtataattcatttaacaacagaacaaatttcgcacatagaaggtaattaatttagtcctacaatttatttgtcattgcctttgattggacgatccatataaaattaagagtaaaatcatgtcaacttttcttttcatattatctcatcaaatttgaacgaaaattttatcaaattggatacttgaactaaatgtatttaagaatttaatttagcaactaaagatgaacataatgatgactaacaacagtaaagttatagaaagcagaaaccaagtagttaacaagaaaagagaagcaaaccaatgacactatctatacaaacaaagcaaaaaaaaaaaagatatattttaaaatcttatgcgaggtttgttttgaattttagaactgtatggtttgttttgaatttaattgaaaccaaaattaaactgagatcaatttattatacaattgaaatgtaactggtgagacgttctttcagattttacaaaaatattattttaaatcaaagtaacactctgttattaataatttagttatataaagataatgtcctcttaaaatattaacttaagattgtttaacaaaaatttttgaggatgaatttcttttgctggaattgaaattaaatttttgtaactatcaaaaagataaagtaccagataactttacctaacaaaacaaataattagtttaaaatatactcttattttttttaaaaaaaaaagtaaaatagatcaaaatatataataacaaaccaatttgagtgagaaaataaaaaatatcttaaccacaattattaatgagacgtttatgaactcaaaattatttttagaaattattatatataattaaagtaaatgaagtaagttgttaaaacataaatagctttaataatttgcaaaataataataaaatttgtgtagaaaatatttaagaaattttaattattataattattgacattttaaatatttgtaactgaaattatttttaaggtacttgaaagtttaaaaaatattacaataataatagttaaaaataaaaatttaaaacatttaaaataataattagtccaatcttaaatatttatatttgtaactagacatgttttcaaaatttaggaaagtcaaaagttctcacatccccataatttgtttaaattaatcattttatctaaatatttatataaaaaaattcaatcactaatatttttatataattccttatcttcaattttcaaaagcaaaaaatattgtgtaaaccaattattatggtacatttacttttgtagaaaaggcattcaacttttatttacaagactggttaattaaacataaaaacaattattttttatcatttttatttatttcattatgatgacatgcaattttatttaatttgatcatttcattgcctttttaatattttcaaatagcaaactacatcgcaagttgggatacaacggggactacatcgatttagtattgaatcggattgtcaagctgct

SEQ ID NO: 377706 - DNA, 2463 bp, Cannabis indica
ttaattgtgctgttttgttgttttatatttgttttataaaacgatagtatttttgtaaacttttgtccaaaatctaatatttttataataaccccaaaatataataacaggtctagctataaatactatacatatctcatgttcatcaaaccaatactatacgtgctatatcatcaaaataatatatacatctcacaaatatagataatcatctatccaaaaagcaatgcgtaactaatctaaaaaaaaagcaatgcgtaactaatctataagtaatataaattagggactgattgtgcaaagagaaattcgtacagaaaatagagatgcttatgatagtgtgtgtttacactgtgtgtgtgtttacattgtgtgtgtttacactgtgtgtgtgtttcatattgtgcgtttcagtgtatgtatctttaaactgattgtgtgttgcaaatactcataggttaatgatacaccacctaaagccctaaacactatgctagaaacactgatcctacacctcatcaattagtaacttcagcaactgccacacattttttgcaaccacgcaactcagcaacaatggtacaatgtcaaagtcctctcaaataattcattctacactttctcaactgtttgtgcattaataatctcattttatcatttattacagcaaaagacatcctaacacattgcaccaactcaacgagagattatagattatggagatagcatcaaagactatggagaagtaatctgagtggtatggagataataccaaagcatcaacctatagtattttgaaatgttctatgtgtttacatgctagaattgtaattagctacaatattgactgattttattttttttgaagtaattattgattgattaagtacttatatatatatatatatatatgtaatcaggttttatgatatcaaatatgttgataacatagacattagtttatcaatttatcaaatatgtaattaggtgtttatatggtagatgttctaatatttttatgatattttatgatgttgataatataggcatatatgtatttatatgccagtgtgtattgtgattcttgattattaggttagagttggggtgccttaaatatagaattttctcattgagaatttcaaaccatttagctgtgcctgctgctgtcgttctttttgtgttttgctctttattttctttgttctgttgtgtatgttttgtgcttggtgattggtcttaaatctcaatatcctcacattgcttagctctcctctaatttgttatgctctttagagctgattgtgacattgattgtataagtagtcacacttatgacattataatacacaacatttcattctctttgtaaatctttccatctctttctccgtattttcctttcatttacatgtcaaagaacttcaatacatttatactaattaaattaatggaatttcttttggatttctcaaagtgcagcagtactttaatacatttcttaattttcttttacattatatgtctcttcatctatacattaattgttgctccactacagtacaaactcacttactactttaatgaaaacaatttgaaacaacaaactttgccaagttttgaatctcatgttatagcgtacatgttatacaattcaaatgacatcagaaaatatttagaatttagtagatttattgtaaagttcactactcatctttaataggtacatacatatataggttagtcttccacaaattttaaagattaaaaatctcaacaaaaagcagtattaatttattattaaaatcaaatttacgtgcttataaaaaaaatcactgaaaaataaacatatataaaaaaggaaagcaagcacaatgtatcaaaaacaaaagaaattaaatcttcattctaaaatattaaaaacaaaaggaaaattataacaaatctaacaaaaaatagaacgcaacaaaagtgcaacaacttaacatagatgccaaaattaaaatatttcttcaatcttctaacttcttcatcagattttttaatatgattttgcagtgccattaaattctcctcaatcatctctagcattttaaccaaatttatatcattccttagagctagtgggtcaatccatttaaaaaaaaaacacaacacctaatctgaacattactctgtcaaaactaaacaaaaaatcattacaaaattttcaatatccaaataatacccaaaaatatgtaaacaaagtttccattttggacacccaaaaaaccttctgcttggattattttctaacaaggaagtagggttgttcatcaaaaccgaaaaaccgtggtttaaattcggaccgcgacaatccgaaccgctatagaccgtaaccggggaaaccgtttttggtggtccggttaatccggaccgtttaccgcataatagttcggttgcggttcgtaataaattattaac

SEQ ID NO: 377707 - DNA, 4448 bp, Cannabis indica
atatatatatatatgtttctatagcacccaaattaacgcctaatattatttaaattcataaatgtttgtagggtactaagtaaattcaaatttttttttttttaagaacaacggccaacctactccagtttttttatatgtttattttataatttaatcttaaaaaagtatataatatataaatatataattgtatcagatcaattttaattagatcttctgaaaattttctgccaatccaattcaattataaattaataactttttattttgagtgtgtgtttttgcttagtttggatttgaatcagatcaattatagctcttattggattggatttatagcaacccactattttatttgcaaataaataatcaagtaagctctacaatatcattgtaatttccgagttatgataacaaggtatatgtacataaatatacatagtatattggcatcttagaaagtcaacacattacagcctcggttggataagttttatcgttataattttattaataagaaagaaatactgtttgactaataaattttatacatactttttatacacaatttatttaatttttgcaaaaattattacatttgagtgataaattttttattctatttctgattgagtgactatattaattattattggaataaacacataaacaataatttttgtaaaaattttacatttttttttgacaatttttttgatattctataaaaacataaaaaaaaataataacaacaaaaccacattaaaataacattaaaatacataaaaaaaaaataatatacaaataataaaaaataaaaataatatacaaataataaaaaataaacaacagaccttattttatataaataaaatttaaaaatcaataaaaatgttgaaaattgtttttgtgttgttttgaaattatcccttaattttttacttgtatagattgagatgacttacatatcattatataattgaaatatattttaaagagcttgaatgattttgtaagttaggattcttacaacacatgattcaaaaaagtctcacttatccgtgtttgagcagtttctcctattatttttacaaactctcttcttgtatcaacaaactgtcacccattaattaactggtttccttaattcttaccaattacattttcctttataaaaatgaatcataaatcttaagaacttctcattttttttagaagatatgagtataagaaaaaattacatactaaaggggatttgtgtctatttccatgatttttgcatgttaaatttgtatatatatatatttatatatatatatttatatatatattgaattaattaaattcatagtaaataaccaaaagagacaaggttaagttcacatatatatacctttgcatatatatatatattgaattatatatgtatataccttgaattcatcggtgttcttccaggccttattcatctcatgaagtaccatttcaatatctgggcgatctttacttgagcttgcaacacacattatagcaattgaaagaatggatctaaaatcagccttattgtacttccctttcagtcgtgggtcttcaaagtcctctatgggacgattccctaaattaacatcctttgcctgaatatatatacacacaaggcatgcacatatgtttaaataaatatccttttccctttctaattaattgacgtacgtcttaaatatatgtattatatatatacctttcttgtgagttgatcactagcaacgatatttagctcgataacttctggccagccaaaatttggagagtgacgatgccaaaactgtagatatcactggcacatgtcaacttggcgttgctcatgtattcggggtccatataacctatggttcctctaatagcagtgaatactctacttcctccatgttcaacaactttgccaacccaaatacagacagctttggctccaatgtctcagtcaaaaggatatttgtaagctatatatatatatatcaggagattattatataaattaatattacaacaatctaacaaagttaatttgttatttattagattaattaataatgagcatgcattgcaataaggcatggtgtctaaaactatactaatttgttacgttacaattgattagtgagatatattattattaaattaaattatgtggcatgtaatattttttatgacatgcacgaataacgatatgtcaactcttgtggtgcttgataccataaggtgtatggggttgcatatactcatagagttgtcttgtcacacatatgaaatctgatctaattttcaaactaatttaatgtaaaatgttgctggacaactgttagacttgtcaatattgaaatattttttttatgaaaatgttgtgaaatcaaatgtggataagatagaaaataaaaataaaataatatttagtattttttttggataaaaaataatttttagtatgatatatgtatttcaaaaaatatagatattcctcattcgagatactctattagcatttctcattaataatgtacgtatgtaccttgatatctctatgaacaatacagccatctatattacggtgaagatacctaagtgcaatggcgcagtctcgtagaatcctcacccttttatcccatgtcaaaagggtatctttccctggaaagaattaatgcatatgaaaaattattctctgtaaattgaacaggacgactccatataaaggtcgaaggggttctttatttatacataaatattgtaattcttagacagttgcagttatcttaaactgtcatacaccacaaaaattgcatatatggttgacagtttttcattttaaattatgacagacatcctttatattaccttaaagtgcacttttaacatttatctattgattaccacgtttcataacaatatttataaaatcatttttccaacacaatatattaagatgcatatgaatttaattaaaacaggcccaacttatcacataatgtgtacattacaattggtattattctttttttttttttttcttttccatgtgtagacaaattcatatcttttttttttttgatgttcactaattcatatcttaaaatatattaaaattacaatcttataattttatagagcagtgttatttgagtgctcataaccacactaggtagagaaatgttaaatagcattagaagtgtctagtattctcctacataatattgctattattgatccaactgaatattaagttagaaagttatataatataatgatgcataataggaatgctccactagatatggttgtaaaggtcttaatatatatgtatggggcggtactaagtaatatgtaataacagtgttataatataatagatagatagagatataagatataaaaagcggtacgtacttagaagttggtgagaaagatttcctccggcgcagtactcgtacacaagatagcggcaatcatcttgaatacagaaaccaaagagggaaacgaggttggggtgtcgaattcttgaaaggccttccacttcgcgtctaaaagagtcggcatggtcgttgttctggtgtatatgcttgatggccacaggttgtccacttggcaaaatacctttgaacacgtggcctgcactccctcttcccaagctctcattcccgccgcagctaatcgctttctctatctcagccgttgagaatctatacagccctgaccaagctgggaactgctctttgtttgattttcccaatttcatcttcacacccttcttcttcttgcttacatattttaccagtactatgatcaatgctattgcgattgtggctattactattgccaacactacttccgccaacgcatctgatcatcagccataccaccatatttatatctcaaatattctctcttattatatgtacatacaataaaaacaaaaaaatttctcaaataatatatataggtaatttaattaattatacttacatttaatcttcaggtaatctggatctgcaagatataacaaaccaaataattaccaatattatctaaaaatacaacaaatcaatatcccttttattagttcattcataaattttaatgcgtacatttgtaattggctaattaggatttttgttgctgaactttgacatgtatctaatcatgcccttgaacttttaaggtcgttaaaaatgatcgtgaactattgaaatcattggatttaaggactttttcctaaaattagacaaaagtccttaaatcaaacaatgtcaataattcaggggtattttcaacaaccttaaaagttcaagaaacataatttgatacatgtgaaagtttaggggcaaaaatcctaattatatttttcaataattaataataataataataaaatttttgagtttttaatttaacatata

SEQ ID NO: 377708 - DNA, 7532 bp, Cannabis indica
tacaatcaaaagcatatccataaccatataacattgaattctaaattgaaaaacaaaaattacacaagaaaacttttccaatggtttacaaattacaatcgatacatatgtccatataattttaaccctaattacgttacgtgttaaaaaatccgaactaataattatatatttttgtttcaagaattaataactcttttaaaatagtaattggtttaaaataataataataataataataagaatttggacaaaacaaaaaaaaaagaactaaggcgggaaaaacgccaaaacatctggaaaaacgaatgggacagaatcatagggtggtaataatacttaaaagaaaaaaggaaaaaaaaagaaatatgtttttcttaacccagatttcgaatcggtcgcagtcacacatatctacatgtttacatttactatctcataaattatagtactacagtttaatatgtgcattaaaaagatagtcttaacaactgtaataaaataatatatatttaaatagagaagaaggaatgcgaattttaatattgaattatttatatttatctttttaattgtttggtctggtcttgtccgaaaagtaatatagatttaataggaggtagagagagtgtagtagaaaaatcaaaaaaattagaaagagaaagttaagaagaataaaaggaaagagtgcgcgtgtccggtgcgccgagagactcgtcggccagctcaaaaaaacccctgcccttctctcttttgggcatgcaacaataacaacactcattctctctctctctctctctctcttcttctcactttcactaccatcaaaagtgccgcttcccatttcttcgtctctcgactcttccctcttcctccatcttttattttccggcgaaccttgtcgccgttcattgttttccggcgtcgaactgggtggtattgtttattgctctgcgctagctctatctcgatctgacgctttctgatcttctgcaaccaaggttcgccattttttatttttgagtttattttttggcggtgggggctaatttgcaaaagaagtattttgcgcaaatgagtttttgagattgataatcaatgtacagatttaagaataaaaaatgaaagctttatgtgtttgttgttttgcttctgggaaagtgtaagtttgataaatatgtcaaaaaaatgagcttttctttagctaagattgagttatgaaacatgatgggtttgttcttttctctgtatagcttcgattttgagatctaaacattttttctttttttcaattttgtactttctaagctatatttgtatatagtttctttttatcgtcactttctgggttctggaaatttttttcttcccttcatatgggtattcaaaaaagtaatcttttttcttaagcattatttgataggtagttatcgtttatgcttattcatgtttagctattcttgttttcaaatagttggggtgagggcggggattgtcattttcgttatgggtgttgattgcagtgtcatatgggtgttgttctataatgtgagttagaatctatgttttcattttccaattgctgttctatggttagatctgcaatctttctctcgcacatgcagacgcaaaatttggacttctctaccctgacttaactcatttgttttccttcgtaagtctagaaattcttccgacccctagctccctctcaggcacatgtatgtttgagctaacaagacgtgtatttaatttaataagttgttcaattgttcttattctggtatttggaacatgatagattttcagttttttgaattcgtaattttcattttggggaagtcataccttcaaatgtttccagctgcttgcatttgaaatatgttatacccgttgaatttatactagatattctagtcatataggtaataagtgatgtcattggggttagttgtgatggcataccttaagggatccgctctattacattgattcccaacttttgcgtcatatcatgacataaataagagttcttaagcttatatatcctcgtttaattctagtcagtaactaaatgaaactttgatgacagcttgttatgaaaataaagtacgagttttgattgtctatgaagttaataaaatcatggagatggcttttgaagaaaaaaaatgtttcatctgatgcggtacgattgtgttcttttactctctttttatgatttaagtgccttgtatatgctggaggtattaattttcttatcagccttgtatcgttcaaaattttgatgcaggggcgatgcggattcaagatgaagcaacttccgtttatgggaattgtgtgcactgtcatgctatttattgtgtatagaaccacaaattatcaacataaacacactgaggtataatggttgatcattctgtttgtgtatgtgacattatgtttgagtgtccatttaattagttttgttttccgggaggatagtctactgatttattttccttcttttatgtcagatggaaacaaaaatgcatccttttgattcagtaagctatatataccttacacgtgtttcacttgctttgtgtgcattacaaaaaagttctcacatcttctaatggtcgtgtataggaatttcgtgtggcttccagagagttaagtggtttaccccgtggaattatacaagctaggtcagatttagaattaaggccgctgtggttgagaagtagctcaaggtcaaaggtaagattcactttctcttataatataacacaagtgttccttctgattttagtattgcttcttattggtaacagattcatgtgctgttgctaattgttactttgtagactacactggtgttttcttatttgtttttataaatatacattgaataagtacgttttgtgacctgtggtttggcaggttaataactatagtcgtcgcaacttgctggctgttccagttggcattgagcaaaaacttaatgttgatgatatggtacaaaaggtaatacactttcttctctttattattcagaatgttatcacaatgttctttgcctaattctatcaatttcagtttcttccagagaattttaccattattctattccattatgatgggaatgttgatggatggttggatcttgagtggagtaatgaggccatacacattgttgcacagaatcaaacaaagtggtatgcttgttgtttatagagtggtatttgatcatttgttttattatgtgattaaatgagagaacacttctttttgaagaaatagtagctgtaaaatttctcttggtaaggcttgttaagcccataatttgctgagattgacatggtaaatggtattttgctacttttcatctttattttacctcattgattttgactcttcagctttagatattgccccctgttttttttattcctgtttcagtaatagtattttggttcatcacaggtggtttgctaaacggtttttacatccagatgttgtgtccatatatgactacgtgtttctctgggatgaggatttgggggttgagaactttgaccctggaaggtaatattgatgggttccttgaagattttttgctgggagtattcttattttgttgactatggcttggatcttttcttttttatgtgccgtagacttagtgttgatgttgtggcaaaactaattttgacctgcattttgccctcataatgataaaaaggaaaaaagaaaattactttgttttatagatggtttatgctgatcttctgttaataactataaactgttggtttattcctgaacaactttctagcatgcccatccagtaatttattataaataacaattaatgatagcatagctctctaggtctgttcttaaatctgatttttgcaacaaaatttattatatttatgattgaatctcttgcattcaattcagtaagctgcgtataagcatataatgcatttgttgaactaacccttggattctaccagtgctattagtgcacaaatataatctaatgtatgaagattttatttaattatcatctacttattctctccatacatgatctgttgtttgttgctagatacatcaaaattgtaagaagagaaggactggaaatatctcagccagcattagatccaaattcgacagagatacatcatagaattactattcgtgctagaacaaagaagtttcacaggttaatagacatgtttatattcatcattaattttttttttctggaaacatgtgtcttatagaacctttttacattttcacagaagggtttatgacctaagaggcagtactaagtgttcagattcaagtgaggggccaccatgcactgggtatgcttttctctaccctactagtcaaaattttcccgggatacaaagtttgggtgtttctatttattatatatacaacatattttctcattataaagtccactgattcttgtaaaagaccaaaacgatacatctcttattgtaggtgcagcatagatcttatcctttcttaaaggtgtggttaaagtacttttaggatgctgattatgttctttatgtcttgtccttctcctaactgacccacttaagagtaataaagggagatatcttattgctgtagtttataacagtacttggttttaaaaatcttatataaatcggtattttggtggacttactggtttatgtatctgcctatctagattcgttgaaggtatggctccagtgttttcaagatctgcttggcgatgtacttggcatcttatacaggtaactttaaaaaatggcattaaatgtcacttttaatctattggacgcaactagtgaaatgttcatgcagaagttgcttttacatttttgtagtcttagtcatatagcatgaattttactttgtcacagtacattgatagtagttgtagatgggcatcacttttatttttattttggtttctatgatgattgaaaatctttgatttatctgttcatatgaagtccgtttataagtcggtcattcttttaagatttggcttcacacttttgctttctaccagttcttagtaacaatttgatgttatacttctctaagcatttatcatggttaaattcctaatcataatgctctcccttttttttttgtgcagaatgatcttgttcacggttggggaatggatatgaaacttgggtattgtgcacaggttatatttactttcctagttcttgttcaagatttagtaactttgattagttcttataactttttacaacatggacaacagaaagacattttatcactgtctttttcaccggttcacttttcaccactcctatacttccaatcttgcctttgggaatgtctccacaaccttgttggatatgtgtgcatttgttctcaaaagttgtttacagaattgcagcaaaatttagccctcctgtcttctataatgatattgtcactgctaattggcatccttggcaattttcgatttttacactatattcaccaactcttttaaatctttatttgcaactataaaaactacagcatggcatattgttgctctgcttgctttacaatcttatcaagccatttttcttgtatctctcccgaattttcaaaatgttgatacattctttttgtcaacttgtttgtgcctgatatgtaataacatagctcttttacagggtgatcggaccaggagggttggtgtggttgatagtgaatacatagttcataagggcatacaaagtttgggtggtggtggggctatctcttctgtaaaaaaggttagtttgcatttgaatacccctttcaccttacaaaagcaataggtttttcctttgacggtgagatggcatggtatacgaatgctcatgtgtgtgatacttgaggatttttacatcattgatgaattcataagaatcgtatgatttctagactactcatataaagatgatagcaaccaaaaaaaattaaatgttataaaaaaacaaaaaaaattctgaggtggtcccatttgctccactataatctatttcactgccttttgtgcaggcctcaaattctgaggtggtcactaaggtaaagttcagtctaaacaaatatacttcttttattcgtccaaaaaaatatttatgacattttactaaggtcattatgacccttgctattttgttaatattctttatttatgttactcagaggcatgtaggtggagctggtgatatgcgaactgaggtgagtgactaaatctttaattgaatgtataaactttctgtatcgctgttacaaactctcgcctgcataaaagtattccagagagatttagtgaattgatgaatgttccttttgatatgtgctcttgcagattaggaggcaatcgacatgggagcttcaaatctttaaggagcgatggaatcgtgcagtggaagaggacaagaactgggttgagccatttaaaagtattcaaagactgagaaaacgaaaacacagccaccactaaacgaagattttatcccatcttatgtgcttcaaatgtttggtccgtgatcattcccagtcttgttggtccactctactgtctgctagcttctccttcagcgtttgttgtactctttcataattatttcatttatttgaatattcataatttttgctttagagttatttcattacctgtatctagcttgagctgtaacacatagtcttgttgtaattaaaaggtttactaattggtcaaacgagaactacagaaatcattattttcttggaagatgataatatgtatacgttgtaaaacatacaaaacgatgtccacgttcttctaagcattgctttgctcaactattctttgaagaatgttgacatagatttacgagcaaaagaaataaataaataaaacattttagaatggtagtggtggattggattggctatgtaaactttcaagtgaattaaggctttcttgcatagaaagctaaacgaacttaaattgtactgtaaacaatatgtggtttataactctaaacgtgttctgtcctactttagagttagtcaagttcaaagcttgaaaattcattacaattcacatgagttatgaagaccagccatctcttatattattcgactattaaataatgtgttacatggacgtttaggcctgaaagttatttggtctgagtttctagaatgacacaaaattattttccaaaagtcagttgtgggctacaactacagctacgaagcacaatccttttgcttgtgcgatacctctcaagtctttatacttctttattatgtgccgtatcttttatcttctctcgaactctattcttagatgactagtaataataatgttgcaatagcttattcgttattacatgtatctcaagctttctttttagtcaaacggctttagtcttctagttttcatttgttaaaacatatgagaataataataaataaaaaaaaacttgaaattagactaatcaatattttcaacatttataatt

SEQ ID NO: 377709 - DNA, 2463 bp, Cannabis indica
aaattttatcatgagaaaataccttggtcaataaagagacaaaaaataactaggaaataaaagttttataaaaatatcagctatattatattttgttgtagcatggatgagctttagtttaccttcttagactttctttcggacaacatggcaatcgatgtcaatatgtttcgttcgttcgtggaagatggggttctcaaatttatgaatggcagttgtattatcacagtaaaggataagtggttcttcatgtttaacgccaaaatcctaaagtagtatgagcagccaagtaatttcacaagtgcatgggtcatggcttagtatttcatttcaaccaacgaacgagagactgtaaatcgctctttggacttccaagagattaatgatttgctaaggaagacacaatacccagaaattgatcatttagtatcactacatgaagccaaatcagcatcttaaaattttttaaggtgaaaatttacatgtgacatattagtttcagcatatgcacatcaattagtaggagatgctgaatgaaaaaataatccttggccagaagtgcccttaagatattttaatattttatgagctacaataagatgaggagctctaggagtaaatagagtctgacttacttatctatagcaaaggaaaaattagggcatgtcatcgttaagtaaattagtttacaattaatactacgataaacctttggatctaccaatggttttccaacattagatgaaagcttactgttgggttccatggtgtaaaagcaatggaagctcccaagaaacctgttttagtcaaaagttgtaaggtaaatggtcgttgagacatcgaaatgctacttgaagtatgactaatctccaaacctaagaaaagtatcaagggccaaggtccttaagctgaaaaatagagttaagtggttgtttaaaagcacaaacaacaatttcatcattagaagtgaccacaatatcatcaacataaactaaaagtgcaagaaaaatacctttataattttaatggataaagtgtgatctgaaagtgattagtaaaactattagataagagatagttactgaactttgtgtaccattttcgaggtttgttttaagccataaagaattttagttaatttacatacaacattagggtcccttaagtgtattgcctttaggaatggtcatatagacagttttacttaaatcgacatgaagaaaagcattattgatatcaagttggtacaaaaactaatttttcatggttgtgagagcaagaagtaattttaaagtattgaactttgcaatagaagcaaaggtgtgaaaataatcttgcaacctttggcaactaatcttgctttgtagtgtcaatagtacctctgagcaaaggaggatttataagaagtgagaccgttcaaaccgcatgagttttatgatcatcaagcgcatcatacctgcggcttttagggatgcggtatctgaggaggtcactgatgccacaactttccttgttgaaattgagaaactctttgcaaaaagttataaggcaaaaacaagtaatcttttaaagaaacttattatttccatgaggttcaagggcaaggaaaacataagggggtacattatgaaaatgtctcaccttgcttcaaagttaaaggcatgaatttagtgcttatctctcttcctccataattcaatcaattcaaggttagttacaactgttaaagggagaagtggactcttaatgagctcatttcattttgtgttcaagaggaagaaagattgaagcaagagaagactgaaagtgctcatttggcaagcacctcaaaggataaggacaaaaaaagaaagaatgaggattctaaggataaaggtccagcatataagaaacaaactcaagccaacaatgatgatggttatttcttttgcaacatggaaggacgcgtgaagaaggaatgtgttaagtacattgcatggcgagcaaagaaaggtgcatttcttactatggtttgttctaaagtaaatttagcttcagtaccaagaaacacttggtggttagattctggtgctactactaacatcagtgtttcaatgtagggttgcctcatttactgaaagccaagtgatgctaaaagaagtatttatgcgggagatggcaagtcggtgaatgtggaagcaatagggaattttaggttgttgttaagtattggttactatttggacttaatagataattttgttgtaatgtcatagagggaatttagtttctgtttcttgtttggacaaattgggttattgttgttcatttggaaataactgttttagtatatttattaatttaaatactattggaattggttctcttatggtttatgatatattttcttgacactgttgcttcttataatgaaaccttaaatgtggaatcatgtggtactaagcgtaaaatggataatgaaaa

SEQ ID NO: 377710 - DNA, 3240 bp, Cannabis indica
agagagagagagagagcaaaacaaaatttaagtttggagagttctacctccaaaattcaatactggaggttgatcgtgtcaaactcaaaagtttaaatagcttagtcacaagttaccccataagattaaagaggtgtcgggcaggtagatggaaagggaagcatgggatcatttgccccctcaattttgtataaattatgaaagagtgattgtctctacattgcatctctttaaaaaagttcctatctcttaaactccaataacaatcacccctaaataaaaatagatacgtttgtttaatgtaatattgcttaactttttatgagattactaccaatatcgcgaggaagagaattaggaagacaaagaatgtgggtctttaattttttatcctattttttaatattgctttagttttttgttttattgaattacactttagaatgaattccttttcaaaaatatttaaataaaaaaaaacactttggaatttaatacaatatattgtactaagttaaactaaaaaaacataaaggtgaaatatatggtcatattctaaattaatttgaccaaagtgactttaattttctttttcgctttattataatggagcaataatgtttctttctttccttcttacaaaaattgtgataaaatttacttttaaggtctgctccctttttgtagtcaatttttttaatataataaatttgaagtgagaacttctattacatgaaaaaaaaaaatgtaaaaattatttgtgtgtcataacataagatccaattttgttttatatttataaagagagatcaagaagccttcctattacaccaaggtaaataacatataaggatttgaagcatcacttgattttgtcctaattaagctccatcctaaactaatatggtgacacttaatataatatattactaagaaaaagaggatccctagttgtattgtatcttaagaagagatttggaaaacaagcccatgaatgatgttatatgagaacacaagggtgacacttttgagttcatcatcacttatttatgagcattgttattggcgatattttccaaaaactattttttaaaattatatagaacagttacttaattacattaatagtggtatgacattgttggaattttgatactaacaaatctttctattttttctttacatgaacataccaataactctcttggaggatctcaaactggctcttcttgtgttctctttggttctctagaaaaagagagaaaaaaatatctttttatagatctgtgatttctgatctaggacagagccttagagatatattctgtaactgtttttcaattgtaactgatttatcttctttagttttgattttggttttgttgtaagttgtaagtgtcggtatatatgtcattttagaactctatgaatagtattatgaaacttagggtacataaaggaatttgttccaacaaatattaaaagggtactagtcaccaataatgtcgtttaacgattctccatatttatttatgttgggtaaataaaagttgaatctttacaccccattagcctaatagtcaaataccacgcaatacacgtttaattaatagctaatgaaagaacaattattggttttcttttaaatttagatatgacaaagtgatttaatgggcagtgggacatgcctgcctaataagtgagacatcttgttactaattttgctgaggtgatgttgataaatatttgagaagattaattaaaaaaaaaaaaaagatgcagataaaatagagaaattagggttatttaattgtaaaatttaaaaataagtaatacaattaaataaaaagtattatataggcaactaacataagaataaaataaaaaagaaaagattaaaataaccttaaataattatttaacactcttcctcaaactcatattgtttgttgcgagaaatatcgagagtttgcctaaaagaaaacgaaaacgaaaaaattgtatgtgacttagttaaaaagttaacaagctatacgaaaaaggaacaaaagataaagtaatggtgtctaaaaagtaaatggtaatcaatctaaatatatttggtgcgttcatgaaaaaacgagttatgagcaatctgaatggtgctttgattgtcacaatacatagaagtaggacaagagtgaatgacctgcaagtaaaccatctcaaccaaaaaatctctttagtagtagacatcatgatacgatactcagctttcgtagaagagtgagaaacaacagactatttcttgatcctccaagaaataagggaatctctcaaaaagatacaaaaatcaatgacagatcttcagtttgtgggatcacgaccataatttgtatcacagtaagcttgcaattctagagaagaggtggaaggtagtagtaggctttgaaagatggtaccacaaagataccgtagaatgcaaagaacagcagcctagtgaacagtagtaggagaagcaacaaactaactaacaatatgaacagtatatcactactacaaaatgcattttggtaatcaattttaaattgacacttatacatatagtgtcgatacatgaaatcaatacttattccaccaagacaaaagtatattccttggtgtcagttctaaactgagacgtttaagtaactgagacttactagtgtttaattatttttgcactatatgcatatctcagtttagaaccaacaccacaaaaaacttttagatctagccacaaattactcaagccaaatctaaaattcaaataatataatttacatttgtaagaacacaataaaattaaacaatatactatcaaaattcatatgacaaactcaaattctaatttaatttggcttttctttttctaaatgccatttcaatctcaatttaattccataattataaataaagttctcagtcatccacattattagctttccaaaacagaagttgtaagaatcatttactctgagaaactttaaagagtgaatcaaagaaactaataacatgaacatgagttcatgactacttaggattcgagtcgatctactattaattatcgttataatataaattagatctttataggaaacgacatgtttgataaagacagcttaataaagacagcttaattacatatcggtgcatgtcatatttaatctctattatatacatataatttcacttagatgtgcatactgttgggttttatgc

SEQ ID NO: 377711 - DNA, 3071 bp, Cannabis indica
tataacagctcacttccaaataaattcaagagggttaccaagattaaaactataaagcttcctgcaagctactaaagatggataccttcacaaagcatgatgagtagtctctttatggaactagcaaagaggacaaaaatcatcaattaagaaactatgagcagccaaattaattttagtaggaatccaattagaggatacttgccaagcaaacaatctaacttttggagagatattcaaggtccaaacttttttccaccaacccgagaatctcctaaatggagaagcacgacccaagcccttattataacaagagttaaccagtaaccgctcttgatagaataccatccaaacttttcaaaattccatataagtttatcatctgcatcttagggagctaaggaatagataagatagcttttgattattaggaagaaagagaccacaaaccaaacccaaattccaaccccctgaagcatcatgttacagagaacccttgctaccctcactaaaaaaatgaggagtcatcaccaaagaggaagacgcaaaaaggacccaaaagtcataataaatatcaacattaaagtataaaatatttgaacgaccacctatgtcacgtcaaaatagtagattatactcgtgattgagataatttttgaaatcatcctatgtttaatactaggctatttagaatttttgttcctgatctatgacatatgtattattgtgcctctgaacttttcagttgtttggtaaatttaatacgcaagtgattgaatcaagtaatacaataataaataaaaatcgttcctacagagattgattactaattaccaacaattaatttcagaattatatttggttaataatcaattgattttaagaagctaaataataaaaattcgcaatctaaagagataacaaaattgacaaataatttaatggatgcaaactaggacttttaatttcatcatctatccactctaacatttcataacacaatttcaacatttcttcttcctactatactagcgaatttactaaagaaatctatattcgggttctcgtaataaaattaaacaaataggggtattaagcatgaaaatcctaaatgctacacaaaccatataagtactgtcgtcttatatcgaaacctgtgcctaaataattatagcatatttaattctcacattttaaatcttgaatcaaaaacttaaatgtaagcattaaacataaattgcatagatcataataatgaagaagaaaatcaaagaaattacattaatccataattagagtttcaagagactctattaaaaccctagaaaaagtatttaattcataatcatggtagaaacatccattgaataataagaagtagacattaaacacaaaagatagagaagagaagaaaaagaactagttttagtcttcaatcttgatcaatccttcatctacatcctctcgtggtattttctatattgtaatgttaattcccctccttccatgtaattacttggctgaaaacctcagtctaaaaaccataattaacaaatttgcaattacaaggcccagcacgtacagactcgtacttgcgtggaaaaggcccgcgctcgcagatcggttgttgtccatgtattttctgcttcgatctctctcattcaaacgcacataatttttacatataaattttaaataagttgattcaagatgcaatgaaatgttaagaaagagatctaaaacttttatgctttgattttttctaaaatttgaccaaaacatgattaaatttaggcttgaatttcagttttatttttctttgcaatgatttcctaccaaaaacacaaaaataacaaattaacactaaaactaaacaaaatgattaaaacaaacaaaacataagaaaataaacctaaaggactctatagcacaaattgatgaaaaataactctattttatagagttatcatcagctcgttaaaaatacttcttgaactattcacagtcttgtaaattggttatttttgtcaacttttgccacatgtggcaaacaaaataataacatggctacttaccaattgtcatgtccgtattatgtcaacgccacgtgtgtaattaatatgaaaaaaaataatttaattttttttaaatttagtcttacgtgattttcttaatcattaattgatttttaggttaataatttttaattttttgatgtaaaaatatacatgtgacgttgatgtggtaattagctaagtagctatgacatcatttaatttgtcacgtgtgacaaaacttgacacaatgactaatttacaataatgtatataatttagaaaccatttgtaataggctgaaaagttcaatgtacaataatatatatgtttagtttgagagataaaaatcttaaatagctttaaaactatcataataaataatattatattaattttataatataatatttttatattgatttatattaatatatgttagtctcttggtaagattacaattttcattcatacaaataataatatttttttcagccattaattttgaatcctataactaattaatatttattgagctacaataaaattagttagatcactcacaatagaacagttaaaataatgacaagataaattatttaattaagaggtaaaaaaattatgaacaatgctgatctactaaatgagttattataactaagaaatttaattcattgaactataaatattatattattttttaatttttttttttttgaaatatttgtgcaatattagtattattttatttatttattgaataaattatattataataaataatttttaaaacttaaatatgatataatataaatgtgtagggtttagggtaaaacataaaaagtaaaattttagtgaaatattttagggattatttcacaaatacacaaaaataacaaaaaaataaaataaaatacggttttacgaaattttaaatatttttacaatattttttattttatttacaaaaaatacggtctttttgtattgtacccttgttaatatgttgttgatttt

SEQ ID NO: 377712 - DNA, 1890 bp, Cannabis indica
gtggcgttcctatggattagggcattacaagaattatggcccacaaatcttctcttttggttggaaaggatgactccttcatttcgagtagctttctcactttttgttaagtcaacaacttaacagttgggattgttttgtggtatatcccacaaaatctgaaacatcattagagacaatcaattcctttattcttggctcccaaatctcccctaacaggtaatgccactccatagagaccttgttttctgctaggaatattttctaaaattggaaagcgttgaccaagtgacaccatcgaactaccgctacctgtggtggcccgaaacgataaagacgaagggttgcacaaccattttgacccatcaggaaaattcattgtcttttgtctggctttcatccaaacacaataaggtttgaaaattttgttgagaggagtaaggaaaggttttgaaacaaaacctatctctgtggccaataatgccacaaataaagtaaaaaggagaattctttcatatttaaactgaacatatgtccagtcactatccttttgatgaagtcacatcttacattttagaggaacgtctatattcaacataacttgcacgcaaaaatagtctctccaaacacccaagaaattattcaaattcgattcaacaaacttttcgatatattgtctgacttcttttagaattgtcacagacttgagaccaggtataacatcaagaacctgaacccaaatgtcaagcttattcagccacaatctgtaaattatccccttcttctaatttttcaaaaatacgttgttctctattacatgtccaagggctgccttctattagtctttgaatatatatttcatgaaaaaattgaaagataaaaagattactttgcaattgcttcacatagatgcccatgtttggtttctatagattagccaactaattttgaacaaaatcaaggtcgatcaacctatcagagagaaacattcccaccaaactccatcgataatcaaagttgttattctactctttcataggatcaaattcagaaccaccttctgcctattcatccaggatcaggttagcatagtctaactctaattcgtggattcaagaactacttgaggaagccataaagacaaaaaaaaaaaacaaatagaaagaacgaaacaaaaggaaaaagaaactcatggaaaaaacactctaaaaaatgtcaatagacaagaccttgattttgtgtttttagtactgatcaagtgatataatttaaaatataacattttgatgtgtgtattataagtaaagtaacttttttaaagttaaaatcacaattagttattgtcaaaatatattgaaagattctctcaaaaaaatatggagaaagattttttattttgtaaacatattaaaattggtagaattaataaagaaattgcatattttttatactcaaattgtgggaaaattacaaataatagtgcaaaatcaaaacagctaaactttgaacaatcaagaacaacaatcaaataaaaaatagcggaaaatagagaatgtaaaacaagataccataaaagcagaaaataaaaaaaagaaatcaacaccaagatatatactgcttctagtccaatagatcgatgtgacctatggctctactccaattccggaacaccactgtaatccttctttatagattgagcacaaataagtacaatactgtcgagatgagattctctaaagagttctcacaaagtgtttcaattctcacacttacacttaagaatcttcttcatcaataaaagattcttcttacataatcattgttgacctcgcttttagccaacgacaatgagtcttaattgtaagcaacaagtaatataatatagatgta

SEQ ID NO: 377713 - DNA, 2017 bp, Cannabis indica
tgtttattataaataagaacaacacactaaaaaaaattgtgttctaagtaattgctaaaaataataacatccccagctataggaacaaaagtagcaacaaaattttccaatatataataatgtgtacccttttaggtggagaggtaattatgtggcactgctattctttctcattatggaagaactcctcttatgagtgtaactggtgggctttatcgagttaaaaattgccaataaagtaagggatcattaatattacaatacatgttatatgctaaaatttgaacttcatcacatgcaatgaattaaaagaaaaaaaaagaaggaaattattagggaaagagcatcaaaacagggtatgggacaaaatcttcatggccactattcattcattcccttcaagtgtaaagtccgtgacttaaaactagaagttggtgtatctttttctttctggtatgattaatatcagaatcacccataaatttcatgacccaaagtattcatgagtcatggccactccctttttcaatctttctcaacttcaaagatttcacataaattatatgacctcaaatggtttgtatttggtacacaattttctagaatatgtgtctagtttctttcccttattcaattccataaccaaatatttcatctttttgttcaatacatatcaatccacaacaagaaaacgaaactctgtctaaccaaattgaacaacataaaataccattttgtaagaaagaaaaaaaaataatttacaaactagttatgtggtggaacttccttcacatgggtccacgttgcctctttcctaacttttgcttatttgcaatgtatttccaatcttctacgacattattatctttttttaataataaaaatcactaaaaagtcataataaagtaattatggttgatatggaaacgatttgggttatacttattcagataatgaatacataataatcctttgttatataaaaaaaatgaattcattctctgctctgtttcagtaagtttttcaggggaccccaggttttgtctttctccaaccgccattcaaaacatctgaaatcccggattaccaaaacaaaaacgacgtcgtttcgtacctttttccacctttaaattttaatactgttcttattcaatatcaattactatatttctttgtttgatgagatcgtgccagccatcttgagaagcctaaaaagagaaaaattcaaagaaagaaaagctagtcatttcatattatatatatacataattcagtttcgtaccctttatctcattccttattctccttttcatgaatctttaaatttgtggggtttttttttcgttcttgtggtggtggggtgaggaagaaatgtcagccaaaattgggtctttcaggcatagttttgccgagaaaagcaaagaaagattactctctagaaagggttactcggactttggcgcttacagcatgaatggtggcgaagaaagagtcaagtgtgggtgctttcgattcatgtccgatggatttgtcaacttttggagttacttacacaacatgtttgttcaattatatgaaatgggtcgctctgatcctcgcaaagtcgtcttcgctactaagatgggcttatcattatcaattgtctcactgcttatctttttcagagagccccttaagagcgctggccaatactccatctgggcaatccttacagtcgtcgtcgttttcgaattcagcgtaggtattagctttcgtgatcatttttttatctcaatcttcttttattattcaatgatgattttggtgattttcagatcatatttttatgcttagagatgttaagtccgttgggttgtttttctgtttttgtaataggggcaactcttagcaaaggatttaatcgtgctttgggaacattctcggctggagggcttgctttgggtattgcagaagtatctgttttagcagggagattcgaggaagttatcatagtaatcagtattttcatagctggtta

SEQ ID NO: 377714 - DNA, 4499 bp, Cannabis indica
tatgaagtcctaagcttttgaaactttcatcaagtttaaaagtcttgtggaaaaatagtttaatttacctattaaagctgttcaagcagatgggggaggggactataggcctttagaaaaacttttaagtgatcaagacatagttttctaacaaccttgtcctcatagtcatgaacaaaatggtagggttgaaagaaaacatagacacataactgaaactggtttaacatttttagctcaagctggtcttgatctttcttactggtggttttcatttcaatgtgccactcactcaattaatcgaatgcctacacctgttcctgctaatcttagtccctatgagtgtttgttgaaagaaactcctcagtatcatgttctcaaaccatttggctgtgcttgtaatccacatttaagaccatataatcatcacaaacgtgagtacaggtctgaagaatgcttgtttctgggatattctccaaaacacaaaggatacttgtgtgaaaatgttgatggaggaatctttgttgccaagaatgttatcttttatgagttgtcttttcctacttccaagattggtactgcttcatcaaaggtaaattttaaaaaccacaacttgccctataatgcagttctgtactgggtttcagaatatttcacctaacttcactgttgagccatctggttcaacatctagtgcccctaatataattcctggtgcaaatgtttctgctgataactcacctattgctacagctgctagagtagctattgacacccatgatacaccaactaattcaaatgcatcaacagcaattgtgcgtgttgcacctgcacaaacagtttctgctactgcagatgttcctgcaacacaaattggttcaccttgttcagcttcctctgttacacatgttgaattcttgaatcaagttacttcaaatattcattcatctacaacaggtcctcatgtcacaaacaatgctgaaccaattattgcatcatctctgcaacctcttgcaccagttactttgtcacacttcctcaaagtcattctatggttactagatctatgagaggtatttacaagcctaaagcctatgttgttactaagcatagggtgccagaatatttgttgcctcgcgagcaaaaatcagtgaaatctgcttttaaaaatccaatttggaatggttccatgtcaactgaaattcatgttcttaaagctcagggtacttggactttagttccctgtgaaccacacatggtatgaatagacaataaatgggtatatatggtgaagttaaatgcatatgggacccttgataaatgcaaatctagacttgttgctcgaggatatctacaacaaccaggtatagattttgaggacacttttcagtcctgttgtgaaaccagtcacagtaagattggttctcacttttgctgtcacatttaattgggaagtaaggcaattggatgtctcaaatgcctttatttatggtgatcttattgagacagtttacatgactcaacctaaaggctttgaagaccctcaacatcctaatcatgtctgcaaatttaacaaagagatctatggattgtagcaggcacctagggcttgggatgggaaactcaaaacaactttattcagttggggatttaaggcttcgagagctgatacatcattattcatatgtggatcaggttccactcaaatcatcctacttgtatatgtagatgatattctaattacatgcgctgatcccaaccttattaaaaagcttattagcaaccttgatgatactttttcactcaacgatatggggcctgttcattattttcttggagtggaaatacgcagggactccaaaggcatgtatttgtctaaaagcatgtatataacaaacctactggttaaagttcatttagatggtgccaaaacttgctcaagtcctactagtagtgctcacaaacttgctctaactaagggtctgccttttgaagataaaacactatatagaagcactcttggagcactttagtatctaacattaaccagatcagatgtggcattcatcatcaacaagctatcctaatttattcatgctctaaccaatgttctttgggaagcatgtaaaagattacttcgatacttaaaggccactttatctcatggtcttgtcatttcaccaacaactcgtctatccattgaagcatactctaatgctgattgggcgagttgccgtgatgatcgaaggtctactggtggatatgccgttaatcttggtccaaacctcatatcgtggtcagctaagaagaaccatgtcgttgcccgttattcaactgagttcgagtttcctgcattggcaaacacagcaacataacttaaatggtctcactctctttttatagagttgcaggtggagttagttgatgttccaatcatatgggtggacaatcaaggggcttctgctcttgcagctaatcatgtctttcacgctcgctgcgaacatattgaaattgatcaacattttgtgtgtgatcaaatcgtcaacaatgaagtttttgttagatatgtgccctccgttgatcaggttgctgacatactcatagatttcactatttgagagagaaacttaaagttgtatcttccccttttcgtttgaggagggatgataaccaactagctgtgttatgacaattggttagtgtctgttgagttagttattactgttgttagcttcttggttgttattttcctaaacgaatgtatttctcttgtgtatataaacacttaatcattcattaatgaaatcaagttttctctgcattttctttctttttgaacatactctgttcttcttcttcctcctctgctttgttcctttaatggaaactttattttgcactctaatcttataataaattatgttataaacatttttttatttatgattttatttattcttttttcgtaggtaattaactgttggtacgagaaatcaacacactaattatcggcaaaaaggtgtattaacaagaccatggttcccagattacttatgttgagcaagtgaagaaaaaatttcctcaaaaagacgtgccagaagaaacaagaacttcggagacaaagaagggacctcaaggcccacaggggcctccctcgtttgtgggctcctcaccccagcaaggagcccctcacgtcgcaccgtggccttcagtgaggggggactccgctcatgctgcaccacgacccccagtgaggggggcctcccctcgcgccccaccccgatcccaatgagggggccctctctaaacaccgcaccacgaccttcaatgagcggacctctcctcacatcctgaccctcaacaagggggtctccctcatgcgacgtacaaccccagccagggggcctcctccttcctgccatgaccccctgcgaggggtctcttccttgcacttcagggctccaacagggaacttccccctcttgcatatgacacgacctcacgatgacctctcacacgagatatcctatcacgcgagaaccttcgttgaacaaaggctctttttcaatacgtaacaacaagagagggtcaatcaagaagagcctcatctcttcttattagctactcatcaagggagataggattaggtatccacactcttatgcatagcgaactttagcatgcaaggtatgaaagtacaacataaaacatgtctcatatcacatacgtgtcaaggaccaactcaaagagcctccacgccactacaacacctgggcaagtagtgggtgtacaaagtgtagtgaacaccaaatctacaggtgtgaatacaaactgacaccgagccaccactatctctactacccacctgtagtgctgattccttgggtacaagtcagggtgtgttttgcgcttttgggatcccatgtgtattagggtaaatagtgccactacaaataggaccctcctccatgagaaagggagttggaaaattattctttgttacccatattaagaaacaatacaacagttgaacttcatcatcttttataagtttttattatagtttatcattcaaaccttaatttctaagttgattttttggccataacttagttgacgagtacttatcgtcaacaattttgtccttctgtgggaaaaacaaagctacaactttatttttctcttgaaacactactagaaaattggactttagaggcatttttttgggacatacaacattttggcaaaatttgagacttacactgttccaagggtcgctaagggacgtgaataaaccaaaagcatagaccctccctatgttgttgattattataaataactgacgacataggaggaaaaatttgaaaaagcttacctatggcgttggttattatcaaataactaatgttgtacgtatttatagtgtcggttctttacatgaaaatcgatgcctaacgtgttatattttatttattaatttaaaaattaaatatgatttt

SEQ ID NO: 377715 - DNA, 6313 bp, Cannabis indica
aataaaactttcaaaaacatagtcaagagacaagactttaattagttaagtatatgatagtagaaaattattaatttagagaaaaaatattaaatatatgtaagcaaaaaaaattaaatttactcctaaaaaaatactataaatataataatatcatcaagcatcttcatatcatctgcatgctgtaataggaatgctccagattaatagttgcgttctaaagacaagttatcagcattgagaaccgtaaagtgtgaaattgtatgtgattggaggaagaatgccaacaaagcagagagagagaaagcttccttttctcatacgccaattacagcaatactagcccttcaatcatcattgatttcattattattctctctccacaatcctaatccattttaaaaatttattttaatatataaatacaaaaaagccatgaaaaataaataataaaaaagaaaatatctgaaaaagaaaggttacagtgagagagaggcacaaaggaaacagcttgtcagtttagggttttttttatttaacccttagctgaaaaagtgcaatcattcatctcatcagacccttaaacgaatcaatttcaatttaattctctccctccagagataagctcctaacaatccatctctctggtatggaatggaaccttcattttcttcttcacttgtttttcttagcttttttgtaaatgaaagatcttccattttttctgcaattttgaaagataatgaatgccgtaatcactgttgcttgaggcttaatggggttttcgtttttataactgaaatgtcaaggatcttttgtttttaagcctccatcatttatatatatgtatgtatttattcttgattttttgaataataaagcgtgattcttttattggttttcaaagatttttatgagggcttttcttcctgttaaaaatgacgtattttctttttgtcttataggagggttgatgctacaagatgaagtttaggatcgattttttaatgggttttttgtagaattgttttaagattgtttgagaaagaagatgctttaacagagtcttccgtttgacttggtgggggttgttgtagttggaccttagagcctgaagtccaagatagaagtgttgaaagttgcacacttgttggctgaattgaaaagttttgtaaaagagaattaatggaagaagtgacagttttttgccgtgaagcttctgtgaatttgttcagagaagaagatgaagaagagtttaggagttgctgtgaagacgaagaggtatggaaggaaactgaagaaccggataaagaagaagaagagacaagcaatgagcttgatgaatttgctgtgaagatgttcttcaaaggaaagtccatagatggctttgcagactcaaattctgggatgtcaggcattggggtgtttatggaaagatcatccactttccctgtgattaagatccaaaaaaagcttgagtttcatgtggaggattctgttgccgactatttagctctgctggacggtctaacggaagctcttcagaataatattcgccgagtgtatgctttcacagactctgagcttctatatgatcaggtgagtccgttttgaatcagttgtaaagtgtctggcttttcctaggggcagtttgtattggaggaggagttcgtcctgttttttattttcaaaattttatgttatatgtttggaaaactttctcagtttttgcttttcggtttgattgtgtgtatattaattatagtactaggtgagcatgaactattattactttttctttaaagagaaatttggtaggcataattgataacacttgccaattcccttgtcattactatttttcagctctgtaggctttgtaacaaatgaggattttgtattgcttttgttgggtagttagtaaaatgtcagttatgttgctctatgaaaagaatgaaaaacttatcatgaactgtactttctaagctttggagattagttttgccatatatacttactattaattcacatgctatgagtatataatatacatatatttcttttgaaggaaaattggagaataatacagtgatgtaggacaatttcataagtaagcctgagaatgtttgacacaccaccaaggtctttagatgttaataagcaaataaaaatctatctccaactgtactaggaatgaatcactataccagaaaactagctataagaatttcaaatcctgcatgccaatcccagaaacacgggaaaactaatgcatgatcacttcctaatgttatgtctcacattaatgtctaattttaatgctcggctcccatcagaatatacataattttgttatttaatttccttcatgaaagattttgcttctgaatttgcttaataaattcttaaaataatatgattcttctagtgactgttaatggttatcattttccctcgtcctttgtgttgtctgggttctaataatgtacgtttctggcagataacaaatgataaagaacctgacattccaattcttgttgcactaagggagcggattctagaacatgccagtaagcttgaagcttttgttctgaaatgtgttcctagtgcagatgttgagcaaccaatggaactagctcaagtggcaatgggggttgtctcttttcctgcaaagggagatatatttcttgaaaactgctcaatatgttgtgatgacaaaccttgttttacaatgatctctctaaaatgctctcataaattttgttctcattgtatgaggacatatgctgatggaaaggtacagtcctctcaagttcccatcagatgtcctcagttgaaatgcaaatattatatctctagtgctgagtgcaaatctttccttacctccacttcttatgagtcttttgagaaagcccttgaagaagcaaatgttaaccactcagatagaatttactgcccatttccaaactgctctgtccttctcgatcctcatgaaagcatatcaggtagagcaagttcatcaagtcagtcagataatagctgcatagagtgtccagtttgtcaaagatttgtttgtgtggattgtggggttccttggcatacagcattgagctgtgaagagttccaaaaccttccatgggaagagagagattctgctgatattacattatttcgcctagcacaaaataaaagatggaggcgttgccagcagtgccgtatgatgatcgagctcactcaaggctgtcaccacatgacctgttggtaagatctccttccttctagtggttgctctttaaatttctagaagattataaatttgtcttgcaattaataagaaaaatggtcatcaatgtgtgtgtgtgtgcgtcatgttaaatagtaatccttcttggaagaagacaagctggatacagccatggtgtgccgggcagttgttatataccccagcaaactaaaacatagcaaaaataattaaataaataaataacatttcaaaagtttaaagggataaagcttaagcattctgtaaaatggacagaactgagagctttcaattcttgtttgaggaaatgctttaatttactgctatttctataacatttttatttgtggttatatgtaagagtgatgccatgcttaaacaaagaccttttattttagtatattgtaacgttgtgtggaattttgaagttatggtaaaatttgtaaatggaccacattgaaatctgtatcaactagatgaaattaacattcggttagtatctaagagagaaatgttggaattcattttatcttaattcatacaattcgaaacagtagtctactagtttagtttcgtgtttaagaaagaacagtgattatttatattaatttttttatcaccccaagagattctacatgtattgatgatttgtaaactaaggaccattgaaatataggttgaaatgaacagatttactttatacagtaacatgtttaatttttatatttgcattattaatttgtattcaagatattaagtattatcatactaagtatgcagcatttgaagtatttccacttctttacactaagcattaaacttgaaacaactcatgtcttccaatttcaggtgtggacatgaattctgttattcttgtggtgctgaataccgtgagagtcaacagacctgtcaatgtgcgttttgggacgaagaaattactgaggatctaggtaatcaatctcttcaagaatcagagcaatgggcatgggaaacctttaactcgctcccaatggtctcggatgcttactccgaccaagagagatctcagctagctttaatccagaggtttcttgctggtggtttcagtctcagcgatcatcacccttaccaatccccgcctcgatgtacagattcttacgtagatgccatgaaggatctccatcagctgccatggctggagaggttcgtgtctgtgattagcgacaactactatgaagattatattcaatgaaagtggaaaatcaccattctgataaatataaaataagatgcttagctactcccaacttagttaaatggaggtaaagagtttctcgctctattactccatttccaatcataccaagagaaaaaaaaaactgtcaaatgatgtttttttaattccttgttatgtagttttacatccattttacatgctggctggcatgatcatctctgcataaaccatgacacaagtactgtgcttgataatgataattgttctctcctggaaagtaaaaaaaagggagggttggggtggggggaggagatgggagaacattgattgtgttgtataaatttgaaaaaaaagaaagaaacaaaatgaaatccctctctctattgataaatcttacgtattatgtaatgtgtatctaacccattttgttatacttaacagaatttgttgtgtcaaatgttaggtttaatggaaatagttaagtaagcattaaaaattgaagttatgacttttcatgatagcttttcaaatacgtatttgttaaatatgcgtattaggttgcaacctttcttccttctcttaagtaaggttgagtatcggtcggtttggtcagttttatactatataaaaatctagaatttggtttttggtctagattagtgcaatttgaaaactaattggccaatccataacttatcttaaaattgattgttttgaacttcggtttggttgatttaaattgctcaaactgaattttgttttctttaaaatatgattcaatttattctataagcacattatttatcattctgcaattataaccatacaaattaattgtttaaaaactaattgttttattttttttttatattaaaataataatatattattattacatattattaataattatgatacataaagcaaaaaaaaaaaaaaaaattaaaaaaatgaaaatatatgtataacgttgagtttcaatttttttggtcggtttattaccaaaaaaattgagcgttcaatggcggttttaaccgttagtggtttttttggttttctttccccgatttcggttctaacagtgttcattaggtcgttttgaacggtttttttaattttctgaatttcatgctcatccctactcttaagtttaggaaatattctaaggtaagatgagaaactagagattttaaaatcttagaagataaaaaatgccttgatgacgatgacattatttaatcttttttattaagctgttaaaaatgtaagttatgactttttatgatagcttttcaaaatatgtatctgttaaatatacgtaattgatatttaccatcaaaggttgctactagagtgtggataaactgactcgaacatctaagaatacttactgtgaactaattagggttccaagccaagataattcttcctctcttatgccatgccaaattagtagtaaaacaccaacccgaaacatattcaagtataaggcttcaagctttggagccttaactctcgtctcaaggagaccaaccaaaccagccttttgattagcaataaattgcttgaccatgttttgcttttggtggctgttgattcctcggacgttctagcagatgattttatccattgaaaagaggaggatctcctcctactgtcttctctatttcctccttctgttgtgaatctacaattatttctgtcatattctcttctgtgagagcactagaattcaaaacttgaaatgaattggatgtagatgggccaatcattggctcttttgctttaaccttccaacctttggtgacctcttggcactgttgggttttgtgccc

SEQ ID NO: 377716 - DNA, 2710 bp, Cannabis indica
gattttcaaaagttcagcataccatggcacgggcagcatatgcaaaatctgaagcaccataatggagaccatcaaaaacataagccagtgcgttaagaggttgactagcactgacaaactgtaacagttttaaacattgtcagtatgaagtcaatgcattaaacaattggacttgttaacagaaaaattacacataccaatactccagtaccaacaattgcaagtacttcagcatccttggtgaacagggtggctaatgaaccaaaagatagacccaaaattgcagatagggtaagacctgtgattaatcctacctggaagacagttaagctaaaatatgtcaaaactcaatcggtaagaacattcaaaaatctgtggaagtatttaggtacaagaaagctcgatagacaattagcacagaaaaaaaagaccttaccttcagcacatagtgagcaatttccttcacagtcttatagtcaccttttgacagataacttgcagtcaaagcctataagtaaacaacagtcataaatcaactgagctaaattatgtgagaatacgctgactctgcgcagagaaattttaacaaattaatttatagtatccctctaatgttgaccggtccagtatgagtctagttttcacccattttcaaccatgaccgcaaaacttggccaaaactaatagtccaaagcaaacgcatctttggtaggatcaaagcattataacagtaatataagtcaaagaaagagatgatacctgtgctgatgcacccagggcatcaaccagaagcgaaacagccaaccatacttgtatgcatatttgatgagcagccattgcaactgggccttgacgagcagccattgatgtgcccaaagtcatagtcgttagaacagcaagagttcttccaagaagaaaaccacctaatacaaaagaggaaaagttcaatctcataacaatcatttttattttcaaatattttttaaaaaataaaaattacaaatttaccagattttatgtatcctccaaattgtaatgatgccatctttggaggcagaagtattgctctcttatttagaaaccatagcattaagaatgtgacaacgtatctgaaagatgaaaattcaagcaagatcttatgttgagggattatcacagcaataaacagaaaacgtgcaacactattcaaagaatacatactgagacacaactgtggaaactgctgcaccagttgcacccatttggagagaatgtataagtatgggaaataaaatcacagctaatagatttccaatacctgcatacacagcaccatgtaaatttgcatgatgattgactctactttgaagaaatgcaaaagaacacaacgacaacaaatggaagacataatagtgacatatctcacttgaaaaaagttacaaaaacacttgcctaggcataaaacaggagttatccttaaacccgcggaaaactccttgaagagccaaagacactacaacagcaggggcacctaaagcccttagtgaaagaaaacgctgagcaggagcccgcatgggtgaatcctgttaacatactgatgtttagaactaagaatattcttaaattgggatttaagtgcttgaaaaaagtaaactgaaacattgctacaaggcctttaaaaagcaagcaaaattatccctaccattacaagaatggcattgcccaattaaacaaatacaagtattttacagcaacaaaaagtatacagagaacctactatactaatacatgtgcaatcatgcagagataaggaaaaccagatagttagccaatctgcccgatatactgagtgtttagggccttactgatgatattcccatgatattaagaaacaagccagctcccaaagacaaggctaaagcttcaaatgtaccaatcataacagctagcagtaaagctgtggacacagaaggcaattgttttctttctgctacttcatcaaaaggtctactaccgttactactgtcgtttagaaagtgcttctctgcacggcaatcagttcaaaatagaggaattgtcatttccgatctctgaaatctttaattcggaacaatacttttctatacaataaattacaagggcattaaattcacctgaagaagaagatttattttcatttcttgaaatatcttcagcaacaaaagaagtggcaacactgagaagaggaatattaaatagctttgaaatgtagttaaagatgttcacagaaacaccagctgaacctaactccagagagcctaacaataaacaatgcagaacataagaattagtcaatggattacctataaattcctacttgaaagtgaaagcattaagaatttgactacaaaaaattaacaacaaaaccaagatgagaaaaaccatcaaacaaaatcaatttcacaggcaatctagaggtagtgggaatcttaaacgaatcaatgactcatacctaatctaccaatgtaagcagtctccataagctgtgctaaaggatcaagtgcttgccccgcaatagcaggtatagaaagcatcaatatctcacgcttgacatccggaggaggtgatacaacgctaggaacgtctgccaattcactatcataaagagaagataaccattaagtagcaaagaaaatgtgcatataatacaaaagacttgaaaatttcatcaaaacaaaaacatgtaatgtat

SEQ ID NO: 377717 - DNA, 1935 bp, Cannabis indica
ttaatttctatggcgaatcatgctccttccattacgcaaatgtttttttcctgatgacagttatctattttgccaagctactgtataagcagctagcaacctcctcaatctgcttcgtatgtttgagactgcctcgggacagcaggtgaatgcttccaaatctaatattttcttcactcctaattctgccccccaacatcgtgacagtatttgcaacattttgggtatgatagaagcttctgaaggcagccattatctcggactgcctaacatcattgggtggaataaaaatactatacttggatttatcaagaacaaagtgattactcgtctcaacagttggcatgataagttcctctctagagccaataaggagatccttttcaaaattgtggtccaattgctccctacttatgctataagtgtcttccttattcctattggtacttgtcaagagattgagaagctcatggcccagttctggtggaaaactaatgcaagcaagggtaatggcattatctgaatgtcttgagagcgtatggcgactcataaacatctcggaggtataggatttcgatacttaaatgacttcaacctcgcaatgcttgctgaacaagggtggaggcagctttgtaatccaaactcgcttgcaagtcgtatatacaaagcaagatatttcccacattctgattttctcaatcagagcttggttccaatcctaactttgtttggcggagtatttggggtgctcaaaagttaatcaagcttggtgccaatcgaacgattaagtcgggtacaaccactaccattttgaatcattcgtggcttcctgataatgaccagtcgtatgttacaacaaacaatcctggtttgataaaccagcctatctcctctcttttctctgttgaatcggacagctgggattatgacttggtttgtgacatgttcaattctcgtgatgcaagccttatcctcggccttccattaagcacaacagatgcagatgattgttggtctttgactagtgaaaccaatggtagttttacagtaagcagtgcctataagttgctgcaacaaaataaagcaactgaccatgctgctaataacttcgggttctggaaaaacttgtggtagctgaagataccgcctaaagtgaagaacatgttgtggcgaatcttaaataactgtcttcctacttgccttaacttagttaccaagcatgtaaatgtttccattctctgtcccatgtgcctttcacaaccagaaaatacaacttatgcacttttacattgtgctcttgctgctgagtgttggaatcggcttggtattaaccgtccaactccaatagcaacttttgcctcttggttggaacatgtcttctccacaatgcctactgaagatgtgtgcaaaattataatggtatgttggtccctatgaaaatcctggaataagaaagtctgggaaaaacaaaccccgttggtgaattatggtatcggcaactacttctcttgatcactggagaaaagctcaggatatttcttccctatcatctatatttctcgataatataggtaatcaggatgagctttggacaaaacctgatttggaaaccatcaagattaatgttgacgccgccacatttgagcaagacaactcttacgggtttgggatggttgctcgtgaccatcatgcttctcccattcacattcatgatgtgtatcatggtggtcactttctagctgaaaccatcgaagcaatgggcatcaaagaagcactaagttggatcaaagaaaccaatcgaaaagatgttacgatagagtaacagcatgctcgtcgttcaagccattcattccactcagccaatgtcttatgtgtttggtttagttgttaattattgcaaacatatttttgttgggaattattttaccaggatct

SEQ ID NO: 377718 - DNA, 5741 bp, Cannabis indica
cgttaaaagtttacaattgttttcaaaatatgttttaaacaaaagttttgcccaattgctaacaaaaagtgagcctaaactttttcaaagacacaaacactccaagtctaatcgtcttgatatgtacaatcttcatctaactctagactcattctagttcagttctggctcctacctacacatacacgtaataactgtgaatcaacagactcagtaagaaaatcataaacataaacatatatctagaccgtaactaggcgcatatacacctaatcacgatcctataactaggttaggaacattctcgactaaagtatgactaccacaaatccatcctttactctatactgatatggtagcaattagttcatactttttgaaagcctattatttatctgttcatatctcaatgttactctatgtacacttcactaatatcctgaaatactaatctgatggctactgatttgcttaatatatatctgttggtatctcagtggaactttatgtacatctcactaataccctgatatgttattctgatggtaactgacatgcacgctaaacatgtatacatatatgcaactagtatactaatcttactatgattttgaatgcaagtatgttgataactctgagtggaaactgttgctcgacgatttaaggccctaagtcacaacttacgtaaaactagcaagtgacccgctaaatcactttgggggactttaaactcaaaactaaaagtttatctatcgatagatagcgtaaaaataccctaaatattaagaaaataccaaaaacaagacattggaaaaatttccccaaaaacggcataccgtatctctaaaagcgtaggccgttttttttggttacttccaggaaaaatggtagaccatttctgagaaaacaatctgccgttttctactgcatatttccccaaaatctcatttctaactcaaaaatatcccaaacttcatgccaagctctagagtacctaattaagacataaaaaacataattcaacccgtaaaaacatcatcagagtcttgaatacaaattcgctattgttgagctaagtactcattagcatttctcttattttttcggtctcttaagcaagcggataagtttggcatgttgagtgttttgtgataagaggattttcttctagtgcattttatcaagataatgaaaaattgtacaatttaatcataatattgcgtgaagatccaccgccaccacaatagttcttcagctccatttttttctttttccttttttaattttggtgcaatttcttctcttactatataaccacatacgtggccaatggtggtaataatagtgttaatcaaagatgaaaaatggtattcagattagaaattaataataattgaaaaaaaaaaattgcgtgcaaaatttgagtttattgcaccgacaaaacatgttacacatatcattcatgaaccaaaaagggagaaaaaaaaagaagaaagaaaaaagaaaacattatcctattgagagtactcgaaatatatgaataagtaaggctgtcccatatgtctccactaaaatcattcaagaacaagatacaacttcacaacagctaccttagtcattggtctttactctcacaaagaaaagcaaaaagttccaagtcattggtcgttacgatttattcaatgcattgggtttcaaacttgctaaagtggttggggatttgaagtaaacgtacaatgacttcttagaattttaagtttgtaccattacatacagtttggtttaaactttaaatctgaggtgaatcatcccatttataaaattttaactcttttagaatatttgtttgaattagtactagcaatttttgactcgataataaacctccaaaacgaaacaaaatttataggtttgaataacacccaatttttgtgttattgttgcattgatacgtttagtacgtatgataaacatgtttttattgaatattaataatatgagaaatgctaaaaggcaccattggtgctaagcacaatcttacgtgttaatatcactattagtctaattaagtatggagtcccatatagtttaatataatagtttttagggagtatcgctagccaatcgcaaagcaacacatcttaagggtgctaggcactactggtgcccaacctctaataatatgttatataagtacagataattagggccatttgtatctatttattaaacgtgctaagttatcttataaccatttgacaaaaactatacacaaaaaaagagaaaaaaaaacagccaaaaattctactaccttctttaatttggaatgtggaatggcaactagtatatctcaaaaatgagttagtgtttaaattaaccagctattgtcataaacaaaacaacaattggaccaaataaggagatcctagactatagcatttaaagaaacaaggaaaaacttgtgttgagtattgtaccaaaagtcaatccatcccttcagtgcttcctctgcaaatataccaagactatcatgttacatttcataaaaaaaatgacagataaaaaaagaaaattaggttgcacatcgacccagcagaaaccaaaagcataaaaaaaatgtacaccatcttgatgagacacaatttgccgaagcaacaatcaaccaacttcagaaatgaaaaatcaatggaacttttaccttgcgcctcttaagtcttcccattccactgctaccagtttcaaaaccttccattggaccagtttcgtcattctccatgggtaaacttttaacctcatcatagaaactgtctgtcaaaccaagcaacctgatggacacaaaattaaaaagggtaaagtataagtgaaattacagaccaataaaagataagaggaacatataaatctacaaatttcagttgtgcatacccatttcttgacttctttaagtgtttctctctcttcttttcctcctttgtaagaggtgcacgaataaagagctcttcttcacgtcgtgcacgttcctcccattttgccttgtatctgctcatttctgcactttcggttccaataacttctctaatctgtatttcaacaacaagatgtataaattttcaagccaaaactcacatccagtttcaccaataaaaattgtagtactaacctcttcaggtttaccctccaagctatccatcagctctctaacatacgtactttctctagcttgaagcagagtgtgtttctcccttctcaaggcatttcttgcttcctttgacatcttatcgtcttccatggatgtaggagcaaatttcggtggcttatatacaccatcctgtatcacaaagaaaaagtttagcaacagaaataaaataagaaacagtattataagaatccaatactccatttaattccatttcacctgagaaatttcatctgctttgccaacaagcatgtcagggtttggccgatatctcaacaaatcctctgtattctgagattgatctgcttccttttcacccaatcctacattatcagttccacctgcagcagcctttgtaagcttctggatttggtattggagctttttgtcaattggtcgaatctgttcaaaaccaacaaaatgaaaattgcctgaaaatgggaacacaaatacaatggacattgaaaaaaaaaaattacacagaaaactaacaccaaaaccttttcctaaaaataatctaatctcaacgaggcttcgaacgacaggatgtccctcgatcgagaagcctttagccttgcaaagcaagtagtatacaagtgactgacaataatttagaagcagcaaatgttttgtttcaagataacttatcccttccgttgttggaaactgatccgccctcacctaatacacgttgcatcaaatagaaataattgatcaaaacaacaatcaatcaattatcccaaagaaaataataaatatagaagataagctattagtaggacaaaaacaaaaataagcaaagaatacaaaagaataagatctttcaagatggtctacatattcttatatgatactagaccaaatttttgaagtccataatctttagattagagggtttggaaactctagcaatatgctatgtaagtcctagcaaggaatcaaatcaaacccagatatcatgttatccaacaatggagttatcctgctaaactctacaatatttaaagtacataaactctacaatatttaaaacccagacatcatctacttttttttattgaggcgtccaaaaatatacattagattgcataacctgagattcgatcccaggacacccctgctacacacgcacaccctggtgccctcaaaggccatttgagctaacctcatgtttctctacactagccaggtcatcctgctaaactctaaagtggcgtttggttgggtaatgaaatggaatggaatggaaaagaaaaattatcattctattccttcgcttggttgtatattaaagtactggaatttcattccaatagaatggcatttccaccattttggtggaatgactattctattttgaaataaaaggaaagaacattccgcatgatgagaaaaaattaacaattttatttttaatacattctaaattttatccaattcccattcccattcccattcctcccattcccattcccattcatttatcccaaccaaacgccatctaatattcggggttacaaagatttcaaatcatatgctaggggttaattaaccaaacatagacctcacggaaacaaagaaaacattcagagctaccattcatgagaaattcatatttttaacaagacatcaaagaaaccacgaaaaaaaatcgcttaattgcttattaaccatcaactaaaaccataagtaaataaaattatgattgagagataaagtgataaactaggaacaatatacacacagctcataagggtttgattcaaaattacttctttcctaccttggcaactaaatcttggactttgctccgaacagcatccaacccatttttcatttctttaagcacagaaaccagttgaggtgcttctctgtaacaaaaaataaaaataatcatacaagttacaaagctaattcaattcacctaataatttgtatagtaatacacaacttactgttggattctatcattgttacttgaatcattattctcgtccatattaagttaagaaaacttggctaattcgtcaccaacacctattgaaattcaagtattagaaccatcccattagtaattgtgaataaaagtttattatttcagaatgaagggtttgggaatgaagaaaccttcgccagagagtcttcttcgtcgtcttccggtaacgttgccgccttctgctgctgctgatgttgagtcgtttctggttgagggtgaagaaagatgtactgctgcgttgcgtaaaggttaagtgtaccgtcactgagtaaaaggacggtggagattccggcgagggagtgtggtcggggagtgagagagacgacggagagagagggtggcaggagtgagggagacggagaagtttagaaaatcgacgaaggaacaatgtaggaagggagtgagaggaagaatacgtgaaacccttgtttgaggtattgggcttttgtttgggccgcggccgaaaatatagggaaatttacactttttactaacttttccccttgtattacaaaaatactgtgccacgcccaaatttacgtttatact

SEQ ID NO: 377719 - DNA, 2000 bp, Cannabis indica
tttttttatccattcaatccattgtggttcgaaattcctgctttagaagttacggtactcgctattgcgttacttgtgctagtttattttccgagccaaatttgagcctattcatctcacttcgtgcctcttccttctgcacaaagatttgtgctctttcattaaattcattaatgtttctaacaggctgaccctacagatcatcccatagttctcctcgaacagttgataggtcagctgttattctagcctgaagagctatcaactgaatgctatcatttagatttcttagtttgttgttgtagtactaaagtgactcaagcaagcttttaggtattctcccagctattgcttgatattagtcagcaaggattcctctaacctcctatacctcgtagcctgaaagtgtttcttgaaatccttggatagttgttcccaggaggttatggaatggttggtgaatttatcgaactagctgcttgttgctcccattggagaagttggaaataaaatgcaacacaagttttttaaaacattgattgctcacattattgtgttaaaattgttcagttgtgccacaagatcagttgtcccgtcatactatgcgacatgcaggttcttgaatccctggggaaattgagaattcaatatatcaggatgaaaaggtgatgtctcttcgtctgaatcgtatcaagataatttcccatattccccgtccttgtatcacctgagcttgtcctttaattttataacccttaactgaattggatccatgggttgttgctcgaattgttgttggcgacctacattctagtttaatcgatcacaacgatcacgaacgtttcgattcaagtgttcacacaagtttggttgtctacgattcagatgctcgtgtgatgcctctcgttcctctagtcataattgcttactgaccttgttgtagaataactctcggattgataactttgagagttacttatgccctcttgatcatctcgataatatcgacgtgaaccctccccatctcgtacttacctctcatgtgcatgagttctagtcgatctactttgcccatgggtccttgatcttgacccactaggatctgtactcgaccctatttcttgaggttcttctcgtactggccttcgtctttagaccagatttaacacacgtcccctacttaaatagttgtacgcgttgtctctatcattgtggtttggcctttgcgggtgtctcggtggtcggcctgatccaggtcgattgcctacccctctcacatcgtgatgggagaatccttgaatcacaggtagtgttttcctggtatctgcattcatgcgagatgattctagattctcatgttgtacattctcacagtttgtatatctataggaagttcctggatcgttgggtcgagtttcttgatttccagtgtttcttggattttgagggatctcttcatccactaggatgtccctcgtgttcttaggttgaccctcctgagtcttcgtgggatttccaaagttattccccctaggggcatccccatgtcttcaggtcttagagcctttagatcttcctcgaggtcgtctagtagatgtgtcaggttactttggaggggcatcatctcgtgcagcccttgcggtcgctgcctcgcgctccagttatgtatttcttctatttaatttagctagtcactgtcgaagttgcctattttctagttccacgaatggagcatatcttgtgggatcgtaggcatcctcgcttcatctcactgggatttcttcccccgtttgtttaaattctcccttatatttctagaatggggagtttcagttgtatttgtcctatgagaagtcttatgctcttttccaggacgttgagttatctcttctggccaattcccctcattttaaagagtatcgtctgccatgaatggacggtttgaatttttttcaaggacggttttcttctgagtttttattacaaggctctcaatgaaa

SEQ ID NO: 377720 - DNA, 2431 bp, Cannabis indica
taatcttcaaggattttccatgcattactaatgaaaactatagtgtaggaattcatgcataaccctacaggtctatcagattttgaaactcaaaagaatacactggaaaatccagatgaagacactaatgtgaattaggtggaacaacctcacttgaacctgataggaaaaactaggaagagcaaggctagggtaatccaagaattgaagatcaagttcaggtggaacctgaacttagaagaaatgtccccactattttagaacaaatagactatcaacatggacaacttaactcagaataaaatgaaaattaataagacctaagtgactaccggctgacaagagacagaataaaaaggatccctaagcctactcaaaagttcagtttcaatgcttagaatgaagtgctagcttatgctttcctaactgcaatagaggtagcaagtatagaacctaatacctatgaagaagctatgcaaagcaagggctctagaaaatggtcaaattccatggatgaggagatgagctcattatagaagaacaagacatggaaagtggtaaagaaaccagtgggaaagaacatcatagcatgaaaatggctgtttaaacataaggagcgggtcagaccaggtgaaccaattaggttcaaagccagtcttgtggcaaaaggatttagccaaaaagagggaatagactttacaaagatattttcccttgtagtgaagtataagactatcaaaattatgctagcaattgcaacacaatttgacttagaagtgcaacaaatggatgttacaataacctttcttaatggagaattgaaagaagagatttatatagagcaacccaaaggttacataaagaagggacaagaaggaatggtatgtaagatagaaagatcagtgtatggacttaagcagtcaccaagactgtggaataaaaggtttgactctttcatgactaagcaaggattttctagaagtgtttatgacacttatctatactacaaaggcacacagtttgatacagcaacatacttgctattgtatgtgaatgatatgctgattataagcaaggaaaaggctaagatagaatatctaacggatttgttgaaagcagagtttgaaatgaaaagacttaggtgaggccaccaagattcttagaatgtacacaaagagagacagacagagggaaactagtgctaagtcaagaagactacatcaacaaattacttaaaaagttctcaatgaaagatgcaaaagtgaccaaacaaccaattacctatcagcatcagctatcaaaggctcaatgccctaatactcctaaagagattgatcaaatgaaaaaggtaccctactctaacgcagtaggtgttgtcatgtacctaatggtctgcacaaggccagacctggcatatgtcatgagcatcctaagtaaatacatgattaatcctagaaaagaacactggcaggcaatgaaatggacattcagatatctccttgggatagttggattggtatttagaagataaatgcaaaactcctagttgaaggctatagtgatgcaaattttccaggagatatagacaatagaaaatccactactgcatactactttactagtggaggaagttgaattagctagaaagtacaactccaactagtggttgctttgtcaaccattgaatttgagtatattgctgtcacagaagcaattaaagaagtcatttggcttcatggtctctaaaaggaagttaccaagaaaaaccgaatcccaacagtgtattaagatagtcaaagttgtatacacctttgcaagaacccaatttttcacgacaaaactaaacatatagaagttaaatatcacttcataagggataaggtaactaaagaagaagtcaatatccaaaaaataccaacacagaaaaacctagctgacatgggtactaagattgtcaccctaagcaaatttaggctttgcatgagtttgctaagggtagacacaagaggatgaacctaagaagactaagagctagcaccctcagaagaagctaatctactaccatttgctataatagatcaacttttatggagatttcggtggaaatgttgaattaaattcccataaaagttgacctgtcataccagggcacatcatttcagttaacaaagagctaatacaaatcaactaacctaacaaccttaactgcctacaatgactataacaaaatcagagtaacaactcatggagtaaggggacttaccagatcatctatataaagtgctctctttatcctttacaagacacgcggaagagaatcctagagggagaaaactctcagaaaaagagaagaaggatatgagtgagtagagacatagagagagagagagagagagagagagagagagagagaggaggagagagagagaga

SEQ ID NO: 377721 - DNA, 1913 bp, Cannabis indica
tataatcgtcgtcgtcgtcttcttcttcttcttcgtttcttctttactctccaattccattaaagcacactgatttctccggcgaacctgttcatcctttctttctttctcaaattcaagcaaaaccctaaattctctctctctctctctctctctctcccgtccagttaggtttgtagtctctcaacttcattgctgtaaggtatcttaattttcatttctgcattacaaaattagtactgagctcagattctaagcgaaaacgaaatcctggttagcattctctgttcgaacaatgaactgaatcattatgtatctatttcttctcaaatttgatcttcggttgaaattgaaaggtttatgtttgcttctaagattatgagttcttttgcttttctggttttaggaatatatatgattctaaatacccatcctcacatgtgtaatatacaatttagatgctccgctactgaacctttcattagctctgccactgctttctgtgttgaattgtgaattagataggtttattatgaaatttaaaaagctggtactagggtttgaatgagtaagttttgtgttctttattttcttatattcttacatttaaatatataacttcaattttcgttttgttttacactttgttctagtattctttggcaagaaaaacgggctttcttatgccttgaattcttgtttaggttgtctcagtaagcgtgtcttcacaacatgggttatggttctgataccggttctcaagatggaagagatgaaggttagtttgctgctattcttgttttttgttttcttttttgtaaaaacttgctattggaactgcttaggcaacagaacaccagtaagattttattgtggggtttcaataatgtctatcaactctcattcattctttaaatatattattgttatttaaatgaaactcatttgttttaatatgaggaataatacaaaaaaaaaaaaagaaagatgaaaatgatcttatgttgcctatgcacaactacacaataaaatattatatgacataagcaaaactaaagcatttacaggaaacttccccaatctctcttgagatagaaaagacaatccctcaaagcctttagtttcatataaccgggatgtaacccagattttagccttctcccaaggtccttttacagagacctatttgtcttagaaactgttcgtctctctaaccaaaaccagaagatagccaagatggctgttgtcgacattgttgatagtctcttcccccctttcaatttgcacactaacaactggacaaatgagcaaggcgtatactgaatgttagattcactgagcatattagaccataacaactgagtaaaagctcactcaaagaataaatgaataatagatttcccatctttcttacaccaaatacaacttctcagacacaaacaatgataggcctcttcatttgcagttgaacttttaggcttatatgggtttggtctgtttataactttatttcctatgtagtatttataatataatgttcaactcaacacatgacattcctatgaatcctatctataatttttctttttctattgtaatttggcagatgacgaggatgattacgaagaggctggtggtagtaaccggcttttgggatttatgtttggcaatgttgataactctggtgacctcgatgttgattaccttgatgaggtatttttattgttacctcacctcctagtgtcgagcaattgtggcaatggacatgatatttagaactaaaaggggatgtgattttaggaggaaatgagaatggagattttgtttaaggaaaaaattccattgtagtgttgcctgatatctgtagtataggattttgtaaaacatattcttcattactgtttctttaaaaa

SEQ ID NO: 377722 - DNA, 1503 bp, Cannabis indica
gttgatgcacttaattcaacttgaagaacataagataagacttcaaagaaaaatgaagtatgatacagtatatgattacttaatatttgtagaaaaataattttgagactgagaatatgttgtttttggagagatatattttcactaatggagtttaaattctctggatatattcttaatattttttttcacaaaatagtaacaagaggtatactttgtacaaatttttttatatccatttatttatataactattacataatattgtagatatttttggaacactttattttatggccctcaaatctaagtacatcaaatcaagtttagagtatataaaaactcaatttaagtacataaataaactcacaaacaatacataatgaaatgcattttttaaaataaaaagagacaaaattttatttacttatatatagaatattttgcagtgctctttcattacaaaaaataatcttatttttagttacaaggaaatttgtaattaaaagtaaaaaagttgtaactaaacataaattatcatttttatattattaataaaaagttcgttgctaaaagtattagtcacaaaatttacaatttattatcaataaataaatttttagtcacaacactttttgtgattataattaaattagtgataatttatatttaaatactactttttaatgacaagtaattttgattgtgactaaagtattttggtagtgttacattgtttatcttaaatattttttctttttgttattcgagtttttctacaatttcttgtttaattatttttcagagagatataattacgatattttttattgtaaaaacacctcatgtttattagtagtggaatacaaacaaaacatattaattatatgtataagtaacatcattatttattatgatgagtaaccatttggtattggtactagaaagaagataggtcttccaatacaacaagaaatttccactttagcttttttccaaatctaagtcaaacaaagagtattcacatggagggtaattgtaattgcattgctttctcaaagtcacttttaaattgtttgtatttgcatcaaaaagtacattttaatataatagtgctatataggtggttttagcctttagggtaatttgctagtttacaaacaaaattaaacttattatttggtgtgaactattattttacactacaaattaatcattagctattttataaatgagtttcacatggtcttcactctattttttcctaacaaactaatatcaaagtatattgaaattaaacattccctcatcctattttcaagcaattaatcaaaaggaatcactaaggtgaagaaaaagaaaatagaatactatactaatgcagtaaaagtacttttagagaaaatctacagttaatccttttaagtaattttcagatatattttctattttgtttcgatatttaaaagtctgtctaattttttttttttttatagttatgta

SEQ ID NO: 377723 - DNA, 3177 bp, Cannabis indica
cttagtattgaagtatattttgaataagtccagaagtacttttttttatcacacattaattaaatataattagtaaaataattttttattgatgaatacccttttttatataaaaaaagtaccaaatataatctcacataacttatcaaaattagagtttctaacacacataatgaaaatataactataaaactaggtatatgaattaaagaataacacaaaaatggtaaaaattaaaattgaaaatgaaaagtgtaatttttttctatttttagtaagaagtggccaataatgatgtggactagagagaaaataaaatattatattttagaatgatttggagtgttatgacaactttagacattacttgtattggagatgctcttatagatgaccaatatagaaaaataaataaaaaattatttatttatttttttaaatataatttttagaaaaatagaaaaaaaatataaaaataaattggaggaggggatggcaatctctggtccctctagctttgtcatatgactctacttgatttaccagcaccaatataggcattaggcaatccattagagttggccttatccttctctctctatactagaatgggttttaagccacatggggtcccaccctctgtagctactctctacaagaggacccccacctcttttccttcctccatttttgttttccttttctctttttgattaatgaaattctttaaactcaattgtctgcttaattcagttacttcttcttcttctactactactatactactttttctttttcttactttctgcatgggtgctagtactactagtgctgcctatagtatgataatgataatgatgatgaggaggatcagtttatatatgtatgtattgataatattcaatcgcagccgtatatctttttcttttttgtcatcagctttttttttttttttgggggggtttcatggttctgactcaaaattcataatttcaggtccagatttacatttatctctgtcccattgtaacttttggaacatggaatgttgagtgtactaggggactcctcattcgaaaaagaagagaaatataataaagccaaggaaatggcatgcatgccaaaccaccaccatcatcaccatcacatatgtaatatatatatataataaccctaataaaactataagatgagaattaaagaagagaaaaaacacaaagtctaaatggataatgtggatgtgtgaaaaagaagggtgtagagtagtgtgtcacgggaatttggtgtgtcattaacattattaacagtaaaaaagaaaatatgaaagtggtccatgcaagtctatttaggagtgggctcgtgtagattgcacgcgtcttagagtttggcaagagagagacgaaaactacttctcttcttataatttgcttcttttattgtcctcattcattacgcctcttaaacccttaaacctactgcttctctcttctctatagagtgggctctatacacacatacacacaccctctctctctctctctatgaatatttatatacatataatatgttcagagctgatttaaaagaatcttgtttggttgggttctcacacttttctttctttttaccattatatatttggtttccaacattgagcagttgcattgtactttgcatggaacataatttgacaacatatatatcgatctctgttttcattcattttaaatcagcaatgttagaaacgtacccatttcacaaaatggtttatggcttatatataaaaggtcgaaacctatgtagtatatataaaaaaattaattgccatcgttatatacaaatcatatatgtatgtgcttacaagtgctacatgatcaccacgtggaagatatgattatatgcattgctataacaatacactataaatatatattggtattggtaatactaaccatgtaagtgttattaaacaaatacatttaggtggcgtaatgaaatggaatgtatatccctttgtttggtagaaatagttttttttatcaatttcattatatatatttatattaaatttgattttattttattcttatttctattcctacacttatttctattacaattctcattatgatattttaattaggcaccttaattttaaggctaattaggatttttgtttcctgaatttaacatgtactaaattatacctcttaaacttttaaggtcgttaaaaatatgtcctgaactattaaaattgttgaatttaaatgaaattagacaaaagtccttaaatccaacaatctcaatagttcatagagcatttttaacgacattaaaagttcaaggatcataatttgatatatgttaaagttcaaaaaataaaatttaaaaattctaattaacctaattttaaatatcaaaaccacattaaatttctattttgacttttaactattggctaaaactaaattaattggtgtaatataataaacataattaaatttaatattaaattacatcatttgaagtcaaatgaagttaggcagatataagagcactcaatttgtttttctttttttgcagacataattaagaatgaaaattaattatgagagcgcagattttgttgttatgatgatgacttttaggtgcataaatatcagtatatatcttttgtggtatatgtgattttgctaacgttaattcgttatacttgtctccaatctctcattatatagataggtagaaataaatatatagctacagtcctataaatatatatatatactgatgagactactgtactaaaatatatttttcattttaattttcttacactgacgaagctgtatgatactgctggctggctcccttgctacgtctagatcatgtagatgtcacactatcatggagcgtaggggcccaatttattgcatacctaaaaaaccccatgactcagtctataattatttatctatttctatctctatacatctattattaatttctatataaatatatgtttatatatatatactaggtgaatgtacgtgtcgagccacgtattgctagtttcatttaagattttggtctttttaagattttgaatgtattttatttttaaagattacaaattttttgtttgaaaaattaaatatttatatttgaaatattatt

SEQ ID NO: 377724 - DNA, 4350 bp, Cannabis indica
tcttttctttttctttaatttttcccatgaaataacttttgtgaagaaaaaaaagatcatatttttacaaaaaaaaaaaatttgtcataaaaactataaaataaaaattcctctaataattaacatttattttgattttaatttcttctatatgttttgatgtacagatgggatgttagtgctatgaatgggctccctgagtatattttttttgaaagaaccatgagttcattaattagaaaaattgatgggaatcaccgggggattgccctccccttgatacaaaatcgccaaatcgctagagagtctagcatttttagctacaccatcagccacaacattactactacgcttaataaaggaaaaacaacataaactaaacttcttagccaagtttaaagataagtaaaacacactagctactctccaatcaggaagagaatgtgaagacaaggcctgaactgcaacttttgaatctgaaagaacacaaacttccttccacccttcatcataagccctgttcagagcaaggattatggctgagaattcggcttccaaagcagagtctacccgaagtttctgcgcattgacaaaccagcagcctgttgacacattcacactaatagcagctacaccagcattacccttcacccatgatgcatcagtgagaacataattgcagaaaccagctgagaaattgatgttcaccgcttcacataaatctcccagaccctgcctctccacaccatctggacttccagcaatgctattagacggtgcagacattgcgagcctcagttcgtctgccttcttttcgatttttgccaaagtcatttgtacattaacagcttggcccttgatacaaaaagaatttctctgatgccaaatctcagtcatgatgcagccaaaataactaatcaattccttcctatcagcatcccccagtgtttctattaaggctttgaacatgctaatcacattatcagctgggatctcatccaacttcagagccaaacggcagccaaaccaaactgctttcgaaaaactacacttccagagtatatgacaagcattctcttcctcctcaccgcataagttacacgttttatcctgaagaaaatgcaatcgactctttgtggggattgcctcggtcaaagccctccataagaatactgaaatcctgggatgaatacccgcttcccaaatccatttccaaacttcctcctctggtgcaaatctgtccatagttgcagaaatataggcagcacgcacagagaactttcctgctgggttttgcttccaaaagacttgatccttgtgaggaaaaggaattctaggaatattaatgatacgatttcctaattcctctccaaaaaatctggaaaataacctcagaattccagtcatttcccaacgaaacatccttcagcgtttgtgttgtgtagccttttcctctcaaactatccattagagctacaaagtctgagtagtccagccaagggatccatggttggttccaaaaattaattgtagaacctgatgcagcaattgacagcgagcctttgagaataatagatctagtatccagaatgcacttccattggtaggaatcattacttttttgcttaacacaccagaaactatcattgttgcaatactttcccatcaaacaagagacccacggtttgtcctcattcgttgcaagactccaagccaattttgctaaaagcgcttggttcatatcttcgcatttcctcaaacccaaacctgtcggaactctttggttgacaaattttatcccacgctttaaaggccatgtatctgctcttgtcgacatttcccagccaccagaacttcctcatcagagagtctaaatcacgacaagtagacagtgggatttttgaagtggacatagcatagatgggcatcgctgaagtcactgactttataagagttaatcgcccagcttgagacagtagcttaaccttccatccttccaatttcttcatcagattctccttgagtcttaaataatcctcccttttccttcttttaaaaataaaagggtttcccaagtgtctttcttccccacttacttgagcaatattcaaagcttttagcaagctatcttttttactgctgcaaaggttactagagaataggacacttgattttggtttgctacaggtttggccggaccatctctcataagttgatatacaatcgattaacgttcttgcttcattgtcatttgctcgagcaaagaggatcgtgtcgtcggcaaacatgatatgtgcaactggaggggcactatgagcgatctttataccatggactgcgcctcttcttcagctcttcgaatgagtttagataaaacctcctgacacagtagaaatagaaagggggacatggggtctccttgtcgtagacctcgctgtgggattatctttttaagagggctgccattcaatagtactgaataggaaacacttgtgacgcaggacatcaagagcttcctacttctcccgtcaaaaccatttgcctcaagaactctgtcaaggaacttccattccatcttatcatacgctttatgcatatcgagttttaccgccataagccctcccttacctttcttgtgccgaatcttgtgaataatctcctgagtgagtatggatgcctctccaatccacctaccaggaataaaggcagattggaaaggggatatcagatcattcatgagtggtctcaatctattagataaaatttttgcaataaccttataggaaaaattgcacaaacttatcggtctaaattggtccatactcatagggaattccacttttggaatgagacaaatgaaggtattattgagtttaggattcatgactcccatagggaagaattcctggactgaggcgactatatttgctcccacaatatcccaatacttcctaaaaaagcaacctgaaaacccgtctggtcccggggccttgaggggatgaagattaaaaactgcttccttgatttctgtatacgaagggatcttaacaaagttatcatttgcattgttgtcaacccttttaatgaacagctcttcaaaaactccatcaatgcttggtctgcccgaagtgaaaagttccttaaaatggtgattgatgacttctgcaacatgttttctgtccttccaaactttaccacaattatccttaatcgcccaaatattatttcttcgttttcttataactgttgcagcatggaaaaaccttgtgttgcgatcacccaaagacagccaagtctccctcgacttctgtctccacatgctctcgagttttgcccaggagacagccatctttgcatgtatagctaactcttcttccttgtaaacttcaggtaactgctggttctggatccaagccaatctcctctccatctttttaatatcactctcatttgcttctctgtgattcttcttccaagcttgtagagcaactttagcattatgaacattacggagtagagaagttgtagcatcatctcccgaatacagccatgttttttcaatttcctgcttacaagagtcttcccatgaccacgcttcatagaatcgaaatggaatgtatccccttgttgcatataagtgtgaatcaaaaataataggggcgtgatctgagatagcaataggcaaatttctgacccctgctgatgcataatccaatatccaatccggggagcataaagcccgatcaagtctctctctaataagtcccccggagaacctattattttgccaagtaaatttatttcctataaactgcagatcaattcctcccgtgctatccatgaaatttctcagccatttggtgtccataggagacacttttctgccacctactttttcctcttgactaccaatacaatttaaatcacctatcaatacccaagggagttgacaagaagagaattccacctccatacttctccaaaaagtctcttttgcatttagataaggagtaccatagattgcaaacaatttccaataaatttgattttgaaaatcccacaccgtggcctcaaaaaatccctcagaataataattgaccaccaaattaatgttactattccacatcagacatgaaccaccagccaacccattagcccctacacacacaattcttgagaaccccaacttccttgacaactcttccatattattttcacttacttttgtttccatcagaaaaacacagtctaccttgtacctacttacccaagctgaaatagcttggggagtcgggtctcttgcgaggccccgacaattccacgagaggcacttcatggggcttggggggg

SEQ ID NO: 377725 - DNA, 8689 bp, Cannabis indica
aagatccttcaagaataaggacactacattagcaggaatatatccttgctgatagtacaactggctttagaaaatgagtccttagcaagataatgagctaccttattcgctgatcgctttacaaattcagcagacacgtttaataaaatagacaataaaagtttaggctcatgaattaaaataccatatggagaaatcatacggactcaactctttattgcgaagcaccacattgatacagtctgtttccacaacctcattcgaccatccatgagcttttatccaacttaaagtttctttgatgcctactgcttatgctatctcaggttgaacaagaccaactttacaagcttgaaaagcttcaatgaaattaccttcatgatctcttgtcacaaagccataaccaaacatttttcttgagagaaagttgctccatctatattgactttgatcatagataaatcgagtttagtccactactcccctttctcattgatttcattattgtgagaagaattttgagcagacttccactgattcaaagtaagggatgccaatgaaatcactttatctactgttgtctactgctttgccaaagaaactcattgcggcacttccaaatagcccaacaaagcattgaaacttcttttttgtcactttaccattcttgaagaccattatcaaacctagcatcaaaagtgccttcagtgtcacagcaagtaccaaagaattttttccaacattgatgagcgaagctacagtccactaaaagatgaagagctgattcagttgctcctgaacacattggacgggtggtgtcgacgataatatgtctattcctcagctgatttctagttggtagacagttgaagcaagtcctccacaggaagtctttcacttttgaaggcattttaaactgccaaagatctctccaaaacccagaatttgggtttcgagacttgttgcctttgagagtttgtagcaatttgtaccctgttttgatagaatacataccaattttatcatgcatccaaaaccagtgatcatgttccaaaaatggagagttgcagttgcaaaataagatttaaatctcattcattgaagatatcaacaaatcctctcaccgatcaccattaagctatcaaccatcttatttactaaggatgggtgttgagtttgtatgtagccattatcatcatcagggagccaaggatcttttaaaatactcacattgaaaccaggtccaattgcccaacgactacctacatggaaaagatcttttgattcaaggatgcttctccaaacaaagcttgggttgcttcctaactcaacagataaaaagctaccgttggggtagtatctcactttgaaaatcttacttactaggctattttgattcataattagacaccacctttatttggctagaagagcaagattaaagtttcttaagctacaaaatccaatacctccacgggtcttgtgcttgctgagatttttccagctcttccaatgtatgttgctgcgctgagaagaagaacttttccaccaaaacgactcattaatttttctattttattgcacatagttttggaaaggaagaagacattcattgcatagttgggaagagcttgcacagcagatttaatcataatttctttttcagctctagatagataccatcccaactttctatttttttttcttcattttgtcttgaagatacccaaaaatggcatttttgtttcttccgagcatacttggaaggcctagatatttcctactctcattagcttctgttatacccatatcaatacatatctaaaaacgagagtcctcatggacattagaactgtaaaaagttgaggattttgcaaagttgacttgctggcttgacgcatcttcaacttttttagtaattccactacctttgaagtctctctagtatcagctcagagatagctgtcattaacaaatagcaaatgtaaaacaataggagcccctcgagcaacccgacagccatgaatccaacctttatgctcatagttttttattaaagctgaaaggtcttcagcgcaaataagaaacaagtatggagaaagagggtcacctagtcttattcctcgagatggattgaagaactcttttcatgaaccccactgataacttgtagttgactgtggatagacactgcttaatcaaatacacaaatcgatcagcaaagcctaaacgagataacatagcacaaagattaggtcattcgacacaatcaaaagctttactgagatcaagctgtagaatcataacacctcctttgccaagttgctttcttttctagtggagaacttcgaaagaaaccatgatattgtcagtggacaaaagcgctttgattatcagagataatactgcccacgagaaatttcatacagttggccaatactttagagaaaaatttgtataaaacgttgcataaggaaattggcctcatctttgacaataattcagggtgctttttttttggaatccaaaccacatgcatgtcatttagatcggggggtagtaacccatattggaagaattgttgaacaaaaagcacgaaatcatctcctacaatgtgtcaaaatttttgataaaaagtgtggctcataccattcagacctagagatttgtctgggtgcatatggaagactgcagacttcacttcttctttaggaataggtttaagtaattcaacattttgttccacggttatacaaggctaaatacaactcactgtatcttcaaaagatgattcagtagcagtaaaaagtttcataaaatagacttgtatcaaattagtaaggcttgagttccaatctagtaactgaccttgatcattctttaggctgagaaagaaattcattcattcttctacgagtggaggcagacttgtggaagaattttgtgttttgatccccagagctgagccacaattgtttggaacgttggcgccaataaacttctctttgatgtaaaatttgaaaaagtttttgctgctcagattgatagagaagcactccctcaagatcccttctacccttcagctttttaatctcttttttacatatctgaattcgtttccgaaagtctccaataatctcagctccccattgagaaagaagatcaccactcttggaatttttgtctgaacatttgaaagagtagagtcagcccagcaatccttaattatctgcccacacataggttcaccaatccaagcattttcaaatcgaaaacgtctaacattagtggtatgagtgataaagtgaggatcgagaagaataggacagtggtccgaagatgaagtttggaattataaagtctagccaaattgaatgaattcaaccaatcttcagtgacaacaacacagttaattctgacctctatccaatttggggtgcctattcctttatcccgtgtgaattgagaaccatgaagcttcatatctgtgagtttgcagtcgaagagagctttcagaaagccttcaattaatcatgaaggataattattctcccaccatccttatctaattggttggtaacattgttaaaatctccaataaggcaccaagacaaagaattcccctaagagttctaattaattgccaagtttcctttcatgtcacccactttcttaacaactctttcagccctaaaacctgactgcatatcatatatctgaacccatatttcaagtgtgttcagagggatggtacgggggtcatctccttcctttaggcgcgctatgatgagttgtttatgaatacatgtctagggactgccctcgattaccctggcaatgtctacttcatggtagaattagaataaatatcgactcaatctcaattctttgacaatcatgcccatacctggtttccattatgaggcatcaagaaagttaaatatatgctaatcaattaaaatctagtagaaatggttacctgtttttaggttcattgggatatctttcaaggctataaatgttccaggactactttgtttctacactagaatgacagtaaggttttgtttatgtttttgaacatttaataacaattcacaattgccttagtcatctccttgcttagcaatgaaccattaatgttctacttcaaaatgcatttccactcttaatttttaccaaccctagaatcgaataatgatatcatttttgagttcttatgtgtaataggaactagatcattctatgtccttaactaaaagtttatgtgcaggcaaactttagatgaggttgagatacgagagttgctcattgatcatgttgggcatcgttgttgttggggaagtcgtccagctaggacctggaagattcaagcagtggaagattgcaatgtttatgttgggaccctagagactttcacagaggaaagggaaacaataaaagaaaccgagccttaccttggtggtaatgttgatggaaaagataagggccctgagccaggaatctgggaacttgatttaagatctcaattccctgttttatttgtacctttcatggaatctagggttacaattcctcattctgagacgatcgagaaatgttcaggtaagcttttaggaatacgcttaatggaaggaatcactgaatgagattgttattgtatagattttgttattgttaaacctggactgagtgaagattgctttttgagcaattggttattttataatggtattttaactgaaactttcaattttcagtctgttgtcattatttcccacaaagtaaagttccctttatttccgtaaaccactactcttataatcttctttcccataataaacttggacaatatttgcagattgtggtgggcgaggagatattgtgtgtagcacatgcaatgcaaatcaagaacctggattctataaggcaaaccagatgatgcaatgtccttcttgttacggaaggggtttagttgctcacagagatggatcagatacaaagtaagatgcttttaaccaattcagttcataaagttatgagtccttgctatggaatgcttattccagactatttctattaatatttagtctgaattgactcagtctttgcatacatgctgccatccaaatcccaaaacttgaggattttagtccaaaattaatcttaactatttaacaattgctacagttggtgttagaatgcgatagccagcatctctaatttaatggtaccagcagggactttgagtgtttggcttagatttctttctttgtccttgcagatgtgtgaaatgtaatgctactggaaagcttccttgtgcaacttgtggatctcgtggtcttattaaatgcgagacatgtcacggtggtggctctcttctgacacgcaatattgccattattagatggtatgtgtttgccccatcattttggagctattttcttgctagtgattttctttagcttccattgttcttcccaagacaattgctgcagtaatgttgttaacatctatcttggttctataatttactcttggtgtaacaggaagacactttcaactcgaaaagtaagcgggacaagtggagcagcatctgttccggatgatgttttccatcgagccaagggtgtccaactatgcaatactcaggcataccagtgcaccccagccttctttgcggactctttctttctcaacaaattctcttccgaagttattgcagacagagctccagtagctctcaccgccagggtcatatgtgagaggcatactatctccgtcgtgccagtaacacgagttaccatgactcaccgaaaccgatcattcagtttctacataattggttacagcagggaggtttacttgaaagactactatccctctagattttgctgggggctttgtccttgcttggaatggttgaagctttaatcaaaaaaccatttaactctacatctgttgatcataataataataatgcagagtttccttgctcagtgttcatagagattgaaaactgtcactatattgtgtaattaatttttgtctaaatgggttatagttgtcatagaaatgagaaaatgaggttgtatgtttgataagtgtgtgtatactattgggttttttatttcatggatttgaattttccttgtgttatatatatatatatataataaatatataattagtttctatagttatgtaaacctataccatttcttggaagtagctcaggctgctctgctcagctacagtcttttgatctctttcttatcaagacaagaggcggcgaagacaattaaataacactataattttcttttattttctatttttttttaaatcaatacaaccttttctcaatttcttttttctttttctgaaagcacaaccttttctcaaattgatcactgaaatttgtattgatttgtttatttttttggcaataagactctaatgctaacatttttagaggtaaaatttttttatttttattccacgtcattactcttacttttaaaaacattttaatagtataacacccttcaaaaatgttataattataatctcaacatattgttatttaatatattatttattttaattataaatattgtcataattttttattttttttaaaaaaagagatagcatcaatgtcatatagtatgatagtatcaatttatctctaatgatataacatttttgtattttgctaaataaacattccacataagcaaacatcttccaaaatttaactattggtaatgctcttaattttttttcatcaaaaaaattagttgtggactttttttctcttcttataaagaattatattagttttaaacagagttcatatacctttttgtttttcttccctctctccattcatttggattatattgtgaattaagtttaaacaacttcatttgaattatattgtgaatttagtttgctattactgttttggtttttaggttatgaattttattttatgagctagatcatgaaattttattataatgttgaatatattcaattagttggtgattgtgcaaaaccccatattttcgtggtgcagttttgatgtctatacgatgtgatgctgtttgaaaaattgctcaaactgcatgtacaatatagtttaataaattaatcaataactacatcattccttacaaataccttcaaatacatattcattaaaaacttatccatatatattcctgcacattttaaaaatttcattgttaagtgtattttattatttaacttaataggaaaatcgataccaatatatttgataaaaaaatttagcacccttaaaaaaaaaagtataaattcttaagaaactcaatgtcattgtattgtactaaagtggtattgtggttttggttgttttatgtttcttgagtttgtttcttcttcttctattaaagttcctttttgctaaacttagatagtgtgattgcttagtttacttatgacttaaaaatacttctatatttccttttctctattcccattttccacttcaaagacttggaagttggaaagttaccttaacttagacctttttttttaaagaccaagaaaacaacatagattattgaggaatcatagctacccaagtgtcaacacacacaaagacatagctcatggttctcccctaatcttgacttatttgaaagaacaaaaacaaacaaagaaaaaagacgaacaaaaaaaaaaatgaataaattcaagtagcaaccaaaagggaactacaaagatacaaagttgttaatatgaaacattttaacgtgatctccacgaggttcatatttttccaaacacaagaattgtaataaagaaatggatttagaaagagaaatgctaaagggcgccagtgatgcctagcacattcttatgtgtcaatatcgctattggttcaactaagtatcgggtcctatataatttaatataataatttttagagagtatcgctagtcaatcacaacacgatatgtcgagaaagtgctagacaccactggtgctcatttagaaaatatcatatcatttaaaggggttctaattttttttttcctatgaaattatttaaaggggttctaattaattaaacgaagaaggtgttatttattgctttcaatctaaacaaaataaatttctttgcttaaacgtgacgttttgtttggtttatagtactactattattactattagtattgatcactcaatcaatattgttttataccaaaacaaacaatacacatgaagaaaataaataaagttgaaattaaaactgccgtcttaaggccaatcacattttttttctcctttctctatactctttttcatttacttttgacaagtggttcacttttagagcatacataccatgttttgtaattaaagtgaaatttaattttgatgttttatatattaaaaaaatatatatttatatgaacaaagaatattcaatataaatgaagttagaaaaaaaaatcaatattagaaaaatggctttgtcatgcatgtttatactgccttttaattaaaccagatattagtaatatgtaatacatatttgcttagagacttagagttgtattagaattgctattatttaattaataataataaaattaaatctaatacaattcaattatattttttttttaaatat

SEQ ID NO: 377726 - DNA, 1644 bp, Cannabis indica
ctctctctctctctctttctcgatcctttatcttctttctctacaatttgtgcatcaccggagtagccactagagaagacggtggagtcacgtcggaactaaagcccaataaccatatccggctgcctctgaacctaaaagtctcaattcaaatctgacatcaaagaatatgctttttatctcggtaaaataggtgtcggatctatgaaccgatactatatgtataagtgttagtttaaaactaatacctgaagttcagtttgtagtagtgtttgatagaaaaagttgtacgggtacaacataactttctaagagttcacccatcctagtactattctcgtccaaacatgcttaactgtattgttctaatgagatttgttgcattagtactagtatgatcgcaccctatttttgttagaatgtgactaaaatataacgagttaacttaaattcttgaagtctagcacacttgaagagaaagcaacaaggtaaacatggtgtcatggctttgaaatttgatgagtaaggcatacgatcgaatcaaatggctttttttttttgtatggattctaagaaggatgggtattgacaaaagatgggtgaagttaattgtaacaatgcatgtgttctgttcgatttgagtagtaagtggggagcatgaaactaatcagcttgttccaacaagggaattcgtcaaggctatctgatatcaccatatttgttcattgttaatgttgaaggtttatctacacttcataaaaatatgaacttcgtggttggattcatgattgtcaagtagcgaggggagttccgttggtatctcacatgctctttgtcgatgaaagttgtttgtattatcatacaacaaagtaggatgtggaaaagatcttgaagttgctcagagtttttgaaaaaccctcggtcaacaagtaaattttaccgaatcaactgctttttttcagttcgaatactgatgttggagttcgacatcatatttgtggtctggtgggaattaaagaggttgaggaagggagtaaatacttggggttgcctagtttgatgagaagaaaaaaaatgcagtcttagggttcttaaaagataaaatggagaaacatattgaaagttgggatgagaaatttcttttgaaagtaggaaaagatgtaatgatccaattggctgttcaagctcatccaagttatgctatgagttttttcttattttcaaaagatatgtgtaagaaattgaaaaatatgatgtgtcaattttggtggaaaaaaaaattctaaagagaaaggcatccatgggaagagttggatgaatctatgcagacacaaatctaacggagggatgtgatttagatatgattttaatcttgctttcctaggaaagcaaggctgaaggttattgagtaatcataatggtttggttagaaagctttttaaaagcatattattatccaaggggtcttattttgatgctgagattgggagaaacccaagtcttatatggagaggtattttagaggtaagggattttttgaagttgggtgtcgctgggtgtcacgggctcaccttttcaggcaacagaacacccgtgcgacaccttgacttctctaagccaaggtcagccttccaaccatccgag

SEQ ID NO: 377727 - DNA, 5118 bp, Cannabis indica
aaaaaaaaaaaaaaagaggggagagaaatcaaattagctaagctcattacattgcttaacaaagttgaagtcaagaaacaaaatcacccatattattttataaaaatgctgattaaaatttatttctttaatatttgggcagaaaaggataatatcaaatgaactttgacaaagttggatggttataggctgaaattctaaagttgcagcctaaataggaagcaaagcttttttaagcttcactattgcaaaatttggggtaagacacaaatctggtgaaaaaaaagaaaaacagggtgactctaactacaaataatactaatactgatggcataagtcctaatacacgactttcaattcattgcttcccaatacttaatatcatcaggtatgaaacaagaacattccttacacaagttttgaagtactgtgctacactcaatgttttttaacattcaagcctgtggcggaaacacttataaaccactatgcagtgcgcatagattcttttatttttttccaagcaaactataaaaataggtattcttgatgaaattctaattagttcagaattgggtggcaataatttacattagtacttctctttttcattctcctttggttttgatggatgctacaagaatatgagaaagaaagttcactacattctattttagttatttttctggtgtttcactcagtcacaccatgcttaccacaattaattacttcaattcatgtaattgacattaaaatcctaaatcagtgtgctatggtgttagcagccaaaaaaggcatgctcctatgtctaacatgaatagagatgcagacatcatgctatgtaacataaatctaacttactagaaacaatatgtaaacaagagtacaaacatagatcatctaattatgttaaaataaggtgcgaagacttaccagacatcgtcagcatcatttactttacaaatattgtcggactttctttggcaggatttcacattttcctttttcttccagatagccatatctcccttctcatactttttctcccaacaaagagattcagcaatttcttcaatccttttttgctctgcttgagtttcctcctttgacctcttccaagttttgtagtaggtcttccagttaattggaggaccagacaagatccagtatccaccaggtctaagaactcgatcaacctccattaggtacataccacctgaaaaagatgaagaatagtgctaaacaatgaaattttatacgagtatatataggtcatgagtgcaaaaggatatggtgaattaacaaattgcaaacaatgcagaaccactgatcaccttttccttgtaattgttaatttgatcttcaatttttcaagtatttaacagcctaaatgcaagaatgaacagtggaattaaagtttagagagtaggaggagaacataatattaaatagtatagaatggaacatggggttctatctcaaaattaattgtcaattagtggagtaaccccatgttctttctaagtggttattcctcatatctattcgatgttggacactcctatacttaatgtataaatgtccaaaatctagttggtgctcttgcaatttttacgaaaacaagaaatctaactcctaggcaattcaagtgaaaatttatgtgatttcatgattaatgcgagaaatacatattacttttgtatattgatggatgttgcatttgatagactttaatgactaaattatatttcaaagaattaatcatgatagtccatggaattagttatcaaaaaaatcatgatagtcaattttttaagatgtaaaaccaacttactgttcgcagtccatggaattaggcatcgggagcactgagccatatcaaaggatcttgatgggtatggtagatggattgttccaaaaacaccaattacagcaggaacacctcgctccaaagcaaattgtacttgtgcttcatgattgtcccttggtgcaaaagacatagccaaaacattcctctttagcaagtatgcaccccaacttgcaacctacattatgttctgttttattagtccagactccagagaaccatgaactaataatgaaagaaatttctacaatggaattacagataaaagaaaatatgagatcaattcttgtaaacattcaggcctaaattaattttttatgacatatacagcttgagtatagcaaaaaagagaaccaaaatcatgagcaatctacataccccacaaccagtatccaatgctgtcctaactgatccgtctgcaatcggaataactgatgcaagttcatcaatataagcatctgcaccttgaggaaacatggttcctccacctggaaatttgaacacatctccctggtactgaacccagttttgaaccgccttttcaactgttaggcttttaaatggtacattagcatagtaaacatagtcacgacttttaggccagggaaatggagtcctatatccttcaggtgcaggaactaggcaatgcagtttttcttcttgtggaggacaatgcctttccctgtataccatattttcccttgggaatttcattgctcggtcttgttcttggcaaggcgtgtagtctttcaatttaacatcacagggcttgaagactttggttttaggtattgaaggttcaataatcccaagatccttgtgttttggttcaaagttcaaatcttcaaagactttgcagtctgtctgcttggttatctcaaatgctatgctatctccttttccaaatccactcttttgccatgctccaagaaggtaaaagaaacagcatagacccagaaccataaatatagacaatggtcctcgtctgcttcctggcggagcattcttagaacccatgatcttgtttgatagctccctcaaacctataagagaaaattaaccttaaaacaatcagccagatggttttaaatcgaatcttgattagcaagaaatcattttttattttgaaaactaaaataacatgttttttttaagaaagagaaagagtccacttgcaattcattcattatgaccaaaacaaatagttactaataatgtcctaggtaattaataaaactactgtaacataaattacagaagattttaactgaaaaaccttgcacaaagagaactaagagcacagaataataaacattaagaacgatagaagtagtcagcaaggaaatgtttattctttatttacacacagaaacccccaaactcagcttagtagacccaagttcaaaatcgagctccagctcaattcttcaatatttgaagtgcacagaactacaacacctccaacataaatacctaggaagacttaaacctcaagctttgcaaaagaaacaaaggcatgaacatttgagttaagctactctcttggcagcttgaaatgtctattcataactttcacaagtaaaataaagcaaatctagatatgaaattcatggatctcgagtgctatatcagagagatcgcagaggaccaattctaaagaaagaacagatctctcagacagtttgaactagatatgtagtagatgcagttcatctttttcagcaaaatcatactataaaaattaaagattttgttaaaaaactactgatctaatgaaaattacacacacacataacttcaaatcagctaatggaaagcccactttgttctccaagaaaaaatcacatcaacactcaagaataaacaaatcaaatcacacgttgatttttgaagttccaaaaatagtatcatttcattttcacctaaaaaggaaacaaatttaaacaaattgaacccaaagcaaaatcaagaagaatttttccatttctcaaaaattcaaacaaacaaaataccccgattccatcgtacacatccaaaaatgaagagaaacagagaacaagaacaatgcaaattacataaacaacgaaaaagagaataagatcgaaaagcaaacctggaaaagaaggaaaaaagcgatggagggagagagatctgaagaagaggtggaatccagatcggccacaccactcacagtaagtgagactgacaagagagtgaatgagagtgtgtgagtgggtgtgggtgtgggtgaagaagaaaactagagagagaaaaaggaagagagagaaagtataggcagcaatggcaatgggaatggcatacagctatatatgtttttataatgatttacatttaaaacggtaaaaaccgagtgaaaagaaaatgagagaaacccaacccaacccaacacctaattagttaataataataataatgagttgagagtggagagttgagttgggtttatgttgtgggattatccgccgacactctcatttttgctttaaatttcattttctttttaattaattaatttttttaataatcattaattaatttattattatatataatgtatcatggaaacttaatttttttttcttaaaggaatttattcattcattcaattaaaattattagaaagaaatggcaagttacttgttagtacgcgatgaatataaaggggactaactctaatttatatagcattaatattgattaacaaagcataattggctaaacaatgtgacacttaattcgttgttttacgaacaaaaactaaattagtgactccctgactttgcagcagcaaacggatcttttgcagtagcatgtccacatctcgataactttcatccacgttatagactagatgaatagcctctggataatttgtttcaactttgaagtttctcaaccaccgttgaatgccgactactaggccatctttgatcgcttcaagctccgttgctagagtagaaagagctccaaatctgaacttaggagtcacagagattgcattaccatcataatcttgtaccactattcctctagcagaacgttgttgaaccactctaacccttgcatcaacattttatcgttaaatttttttttttttttttttggtggttgttgttatgaaaatctcaacacacaagtatacgtatcgtttacaacgtgagatacatataagagtgaggtcgatcccacaaaaacgttagttaattaccaacaactaaattctcattcta

SEQ ID NO: 377728 - DNA, 2899 bp, Cannabis indica
atgtaaagacctttaaagataagcttggggccaaaggctacacacagcgagaagggatcaactatgacataaccttctctcttgtgacaatgcttaaattcactcgcattcttctttctataactacaactaatgaatataagatatgacaaatggacgtcaagacttacttttctaaattacgatcttgatgaaaccatatatatggaacaatgaagaaagatatgtgttaccatggaaagatcaaaaggtatgcaagttgcttaaatctgtttatggattaaagcaaccttttagatcaaaacaacttctcgtttatttttttgaatgtcctttctctcagcagcgtctacaaataatcaagatgtggctgaactgaaatttacaagatgtaaatcttcaagccatcttgaggtggatcgaaagatcaaagaaaagcctatttaagaagaacatattttcagctgcaattgctggtttggtgtacctgatttgggaaggtagaaatggaacatagtgaaataattcaaaggtagatccgactcttgtagagaagtaattgaagataatgattaaaactagaatatcttgtgttttgccaaaaacaacaacccaagttgacaatgattagtggtttaatcaattgtaattatttgtagctaatacaaagcaaatgatgtatagttttttttaggcctctttgaggtgcttttagattgtataaatcgatttgtggagcaatacatctttttgatccataaaaaaaaatattttattgagaatatactaaatttattattattttattattttattatttaaataatggtaatatgataaataaagaatgtaaaatttagtaaaagtcaatcaatcataataattaatgacattatagtaaataaaaacagtagtttttattatgagttaaattttacacaatgttatatattatgtcaaaattgacataaatttttgcaaacgctaattaaatttagcactttttagaacattattaaagaagtagttttttttaagaagtattgctattgggcaccagtggtgcccaacatcgtctacaggtggtgccccacgattggttagtgatatttcctaaatttttttttcttaagttatatgagaccctatacttaattacaccaataatagtacgacaacgagaaggatggtagacatcattattgccttttagcaattctctttcttaagtgtgcttaaatatagtaatacactacctttctgactttctactggagatgctcttatacactaaaattggagtttaattttatgaacatagataaaaaaaaaatatatatgttaaatttagcacaacttttagcatacatcaaatttagagtacattacacactacttagagttcaatttatgaacatggacaaaaaataacatatgttaaatttagcataatttttaatattcatttggtacgccgtgttacaccgtattgtattgtatagtattatattaaattgtataattatgtaatatttttatataaaactatatgtggtattaatttttatgggtacttaaatatataatgttttagtataaattaaagcttagcatagcattatataaaaatattatatataattcaattcaatataatacaatacaacacaaccttacaaaccagtcctaaaattagaatttgaatagaacccaaaaaatatatatatatttacgccatctttatatgcacttacattaagcattattttttaaatttcccatctataatcacggtactgtgattgtgaatgaggcaataattatataaagccgttatatgaaagaaacttcctttgttcacactacactatattatatgctttagattcgaacgttaattatcttatattatacatttatttagtagagagttgagtgagtgacaatgcattaataacttgggaattaattgaaattgatttacctggtcttattctaagttatattatatatcatgctatatgttatgataaagactaatattaatgactaactaaataataatgaataatgattcattatctatatatatatggtttttctagcttagctcaaatgatattatttagttgttggctagaaaaagggactaatgatactatgatcacttgatcgagttaaccaaaaaaaaaatacaatataatcacttggtgaaattgatatatagtattgcgttcacgtctcaaatttatccaagtgtattattatgttattatgaacataatgctcacaagacttatgaccaaaaaacaccaatagacattctctatctctagactttgtctttcatattttttctacttgtatatgatggaacctacgaccctcaccttacgtcttatttaataatgtgggccaatttattatatatataatatgacaactatatagacacaaattataattatttgtatataccactagtattgaaacagccaaaagttaatacatatgacacaaaattaaattaaccccaccagtgtgtgtcaaaaaaaaaaaaaaataaccccaccattaataatgaccaaacctttttcctttttcttaagattaaaagaagaaagaaattctttatggccatatattactcttgatattgctggcttttgcttttaatgaaacaaattaaagatgaaacagaaatcctatgattttgttataaccaaataagacccaaagaataaattcaatttatagagttctctttaattaattaagaaagtaaaaaaggccaagactttattatatacacaatttcgtaaatagaacaattatacaccagccatggatattaattgtccaatttttcttttatcaagacgcatattcaaatcaaatg

SEQ ID NO: 377729 - DNA, 7491 bp, Cannabis indica
ttttctaattaaaaaaacaaaaagctgttaaaataatggttccagaatgcaccctaaaagattctgattcccaactattatatattctttttaattatacatttacaaagtaaattccaatatgcatgcaaatacttatggtggcaatgatacaatgagcccttaaactatttggataagcttctgatgatgagcaacgtcattcagcagaatatctgaatgtcggtctaattcataggctgtctaatacataaaagtactttatatagtaccattaactatggataaagtaaacaatttcaacaaataatgagccaagatctgagcacaccttaggaatatgcttgaaagcaggttttgcaacagtggctgttaaagagagaattttgtaagaattacgcacattggaaatttttatttgagaaaggtaattaacctaatatacagtaccagatttggaatattctccaggtacatatgcgctagctgaaatggaaaacacagaagcataaacaagtcaaaactagaacaaagcataataaaaccaagtcaataattcataatggtctatgtcaaagggttgacatgaaactcacagccagtgaaaggatcgcgaaaagctggatcaggtgtaaagtccttctgtccagtattttggaggatgaattccactatttgttgccgatatgaaagtggtagattctccttcagaagccacttgtcagcagtgtcatatggattatctgaatcaaaaagtttgtataactgcttattatatcaacatatgaattcacagtttttaaccacataataaaatacaaaacatgagtaacaatgtttgtcacagaaagccttttcattatccagatattttcaatttttaagtagaaatattttagttccaacgttcataacttaaaaaatccaccgcctcaattcagtgtctatgtttgaaaacttattaaacaagaaatgtacttttgataagagaattctctacaaagaaacgcatacagaccaacattacaatagatggtgcgtatatcttcagactgttctagctcaatttcccaaaaaaaaataacgagtggatgataagaccgaatagataaagaatgttcagacttcagaaatatcagccaaccagatatttggaaaaatcaaagagcgtgatagaactacctgatcggttgtgaggcaacttacgaattggctcaccatctccaatatcaacatcaaatactgaataaaagaaggaagagtataaacagtttaaagtcttgcagaaaatggactgttttcatattttcataaacaacaaacgctaaccataatcatattcaattccatcaagtacaggacgcttcatgccatcatctggtccatcaacaacttcaccaatctatatgcacaaaatgaatttaataaatgagaaggtacgaacaagaaaatagttcagttgtggaagataaagcccctaaaaaaagtgagcttcaggttctagaagcattaaaaaaaaatacaagtaataaattagaaactctctccaattcattttagttactgacttaacacagtcaactccttaagtgtgttaagccaaaataattgttggttctagaagcattaaaaaatacaagtaacattaatttataagaaaaaaacttccaacaaagcaattattttgctcattaaaaattgctatcctcagtgatctcatcgcagattaaagtctcataaattgatgattcattcggataacacatccttgattttatgatgaaaaaggtgctgagaagacatatgtaaactaatagcatgaggaaaatgccaaacatagttactatggcaagaaagtaaattactttatcccacttcccttctcccaaattccatgcataggccacaccattgtccccttctctgacaacttttgtctggccgtcactggttcctgatacaaaataccagaacttactcagagatagaaacatggaaaaaaaataaggggttattctcaatacagggaaggaaaaagaaatttaagtgtgcatactgaaattatggactgataaagatactcttattggtaattagaactattatgaattatttgctatttgatttggcttcctactaatgcttacttgtgtagttccaaattgtattcatctccctccctccctctctcccccgcagatgagtcaaataaacaaatagctatttcgtataaactaaataaataaaccttaaaccaaaaacctttcatcaatcacacagagaagcctgggacaagtaggctcaattcactagagaattaaaacgactaatttcaaacctggaatctgtaaagcctcaagcccgggtaaatcttccagtttcaatcctccaactctctttctaaaaccaggaaaaaaaaataacaggtaaatcaggtagagcttccaaataataaaggtaagaactcacaagaaaatcatacctgagttggacctaaaaatccacagggaatggagcgcagtttatgatagtgaaagtgagcatttatttgcataaaagggcaagtaaataaagaataagcaatgaaattaatttgactaagcctattcacagaaaaataaaataactggagtttggctaggttctttcctccaaacaggagacaaagacagcttgacaattttctgaatttaggagtgcaagaaagaaaaggagatcatgcacaaacatccaagggagacagaagagacttgagaaaaacaagagtgttaaagttgcttatgagaataactgtccaacagaagagatttgaaaaaacaagtattaaagttgcttatgagaataactgtacaacaggatactgcaaacaaatggatggccgagctttcatacctgctcaatgtgtattgggcaagctgagatgaatataattcgagatccagtgggtcagcaattttgtcctggtgtattgtccaaacacgtacaactccatctgaacacgctgtcacaatatccccattttccaagaacttcgcatcccaaacacagccaggatgttctatgccctgaacacaaactccatctggtacacaccaaaaacttctagtaattatttaaacaagaataggaaactatgttctaagagccaatacattagccttagtgaactagaagaggattgatacaaaacaatgtcaattgatattgcagtcatttcatgagctaaggttatattggcaaagagagagaaaaagaatcaccacataataatccaaaaaaaaaaagttgtgtcaacatttctgatctaaacccactcagagaggtacaaaatgaagtagtgactcagaggaactctttcatctaatcaatgcttacaagtttatcatatcaacattacacttggccataaatgaatggcataataatataagaagaaggagcagaaaacatgaaagttatgttaataaaagtggaagccaaaggcaatacaataaaaagtgggcccaaaaccacaatagtgaaataggttcttatcaacagcacaacgcaaatttgagatgtacgaaattagcacatactaaccttgttttcagaatctcaacttatgttaggaaactcttagttagctggtactaaaatgtagttacagaatacaaaagaatgtcatgcataataaagtgcaggaaactcctaaaaaaaggcatacaaactcaaagcaagctcttgtttgagatgaagagcacaaacctttccatattttagcaaaacgatcttcacttccactgagtataagtccagaaacatgtgaatccacagaatagacgatagaagtatgaccaaccatctcaagtaaaacttcaccagttaaggcccataacctaatagaactgtgttggggaaaaaagattttgagtctccacagctcaagataaatttttgtacatgtataagacataacttattttattttgtttttatacaaggaaataagaacccttatcccctccacacacactcgcacatccaaccacttgagctagcctcaggtgccacagacattacaaaacttagttgtttaatgaaactacacagtaacaataataataataataataataatatattttgtaatcacccgaaaattcccaaactcacatagcaagcgcaaatttgaaactgcagccccaaccaaaccctactatatttggatattaaaaaactataacattcgctacatgcccaagagggactgaacttcaaatcatgagggagcaaaccacatgcttaacctttgagtcacccctcatgggtacaaaaatagaagatttgagttttccaagctcgatatttataaaaagcaggcaacaaaaaatttagttgtttatagatattatggtatgcacaagccatgatttgtttcccaatagccatgagaacttatttgctatacacgttgttcactaaatttaggttatgtttggtaggaaggagggagagaaagatggatgaagaacttaagagaggatacggagtaggaatgatggagaagatatttgctctcgtttgtgttgtttagtattaagtgtgaagttggaaggaaaattaattagtaaattacaatattgtccttttgaacagaaatatttattacttaatatatagggaaaaatatagtacttaacaaattttattgtctttttctacaatcctccataattggagggattaatttttacagttgagtgagaatgtctccatcattctctccctcttgccaaacaagagagtgagagactaatctctccttccatcactatccctccacccctctctatttactcatctttccctcctaccaaacatagtgtttcacgaatcatgatctaacttctaaattcaaccatgctcgttcctcttataaaccaagtggcatatgacatatgggcatgtttgcatataatatatatacacacggactagtagatacacttcacaacatgggagaccactagtagatacaattcacaacaatgtccttaatgcaatgtacatcgcaaagacaaattaagaagataaaaaaaagcaagcgaacacacaaaggtctcacccatcatgtgatgcagaaagaatccctaaatcagacatcactgctaagcctcgaacagtatctgcaaaatcctcaccatgtcagttttcttgtagataaattgtacactttaagaaagtcagccaagttacaaatactcaagacatgatatgaacagatcaagaaatcctttaaactgagaatgccaaaaacacttatcagacaaaactaatggaactgtagtatcttctagatttcacaatttcatccagcttaacacaacagatttaaaatatctttttctgcaaatgcagactagtagagtgaagtgaacaaatctctaccactcctatttccattatcatccaatattctaatctaaatcttatcttgctttatttgttaccttataagtgattatcagagtttgagaactgcaaaaacataaaaatcagcactacacggaagtatgtccccttcatcaaccttaagccacaaagaaaaagataaatgacacaacattaacgtttatcaaacattagatcatccattcgtgcaagagccttatagaacacattgttatctgaagcaaaataagattttattccccagaaaatgttaatcaataatgatcaaagcctactggattcgtcaaagtgaagatggaaactgaagtgagattaagtggtgaaagcaattgtttcggtaatttggatcaacagtaaaagtgtcttatttttggttacttttatgggaaaatgccaaattttagcttctctttggcatctgtgctaataatttcaagggattctcatttcttctattattctcggtataaaaatactgtctccaattatacgtgtacattaactttggttcctcatttcctttgttctctatttttgaggtttacattaccctctaccttctagtaatctttctctaatcctatccattaaatttatgtttcttactgaaaggggatctgatttggactttccttgggagacatcgggaatcaccaaacttaatcaccccctaaccctcccaaaaaaaaatggtttcaccaaataaacatgtagtaaaagtttcatgtatagctgccacaaaaaaaaagagaaaaaaaaagttccatgtatagcttttataccacataacacaattctatttatatatacataaattaaaatacctgtatgccctgcaaaagtttgtgtgcatgtctttcctttccaaagttttatagttgtatcactcgaacctagattatgcaacaaaaagatagtcaacaccagttcaaaatatcgtctaacctaacacagatcaattgcttcacagaactgtcaacaagttaatttacctgtagcaagctcgcctgaaggcaactttacgattgtttgaatagcagacttgtgagcttcccatgattcaacagcttggccttttctccaccgattcaaagtgctacataaaagacaccgaaacaaaaatactgagccagattttaaaatcgggacaaagatagactcatccaataccagcttaacttaacaaaaattctaattcaaacattgggggcaaaaacatgttttttcaaagtatcatcaacaacaatgaaattcactatcaaaggtgcacagtgccaactaatgtaaacgaaaaaacaaaaagcagttaccaatcgactgaggatgatacaatgtcgccgttatccaacgcaagacccgtgacctgcaactgatggcccctgagagtgtggaccttctccccagttctcaagtcccaaactaggaccagcgtgtccatgcctccagacacaattgcaccatccgggaattcttcggcatcgggcgaaatccatgccaacggacccacgaagctcgtatggccgagaagaattttagatgccgagaatcgtctctcgtcggaggggtccaaagaccagaacctcacggttcgatcccgagacgaagtggcaatacctgcattgccgcaaacgcaaatccctcgaacctaaaaacaaattctcaccaatcaagtaagtatatacaatatatacacacaaatagaacaaaacgatttgaaaaatcgaaacaaaaatgggaaagggatccaacgtcgtcttcgtggccgcgaagttcacagcgcaatttgtattcgttgaaatcgatatccatagatgttgagagggagggtgttcgatggcgccaattggtagaatggaaagagtgaagagtacaaagagtcgagttcaggccttcaacaaaaatatatagctttgttaccaagttttctcgagtacaaatgataattatataagctattataacatcttagttaactttctttcaaaaaaaaaaaaaatctcttagtcaacttttatatttgaaataacatgtcgaaat

SEQ ID NO: 377730 - DNA, 5521 bp, Cannabis indica
gtattcacatatatatatattgacggaggagagaagcatataatatatataatcaaaatgaggggttcatcatcatcagatacgaagtttttacaggaactgattttgtacgcggcaagcgctgctttaagttgcttggtcttgttcgcggggctccgacaactcgaccccaaccgtgaggcggcaaagaaagctttggagcacaagaaggagattgctaaacgattgggtcgtcctcttattcagacgaattcttacgaggtaataatggggttttggttttgaacaacttctatgtcataattattatatgggtttgtgtttgtttacttctttgaagtgttattgattgttgaaattatcaaatttagtattttgtggtggttgagttaccattttgggttattttttttttcttcattatttatttatttgggagtggagtatttgaaaactgaaattggattcttggtccttatccaaacatgattctgtccaaattctaggtctttaacttaatatgttattggtacaattgaatggaacaaatctcaaaattagtgattctacttgaaaacattagacctgtagttctctagtttagttctatcaagagtaatgtaatattagtaagtagagacaaatcagtggaaaatttaactaatgcagactatggagaaaagtgattgaacattccaccgttatttcccacataatatgttttatattatgttttatatttgagcattgctattggacaccagcggtgcctaacaccatttagacttgttgccttgcgattgattagccataccctctaaatgttatcatacgaaattatataggatctaatacttaattgcaccaatagcgatattgacacgtaggaaggtgctaggcaccacagataccttttagcattcctctttatgttttggtgagaaataatgctgtctaaatttcagttatttttttattattaatttatttattggaatttgagtgtttaagaagtgtatttggattcttgcttctgttgggtttgtaattctagtttcatagctcattaaacaaaagcactatccattatttatccaaattcaacttctttgttatattattggctctatgtacttatgaacaagtccctacatcaactgtagtgactctgccttaatattagaccttttgttttctagttgactacttttctctaacttttcttctagagtaaagtattttttttttcgaaaaatagagaaatgtaatgttaatacagacaaataagtagatattttaactaatgctgttggttcatagagtttgagaaaagtgcttgaacattctaccacacttttccacataagatttttcatgtattggttggtgcagtaattggagaaagtaatgccacaaaaatttgtagttattgttatgccaaattttcagttttgtttctatcattaacaggatgttatagcctgtgatgtcattaacccggatcacattgatgtggaatttgactctattggaggtttagaatcaatcaaagaagctttgtatgaattggtgattcttccgttgcgtaggcctgatctgttttcccatggaaagcttctgggtccacagaaaggagtgttgttgtatggaccgcctggtactggaaagactatgcttgcaaaagccattgcgagggagtctggagcagtattcattaacgtgaggatatcaaatcttatgagtaaatggttcggtgatgctcaaaagcttggtgagtggtaatcatatcggcaacttaaaacaaatatatgactaacaatcactatatgaataattgttaacatcactaggtgtcattagtaccacaattaaggagtattaggtttgttagcatgatagcgctaagcggaagaaaatttacttcttttactctcttttctcatgaaattatgttttggttttgattttgattcatatgtggctttgcagttgctgctgtgtttagcttggcttataaacttcagcctgccatcatattcattgacgaagttgacagttttttgggtcagcgccgtactactgatcatgaagccttaacgaacatgaagactgagttcatggccctatgggatgggtttacaacagatcgtaagtgcttttcggctttgtcacgtattgattcattcatttattcagaaatgtgtatgtattctatgcaattgaatgttttcctttatacagtgatgatgtctttgatgtttctatgtgaaggtattttgtcaaaggtctcatctttaaatgttgcattttattccttttattgtagagaatgctcgagttatggttctcgctgcaactaatcgtccatcagaacttgatgaagcaatactccgacgtcttccccaggcttttgaaattggaatacctgatcaaagggagagagccgagatactcaaagtaattcttaagggtgagagtgttgaagacgacattgactacgactatttagccagtttgtgtgagggttacacgggatctgatcttcttgaactatgcaaaaaagctgcatatttacctattagagatctactaaatgaagagaaaaaaggaaaacgggcatctgtaagtttattagtcgttgttttgtttatctgttttgccttttttcttcatggatcaaatgcgaaacctaccgccatgtttttgcatcatattttcaggcaccaagacaactgttgcagagagatttggagacggttttcgctacatcaagaaagacaaaggctgctgcgaacgagtacaccggattgaggaacggggatactaatagtgattatccggttcaagtggcattaagcgagctttccaagctggtggtttcacatgtcttgaaccttcaacaaccagacaacacccaagacccataaaattccaagctccaaccattactacagcttctttggttgacttattttgacatttgttatggttataactgtagtagctttgattagttagccatattgtttcaaacttttaatacacctttatattatacattaatttatatatatgtattcataaggtgttgaatgtcattgtcttgtattctttgaagatttgttcaacatttcaccattttgatagttctccttctggtccccacactattgtttttcttttccaagattagtattaatggggttctgcatggattttgttagttcacatcacatggtcagcaatttgcagcaacactgcaaatcatcaatgattaataacatctaagaaatagctggcaaaggaccatttgattgaggctttcttttcttctagagaaacgttaaaggcactatttctatttaaaggtgttctttttttgaaagatatttaaaggtgttctaattcaatatagtattgctattggatccaagtggtgtctagtatcttctacatgtgacgttttatgattggttaataatatttttaaaaattatttgttcaaattatatgagattcgatatttaattatattaaattttatattagtagaaatgctaagcctaacaccatttaagagcatttataacaaagagttaaaatagatgtggagtttttaatcattaactatttttaaagatttatttatagagtgatcattaatggtattttgctatttaatcataatttgttttaataaaaaattcctatatcttaaattactattgttattatgacaaatataacactagtttataatttagaccaaatttggtataagttatacatggatatggtataaggtgtcataatactattaatactattaatgtaattaagtatcgataatttaatttaataactattataaaatatcgtttactatttgcaaagcgccaccttatagtaatgatgctaggctacactcatatcaatacattttttttaataacatcgttattaggccaagtgcaatataaatagctagattaatatttattgtagagccaaataagatcataaatacaatctgagaagagaaagaaaaaatatcccatattaataccgatgataaatttattatatatatatattatatatatatatttgtcactttcttgataagttaattttaataaaaaataatttgtaaagtttaacaggcattaaaatagagagcctccgttagagttgctcttaacttttcaatctcaataatttcattggctaacttaaaataatttcacatacaaaatcaaaagtgagcccatgtatcttagcttgcattaaacttttcttttggcactaattgtaacgttctcgttttaagcttctattggaccttaagacccacagaatgatggctcttatacaagagtacgttactatagttgtttcctagactgacgactagccctacagaccaatacgagtatttctagtgtgctttgtcctcactcgcatacttcatgggaaaacttcctaagaagtcacccatctttaaattatcccagattaagcacacttaattgtagagttcttatatgatgggctacaaaaaaaaagatgcaccttgttgttataggtagtatctgttgccctggttttctccaaatatacgtggcaatcccactatgtgacatgtcgcaaattaagctaaggactcgaagataattaaaggaaagtcattacataggcagaatcccctcaggacaacccaacagctactccgggagccatgactaggtcgggagggatccgccttgaattcgcctccgagagctagatagcgtccaactcctccgaatttaggataccgaaaatgtactatgaactagcatttaatacagcatggaggaagcgtctataaacgtatatgaaaagacgtgtcagacgcattaaacccatcgttcgacaattacgcgctaattaaagatgtaagcgacgacgtcataatgtgcaatcacatcaatcaaggatgggttaaaggttgatctcacctaaaccctacgcatcctactaggtaggggtacatgccctacttcatagatttgggaatttgtgtataactaaagtagatactcaagacaatggtgacctttcttctcttttacaattactataaataccccccaacaaaattaatgagggggattggaaaaaaaagaaaaaagaagcagaacattccctgtaagaaatacgtacagattaatatcagggactcgtggactaagactcattaatgtaccaaccacgtaaaaatatttgcatttactctccttaaaacatctttattacattaatgatttagttgccgaaaatctcgatcaatagtatcaatccatatttaaaccctttaaaactgtgtagtttcatacctacccagtcttaaaatcatcacacttgacttttctcaagagatgtgggattgcactaattacctggtatttctctttacggatcacaggactaatgactatcaccatcaccccccttacggagttcgacgtccttgtcgacc

SEQ ID NO: 377731 - DNA, 2659 bp, Cannabis indica
ttttcccaccattatggttgacatcaatataaatgacgttatctttcaacagagcacagactttggaaactgcagccgtggtttgacacatcatttgagcttgccaaagaattttgagatggctcctagagaaaaggttttgcattttcagggttctgttccttgcaaaatgcgagccaagaggggctacgctactcatccgcgaagcattgcagagagggtaagaagaacccattcttctatattttgataatgaaggatgaaagttaaatcttgaaacaatcagactcccataagatttgtgtaaaacatgtccatagattcttgaacaaacaatctagtagataaactaatgcttatgctcaaaatgttaggttggttgggaaattaaagagataataattgttgttgcattatttgttggattcattgcaaaaatattaagacagctgttaatttcagaatagaagaactcggattagtgaaagaatcagaagattgcaggatctatgcccaaatatggataaggtggctgagacattccaaacccagatgtgatcatgtattcatggtaatagctttcaatttaactgtttttttcttcttgacagcaaacaaacacagcagatatgctagagttggtggttgactacattaaagacctgcagaaagaggttaaggtacaaagaaaaatctaattcttgttcccatcaactggaatttcagccaacttttgtttcccttgtatgaaaatatattttcctttggttgcagacactttcagacacaaaggccaagtgttcatgtttaagcaaaaacaggaagtcatcaagtccttctgcatgatttgctcctgtacagagccggaacaataataaataatgaagatactattggcgcggagaaaggaattagtaagttgccagctaggtatagattgcttggggtcgctccttgtaaaaattattccatgaaaagaataggaaattcgtaaaaagaacggagagtttctttgtgttttcctggaggatttcatgatataaactattatatagctagttcggttgaactatttgttcacattgcttccccgacaattacataattctactagccaagtttttgttcttgtttataactcccaaccttagttcaaatatcagcctcgttgcgatgttcagttgtaagagaaaataaatcatgccaaagaatttactttctgtattggttacagattggtttacatgatattctattgtaaaatgataataaattttgtatgcataattagaagtatttgtaatggagaatatttcttaacctgtgaatatctccccaaaaatatcttaattatttccttaattagaaggttttctagttgaataatgggctctgattgttgattatgcctttcggctttgggttacacatttagttttattctttttcctttttttctagaggaaagatgatcctttgagaagggagaatgtctaaaaggttccagggatcatctcctatcaagattgtagcttcatctaaccccagtgcaaagtgagccagtttatgggctgtttcatttgctgtcggacatggcttactgcaaagggtaatgagacaaagctattttgatttgagttacaaaatcgtcaaacaaagtcaggttctaccagcttggtgtggattgcatcagtcagagtagcaattcgattccacttggtgcaaatggaaagagttcctggtgacaccacggaagtgccagaagaagagattttgcatccattgttgctggatcaccaatttcttcaatcgggtacctatagcagctactacatgaccgttattgttgtgcaagacaccagctagcctcacactcgagcaatgttctgagatagctgaatcaacgttgaggttaagctttcctggaggtgggcgcgtccaagaaggtgaggaaacaatgcttgtctcaacctgcccgatttgttgatgaagataagcttccttgaattcttttaggtaggacggagcagcactgtgaatatctcctgctctagttgttggacctgtgaaaaaaagtttgttcctacaatgccaaatataccaaactgtgagaactccgtacctttccatactttcttcacgcaatcacaatacagcaaggcatgggtaactgtttcttcatataaattcagtgaatggacttactagaagtccttacaaataaataaataaataaatgcttaattgttttcaactcactccctcaatgtaaaatgaatccaaagtccccgaatagtgactcgcctacttggtggaaaaatttaaaaaccaaccaaattccactcttttgaactcctcggcttctccagtctccttttttcttcataaaatgaaatctatgctcaatgttcatatttttcttcactaatgaagagttttcactgagctcttctgagttcaactgcatttctttctttctcattctttcaacggttgagctcaagaccctttgagctgtcttcatactattgttttcttaagtatattaactattttttttattattattttcgaaagaaacatcttttcctttattcattattctctttttttagcaaaacattatgtgtgttcttttttttttttttattttttttta

SEQ ID NO: 377732 - DNA, 3283 bp, Cannabis indica
aaatgcgagcatgcatatcaaactaatatgaacactaaaatttatgtcaaatagtccagggaaaccacaacaatattgtaactaagtccaagactaatgccgcatccaatagcaaaatgaaattggtgaatactcagtcccacgtttaactaaaactagaattacctttccaaaagttaaacaaaattccagaaactgcagagcatgtccaacatcttccggagacaattcaaaaccccatacagtcgttaagagagttccctgaggcagaggaacatcttcaacttcagtttgctcaagaactgcacacttcttgatttcaagtgccttagtcttgcgaactttggccttagcatctttagaagaaatcaaaactcctgcatcttgtgatatcccagtctcattcttcatgccatcctcgggtggtttgatggactggagtgaaacatcatcaagaacatcattctttttgacaagataacaatcttccttaccggttttctttttcttggatacttttcctacaactttaccatcattcatgtttccatcttcctgttttattgatgggagcgaaacttcatctgaaacccttttcttagaaagctttttttcccctgtaacacaatcatccgcagacttttttgtagaaaccttaggcttttttgggctactctgggttgaatagtccccagcaactttctcagcattacccatttcaatttcctttaaaccgtccctctttgttttcttacttttcttctcattggatatgggtgctaaattcttaggggccaagtttgcatcagcatttccatcaaaagaattttcctttccaagtttcgttggcggtacaactttagactcagactcctgccaatattcaaaagtagggtttcataagcataatttcaaggcagatacggttgcaatagactcagacaactagagcataccttgtttaaaataacagactttttaggcgaaacaacagtttttttagaactcctctcaacacccaaattatctgcacctttcattagtatcatttcagaagcagaattcaatccaattgccttggcagcatgaactaaaataccggtgggtttatgacctcgtttcttcctggaaaatagataaaattaactgcattagatttagtcaacaataaataacactacaaattagtgaaatacactagcctcgcaaaacatcgaagacttacatacaaaaactgcagttgcatatgcctctgcatttggggcatgtccagtcatccaacaaattcacttcttctgccttttctccatacctaatcaattttatttcaatacttagcattaacatttgcatcacgcatcaaatataaatccccaaacattttacaagaagaaaatttaaaaatgctcaaacgatataaataacctgttcaagagacatttgtgacaaacgttaagggtgcagatcttccctcccttcgtattcttgcacgaggccacaaaatccatggtcttttgacggcactgcataagaaaacgactcgttaagcgatgtaacaacccataacaaactattcttcatttgaaaaaaaaaaaaaaaaaacaaaaaagacaataaaataaaataaataacctggtgacaagtctttccattctcagaatcgtaaattcgggctccgacgacgcgaactccaggagatttaattcgcttgggctgttgagcattctcctcggcaacagcagcagcccgatcagtattgttggttactttggtacccttcttgtgaggagaagagagcttggttttggattcagatttggaaggaacagccatggccagtactgtaacttgttgcttcagacgaaatagaagagaataataatgaaaatctaaagctgggactcgttggttttgaagttatgattcaattcatctttcgaattgagaggcgggaatcgctgaattgattttggtgccaaaatccaaatttgggtttttcaattggagagcggcaattccaagttttgattttgatagactaatttggggctagaaatttgggtccataccacaacttcatcctatctacactttttttcctattgggttttatacaagtagcctttttccttctctctcactcaacttctttcttctttttctttttttaacacttgttaggatattttcaaaaaacaaaaaacacttgttaggattttgacacttttcttaaatgtttctctatctttaatttaatgcttcaaatttcaattgaatgatttagtaaaaaaaaaaagaaaagtttaagtgaaccaataaatacacataataaattattaaatcaatttaattattttaaattatgtggttgaaattagtaattatttgtagagaaatataataaattataaaattatctgattcatagcttatttttatagataatttaacgagtttacaaacttacgttagttggaatttttaggtaacaaatatattctttaaagaatacactttaaatctgtttttaaaattcaatctaatctgttttttaattttaaaaataaaaagtaaaactaagttacccaacactattttttatatggatggacagaaaagtgaagtatttccaattatattctttaaatatattctttggctaaaataaaaaattaaaaaaataagttgtaactgtgcaaacaacgactctttataataaagaataaataggaagctctctaaataaagaacttcttacttttttgttaaatttttttactagcattctgttattttgttattattttatataattaatttatatttaataaatttaaattataaaatattattaaaataatcaagtactaataaaatagagagtatgattggagcaagaatcaaaaaaatatttttttattaaactttttagttattttagctgaaatattattaaagatgtttattcgtattttttatttagtaaaattggtaactatattaatttatataattgactatttacattttacgactaatgaagttgtataaatccaataaaaactcactaaaagtgttactcacctatttatttattttaacaaaattggtaacattaagaagcttctttctattatatagaaagtaaaattaattgtcaaggtgttaaaaggacttaaggtgtagtgtactcagcttggttgtcagtctgtcagtgagctgttttttctagctgttcattttctgttggagttgttaatgtaactaactcttttctgttatt

SEQ ID NO: 377733 - DNA, 5450 bp, Cannabis indica
tgttgttggtgggaataaatgcatgtgaaaatttatacatttgcaattcttttacaaaaaagtttgttaagcttccggagtccccttatagatgggatcattgtagatatgcattagtagtattaggttatgatgacaataatcttgttaagtataatgttgtcaacgtcagaatgatagatgatttttcaagtatcccaccacgaaaattattccacttattaattttttcttctgagactggacaatggagtgattcaactttcaactttctagcgaaacctctaagtaaatgttatcttcgaaatactattgttggaagcaatagaacaataatatacatgccatatggtttagtgaagacggaaggcattgttgcattgaatctttactcaaagagatatcgtttgattagtttgcctcaagagttaggtcatgattggcgttgttcaaattctagagtacatgtaggagtggttcacgagaaagtgcggttggctcaatttttttggtataaaaaaaagcagtgttatgtttttaaagtatgggagcttgttgatcccgaagataataattacatggacatcgaggacatgtggagttggaatttggtgcacaaccatgacgaaatgatgataagatttggttgtatgagtttgttgcggttcaccatacttgctctccatcctgacgataaagatgtgttcttcttttctcgctccaataataatgctagagatgacgttgagatttatcaatgtcaaatacttggtcagaatcgcaatcaaattgaacttatttatcatcttcttccaaaatatcgtaatcatttacgtgttgttcctcttctgcatccatggtggccgactcgaatttgattgatgtttgatattatttgtagatattttatttgctaattttttttgtcagtttttttttacgaattttttactatgagaattaatggaatttgtttttagcatatgacaaactattcttatatattttaagctgccttaaaacaattccatcttttctattcttcaatattagtcgaagaattattcaaaccaataaagagtaacattagaaataactttaagaataagaactatatatgaacatttttactctcatggtaaagaaaaaataaatgaatgtcattttcaagtttttttgaagtctttacaatgtcattgtgtgttgactttatagtaaaaaaatacggcaaaaacaacaaaaaaaatgttgactttatagaatttttgcacaacaacaaccctcctaactcagctgtgaagatgaagttttatcgactcttcttgggtttctttgggacatatgcaaattggttcaagtccacaccaaccgttgacctttcgatacaaagaagccaaagtcaacattatgatgatgattatatgattagtgaaaatcaatgaagatcaaaaattgagttcatttgttacctattgttggtggaagaagtatttcgaatatcttttaaaggagctcgaagaccacttgcacgagagccagaagacgcgaatttaaaagaggatatgatcgaaacaaacttttccatcgatttttctgctatgtcagagtattcagctaaatgggaaatgtttgaaccaaactttccgtcgttggatgatgatgattcaatgcgcatttgcttagacttcacaatttcctgaaggaatttagacaatcagaactttcagaaaggaaaagaaaaacaatatatcgaaagttagtatagtaaagaagaaagtacatacttcttcaacactcccacttgtgtgttcctttcttttcaatagattcccactctcggtagctacattggccgccgaattgtcctctatcaaagtgttttgtttattttcttgatcattttcatgctctgacttatgcttaaaatatgaactccttacaataacttttcggttctcttttcttatctttccctcaattgcatcgggtacactcccgaactcatgttccttttgttgtgctagacaaggtttatggattgaatgtttcggtttctgcaatgaagtatgttctggacttgtttccttcaacatgtctttcatgtccttaccatgctttggagactctataagctcttgaatttcgggggcaaatccattttccacctatagagaaaacatttgttatttatcataaaaatggccgaacataaaatgcatcgggaagagaaagattgctcacatttttagagtgaattggagatggtgtctctgagcagctccgtttagaaagatcatcctcctcagaagaaacatgttcttcagaattaggagaggagttacaacttggactgggttgaataggggatgaacgcggagccttaaactttctctttgcctcgagagaagcaaagcctatgaaaagttaagaaaaaacaaagaaaagaagctcacattgccacgttatgagaaacaagtatttcaaccaaatgtacaatcaagcccttcatggcaccatctaatttgtatactctatcttcttggccaagtaaaaatcttagcccgttacaaatctgagtttaagattaataataccattcgttcggtagccactcaagccagttacattttatggacatgatgaactgtccatgataagaaagaaacatttcaatccgaaattacatacacaaacaaggtaaaaaggaatagaaggatacagaagtactgagttagaagattcttctgtacaggcaaatcgagctttttctttacatttccaagatcaacattcttgagtttgaaagttgtgttggctctagcagtctcctgttggtgaaagaaaacatgaaaatcaataagaaatagcattcaattgtagatgaacccgaaagaagaaatgtagaacaaacaatttacctgaaatggcattttggtgaatggatcaagatcaccttcagctatacctttagctatatcttgaggtagcattgtatatacatagttaagggatttcaattatttcataattattgaatagaagcagaaatttaaacatgaggaaaactatatatctgaaaaggatatggtcctaagaaatccccatcatcctcaatattctcagaaatggcacacaaatgaacgatattttcagtaattggatcgtaaacacgttgatgctgaaaagtcaatagtgctttcttgaatgattcttcgtaaagaggtggaaccgaagaaatgctgtatcttaagtgctttatcacctgaaaatggaccaatcattagctgtctaaagaacaacattctatgcctatttcgtttaaggattacaaatgacaatgtcgtgaatgatgagacttcaccttgtcgtaagttgtaaatcgtttgataagagcatgagcccttttgagtcccattcctggcaatgactgcaaatagtcacagccactcaaaatgcacatctcgagaatcatttgctttgtaaatccagcaaaactcaaatccttgttatgttgtagcttggactgctgaaactgaacagcttgcccgaatttgtccattttaaaaataatctggacaaaacaaagttcacaaagtatctgagaaatatcttgaccacatagtgcgagaaaaaaatcaggaaaaataaagttttgataactcacctttggacatccaaatggtattagatctgagtcctctgtgataacagcatcaacttgtttgctaacagccaagaaagtcatttgagcatctgcttcataaggagccacaacataacttatattctcctgctttaacaccttttacaagcaacaatgtcaaaagaaaagaaattgaaaatataataaattttcttcatcactcataatcgagttcagaagatttggtatggtactttacaggaaatggtttctgttttctcggtaaatcaattctttcttaagaaaaagtgttcttactaacctgaattaactcataggcaattgaaggtgaaatgtcaacagctttctgatagcactcataagcagcagaagaatttccatttgactcgtgctccatagcacgagcgagattttcctttctccccctgcaattttattgagttaaatcttaacttaaacaaggaccctattccatacattgagaagatacaataattttgtaagcataactacaagattagaaccgaattgtagccgaattaatgccaaagaatcaaaattactgatgattaaagagcatcatataagttggttaaatcccaattatgtacattcatcaagtagtaagaaaacaggcaaaactaaaggataaccaacatacctggctcgtttgttctcttgttcaatcttcattggaagaagacctccatcaaatacaagcataggtttgacaccataatgccttagcagattcactctatgcatgcaatagtcaatatgcctaagatattggacacaaaacaagaacatgttaagataccatagccaatctattatgtatcaacttattaaatttttcattaactatagtttgagtcaaaaccccccttcaagatggggaaaatgctccaaatttttatctccataaccaaaaacaaacaaaacccagattctaaatccattaaatgatcgacccatttactcaaaaatatctttctgaaaataaaaatttaacctttactcaaaattcccaatttaacaagagatagagagaaatactacctcgaggtgggtaagcctttgcagagatctttgctacaagacaaagctcctttatgaagccaagaatatgtatcaatagcaacacaagaaccctccagttccttgatgtgaatgggtaccattatcgatttcagtagcggtaaaagcccttgaatacccatcccatacccttggatttagagttcgctgagaaaagcaatggcttcagttcagctacaaagatggagaaagaaatggggtttgagatttcagtgagttgtgcttacttatgtagccaataacctctgctcctttggtctttgtcttccccacaacaatggcgggaatggttttgtcgttctttcccactctttttatcttttgacgttgtaatatgtttcgtttattaaatgtcgtttttctcttctaatgtcgtttttattaatgtcgtttatttaatgtcgtttttatcttctaatgtcgtttttttacaacaaacgacactgtcgtttatcacttataatgtcgttttttcttctaatgtcgtttgtatccaacgaacgatggtatcgtttctgcaacaaaaaaattcgttcattaattgtcgtttatcgcttataatgtcgttttttgcttctaatgttgttttgtctccaacaaacaacgacagcgtcgtttctacaaggaaaaaagaagggattttttctgttttaagctaaaattatttaaaataaacatttatact

SEQ ID NO: 377734 - DNA, 1844 bp, Cannabis indica
gagagagagagagtggtgagtgaggatcccggagagagaagataggcggcggtaggtggcggagggggtagggttccgttggggtagtgagaaagagagatattatgtttggtttgggtgaatcgacagagaaggagacaaaggcaacagggttttgggttttgggcctttttccatttgggctcaattctatttgggcttgggcttgtgcttgggttagaatttagggattatttcgtatgtaccaaaaaatgggcaaaaagtgtatattttcatggattttaagttttcttttttaacatttgtacggattttcagtttttctttttaaaaaaatacagaatgttgtgtttcgttgtttttactttgcagctatgaaaaaacaaggtgaaaggattgtttttttatgaaagacaaaaagtgaaaaacttttaaaatgtaaacatgtagaaagaaaaaatccaattttaagtgcatatattttccttaaatttattttggatttttgttatgagaatactaaccctatatttttattcaaataagctattgacatcctataagattgtttttattattattattattattatatttgttttcatctttcaaaggcatgtcagatgtgtaaaattgccattaattaaatcctataagtaccacaattttggcttgcttataagctatggagtcagcagttgcttgtggtactttattaatatttaactttgttaatgatggtgttttacaaaatcccagttttgccactcacaaaaaaaaaataatagtaacaaatcaattctagaatatataaatcatcattacacaaatcaaagcaaactatgatacaaaattaagaaccccaagtgatgcatttatttatgtatgactagtacttactaacatcatcaaacaacatcaaattttgttaaagaaagaaacaagtaacaaagaaagaaagataccaagattcatttaacaattacaaatgataataaagtggaatgtaaacacccaattcatgatggtaacgataggccgatgtgatgatggttcgtcgggaaagatcgaaacagaacacaacaacatctccaacggtaagcctacgacgaaatacaaactccaaccaatgattagatgcaatcaaaacttccattgcatcacctctcaaacccaaacttgtatgtaataccaaatatcgaacgtgttggtctctcaaaacaaccaaaaaattaccataatacaaattaggaatatccattccttctcctgatgccataatcacttgaaatatctctttaggcataataatttgatgaccaacaacattagacacatcttcaagactcaatcttttcacacacaaaattggttgtggcccttgttgtcgttgtggttgttgattacgctcttgttgtgcttcttcttggggtaacaaaggaatgaaagtctctttattttgggggtttaatcggattaagttggcattgaatatgatgtttggagaagtaacttgatgaacaaatgtcaagagaagaacgtctccaactctgatcccgcgatctcttacgaaggagtcccattcgggtcctgcaatgtggacaatgccgttgccaaagaacacaggcctcaccattcgggtgatgtttccaaactctgtgtcgttgatgtaaagattactactttggagaattgggagtgcttcaatggtggttgatagtggatttgggattaccaatctggtgatgtctttgacaagagttccaaacagtgaattttcttgatccattcttcaaaatgagatgaaaacagaacaagaaaaacagagagaacagagagagaaa

SEQ ID NO: 377735 - DNA, 4422 bp, Cannabis indica
catagtttaactaaatttgctgtggatgaagatgatccgttgttataatggattctattcattaataataacatttgttctaaaaaaaataataaataaataaataaaagagccaaacaatggttcttattttcccaacccaaggaacttaccttgttctgtctctctgagaatcacaatgatggggaaagtcacaattgcagggattcgttctaacctgaaaagtacatgaatttaactacctttaatacaacacaatcatgaatcaatgtaggaaccattctatttttagactgcaaaattaaattaataaattttactcctccacttacagaatacaacaagattatcaaagtctcaaacagccatcaccatgaagaataataaaaagactttaaatttctgtcttcatattaatatctcaggagtatgagttttgttgaccacagatttggccaaagacgaataaacgacagtaataagtaagaattgaactgaaaaggtaaagcatgcaagagtttatagtggttctaccgtcaacattgtaaaataaaaatttagatattaaaggccaagatatcaaagtcctggaaaattgaacttcgaagaataagatgaaaggtggggagaataaactcagtatttccctcagatgattaaggctacaagaatctctcctaaggccaaggggctatactacctagaggggattgaccctaagaaatacaacaattctctttctcctgaacattttttcgagttttcatattttcatatccattctaagttttgtgtttgagctttaatttttcagccgtaatttggttgacgagattctacagtcattgtaaataaaaattatgatgcaaacacagtgcacatgatctcacaaaatacgcaccttacgaaacgtgaaagacactctccttgccccccttcttatcacttcatcattcaccatgtcaatctgtcaaacaaaacttttgatgtttattgattataataaaataatgactaatattagttgtgcaaacatatatgacgtagaaccatgcaataacaaacaattaaactagatttatgatactccaacaaaattaacaatttcattttatattttataataaatttattttaaagacaaagcgccatgtttagagtactattgtgttgtacatgaacttgagcataaatcaagtgtgtcagaagagtatgttcacactgataggcctccaatcacttttgtatacgctaggaagggtaggcaacacaagggtgaggtagttagtgcagcagggaattgtaactagtaaaagttggttagtggggttggtatctagagtggctgtggtacacagtacaccttaatatgcaataaaagtaatgttgtgaatcagtagagggggtggagaaattggtagggttgtaaccccttttatgggagagaactaggctttggaattcctagctatcgatacaatttagatcctgtaatttgaagctaaacgccatcatgaaatatttagcttcaatttctctactctccaacaatgtacaagactggcaaagcaaatacaacatacatattcaagtattttgataaattttcagactaataaacacaaattaggaaatttcatggtaaacatcaagaaattggttagcgtctttcaatgttttcttcaaatatgtcagtgacaagattactgctatcattgacatcatacaaaaactgcatcaatatctcatcaaaacaatgtatgtgaatagttttacatgttttggttattgacagcaatgaaggcttatatagttatacacaattagaggaaaatgagatggttagatgatacaaatcagcagagtacaataaacccattttacattttggaaagacaggacgactactattcaattgcacgttggtaaagtgtgagttgacgatcactgatcaataaacataccttatggtgtggtatgtagtgatgccacgcatagcgtgcctcaccaaataacattagcatagaccgaggaggaagatggatagctctccttacaaaatttgaatcggttttgctattttccatatcaaagccaagtgaagctttagaattccaatcaccatcttcatatcttctgaactccataatgcaaggccctgctagtgaaaggctcaaaattaatccttcaaaagcagaatgggtgtcaatatgtggggacaaacccaccccaggcggatactcattcacctgtgatatatagcaaagtttctttagagcttatacacatattatgaattcagtcctcagttgtaacaaaatacagcatataaataatatgcatgtgtcaactttacattttaagacagcaaaatatacaaacataatgtgcaaaaatcactaaattcataccgtcagttgatccaaaactacatctgcaggaataccatactttgcaaacatcgactgtttctttagcacaggaaaaacaaatgatgggagttcaccgagcttcttttttgcattaatattccttgtctgtatggacaaataaaaaatggaagagaacattaaccctacaaagaagtctgaaaaaatgatacataaatttgaatatctcatatgactgaaagagactagcacaaggaacaaaacaataaattatgcacaaataaaataaaaaatacataacagataacttggaacattaactgtgtttctttttccttcaattttaatggagatatctcaagaatattttaggttgaaaaacatatcaataacttcatatatttaatgaacataatttaagttcaaaactcattatcacctaaatgaaacatcattaaatttaccaagctttcaacaataagatccagacataaagtgggaaaaacaagaattgtctaaacatgatgatgacaaatgactgacacaaaaatggtatttcataaacattacaaattagttctacttgaattcacaaattcagatagcttaaataggtaaatatataaatgtaaaagagtccagcaaaagtactgctaaacttacttcatagcaaaattcatatccataatgttgaacccttcttttggaaagattattccagggcatttcatcaactgctgcaatcaactcctaagaaaccaaaagtaagaacacatcacaaggaatgatagccataacaatgagagtgaacaaagcatgagtcagcatcgacaccctctcttcttcaaggctgacaaagtcatgcaacaagtgaagacccggaatgttcaactctgaagccatcaaagctactgggagaggatcattgacctgtacatggaaggaaccaagaaaagaaaaacaaattaaataagctttctaacgtgagaacaagtgtaatgtatattcagaatcagcattcatatctgggcactagtttcacaccaatgaaagggtttgaagaaaggaatattgaatatgcaaaaaacggcctccaagttgaagacaaggacgagcatggagtgattccaaagcgtttcgggcagaaccctcttcagcatacgacacaataactcgaacaccactgccatcagctggattcactgctttcacctcaccaaatgttccgaatacagaagcaatagtgtcgtacgagagccccacagcaggaccacagttggccacgtaaagattaggactcgactgcgactcccctacctttggacgagtgaatctcgatggtttggggggtgacggacccatccccttcaccttcaaaatgagctatggtggaaaggtttttgcagaggaaattttaggaacaattgagaaaatgcttattttattcttattattgtaatgtccctccaaatgcttcttctgcaagggaaaaaaaccacaattacaaacagaggcactgaaggtttatcataaaacattcagaaacaagcttgggaaaggcaataacactgaaatggaagataactcagaactcctacatattgcccaaatattagaacactaacagtaagaacatgaatagtggatgatgattagaggctgattcttaaattaacaagcaagtctgccaacaaaataaggagagagacgtgagacatcaaggattaaaataaaataaaataaatcctaatttttatgtaaagaagtggtacctagtaaataattcctttcagaaaagaaaaattaataatggtaaatacctttctgtaaaattctatattatatcagtaaaaataagttttatgatgcacttcttttgtgtttttcacatatttttagttacgatagtaaacattgtaattattataaactaagaaacaaactgcgttttgtaagcgattatttaaatattttactcaaaatattaataaaaatacaattaaaaaacaaaaaataaaagaggctgacatag

SEQ ID NO: 377736 - DNA, 1585 bp, Cannabis indica
gtcatcttcatctctttatttattgatttttgggttatggaattcatttctctatttttatcgtaatttcaacatagttagtttgctggaacatagttagttcattaattgaaaagaaaaattaaacctgttcatttatttattttcttacagtcagttgatatcaagcctcattttgctagaaataatcttatagttttctgaagcatttcaatacagcaaacttaatgtatttgacattgaccatgatgatgctactcttatttacacttagtaccttattagacttttaaaattcatgaaattcacttactacacaaacaaataaataaatgtttttgttgttgggtctctaattaaactttcatgtattgcttttcggaggttggattactggttgggcctgggcttggggggcagggggttggagttactgggttgggcctggcttgggggcgaggggtggaaagtccaagtagtagttctgattaagaaattgtggttcaggttcagcaactccagcagtttcctcctcaactggttgaggaaaaatatcctcctgatgaggaataacagtttcctcttcttgtagtttagccgaactgtcctgatgaggaattggaattggaggttcagaagatgaagaattgccctcagcaacagatcccttggtcagtggtgggaattcgggagtgtcgtttacattaagcggagaaaactgtggttcagacggagaatttccctcagtaactccattgccttcagataaggaattgttctcagcaacagatctctcttgtggttggttgttgtgatggagatgatgatgatcatgattaggattgtgatcatgatgatgaagagaaatggtggagaaaaaactaccacttgcttgtctcgtaacagtgcttggaaaaccaggagaattgggaggagaattcgtgaaaagattgtattctttaaaatcatctccattcccctttttagtattcaagctctcatcattgtcttccatgtttcgtctgttctccgtattaagtatgttattagtttcatactaattaatgataaagtttaactaattaattattcaagatcgtttatgcatgattaaataatttcaaaaataataacaataataattttataactaaaattaacccaagacccaaatgaacaaaaatttaattaacaataacccaaattcagaactaaaataatcaagatcgacaaatcaaattattaaggcaataacagagaatcctcaatgaaaataataataaaaaaagaactcatcataatcttgaatttattatcttacaaataattagtgtcatgcaaaagaacattaattaactattgtaaacaataatttcaaaaactaatagtaataataataatagtctaaaaatttaattaacatgaacccaaattataatagccaagatcacatcattcatatatgattatctctaaaatggacattgggtcagtaaaagaaagggatattttcaaaaatatgggaaaaataaaccattttatgataaatatggcaagaaaactaaatgccacaaaatatggcatt

SEQ ID NO: 377737 - DNA, 4393 bp, Cannabis indica
attgtttaggtttctcttctatgactttcaaatctggtctggacgaaagcatggtctcttttcattttcggatcctaacaaatgtttgagatgtgtgaattgttactgttgagttacacaatcttttgctaaggcaggagagggttatgcttcaaattatgtaaaatattaataatagaagctgtgtgctgtctttgtgcttaatttacggagtagtattttagttcccattgcaatactgtacttgttattaatccttttcaatgattgataagtaaaattaaaacatgttgagcctaattggggcattctgagaattgactcggtacttctcacacccaacgctagaatcataccactagaccaaatgcccactgttgtttatcttacctctatttttgttttctttttaccttattgtgcattttccctttgtgctgtaaaacttacatataatagagtattgtctttacttgaacagaaggaaaaaaaaaatgcactctaaaaatgaatcaggtggtctcagaatttggtcgtgtgtatcatatgatggttttctcaaggatacaaagttatcaaatacttcatatttttagggtttcttgtttgactttttaaatctgatctggaagaaaactgctcatttcatcctaataaaaaattaagatatgattgaataatgttgtctttttctaaaacaggggaaggtttattcttaatgtaaaatattaaatatggaagctgctgtcagtcttcctagtaacttgatggaagtatttaagatctaaaagaatactctaataattacttgatccctttacaaggattgataatataattgtaaaaaatgttcttatgcgtgatgggggcattccgagaatcgaactcgggacctctcgcacccaaagcgagaatcataccactagaccaaatgccctctgatgtttatcttgcagctaatgtttttaatacaggattgattacttttgtttgattaattaacatccatgtttcttctctactttgttgttaatccttaatgcatattttcccttggtgttttagcactcatataatagaaggtcgttttaacttaaaaagagaagagattttgcactcttataaatgaatcagatggtctcagaattatgttgtgtatcacacttgcattttcagatatgatcatatgctggtgttatcaaggattcaatatttttagtatttttcataggttatgtttctcatgtatgacttttcaaatctaatttaattttcagattctaataaaaaaattagttgtggattaattaatgttcaacattgcaggattatgcttaaaagtgcttaaaattaaatttaaaagctgttgcagtcttattaatttagatcctaaacataatattttactagctagcagatttatatagaactgctaaaataaatgtaaaacatttttaacataatttggggcattccgagaatcgaactcgggacctctcgcacccaaagcgagaatcataccactagaccaaatgcccacaatggttatcttgcaaccaataagtttaaaacatgatcactttcttttgttttgtaatttcttctgttgctcttcttaattaaataaaattatggtatgtatttttcttttctttgtttgttttgaactcgtagtagcttttgactggtgtagtatcactcatgcattattttttttttacttgaaagaaaaagacacccttataaatgcataaagcagtcttgaaaacttgtggtgtatcatactgctaggtgatgacaatgatgttgtccaaggattcagtgttagtgatattatggaatccttcattggctagtttctcttgtttgacctttcaaatcttgtctgaaagaaagtgtgatcatttgcatcctatgtttgtccttttttctttttaatttatttatttttttgaaatttgtttttatttttgcagagtagatcgtacaatatgtaagttgaaggtttctgagaacgagctgacaggtaagttctagcattgttgcattttgttcattaaacctttattggattaaaatatgtctgcatgtatatcatgtaagatagcaggtgtgcatttgactttaaattattaaatatgtctgaaatactaaaataaaaatttatttgatatggagatttctgtcagcaattaattattgagaaaaaattgatagctttgtttaataacaaaactgaaagttgaatctgtactacttaatagcccttttaaaataacacgtgcattatgtgtaaatctgcatctgcaaaaataggggcattccgagaatcgaactcgggacctctcgcacccaaagcgagaatcataccactagaccaaatgccctatgctgatgtatgatgtatacaaatgatgtttatgcatctttgacagtcattgtgtatatttgactttgaatttgtcatcaaatgcttatgagcaatataacagtttgaatatttctgctttattaattggtttctattttaaaataataagtttgaaacattatttttaagtttgatgatttgaaacactgtttgaaagttaaaattttgtgttttcaaaatgttggttggttcattgttatttgggaaaagcaaaagttaaaacaccactttataaaatttacgagtctcacactaagcaagcttctttgatcactggctcatcaccattcaagttaaagtctattctttttgagagcatcttcattgaaatgctgctcgcatcgcctaataaagaataatcaaatgattaatagagttgtttttctaaccttagttattaatgttttgttgtgatttaatagaaaactgtgttttttttggtatattaactgatagatcagaagatacaccaagtaaaggattattagtcctcgtcgacaagtatccaaattttgatacctaatactttatagatattccaactgttcaggttcagtaatcaattttagctcggacggctttatagtatttttgaagatctataaccaatcacgctgtttagtgtgtctcacatttttattgttttttgatttgtgaagtcatttccaaatcctttaccagtcagtaattttttacatgattttatttctgcagtaccaataggtactacgatgtcatatatctctctaagtttgggtgttatttcatatttcatttagtctgtccgaaataaatgtacattgaagttaagttttagcttggccacataataatcagcatctctagctttatcttgtttgtatgcttgtcttgtctcactattcattaaagcttttttggggtaaaaatatgttaacatataataaatatataatggttgtatttatcaatgagactgaaaatggttgctttattgtggttaggtagtaactactatcttggcgtttatatattagtgttattcctatttgtcaagtgtctaaattaatagatgtacaatagtgttaattgctcaactaagtcaaagttccaacttgcttaaatatattaaataaaatgaaagatctgttttgcctcttcctaataaaatattatatagagacttgatgaagtaaattacaacagcaaaaataaataaataaaaaataactgcatatgtaaggggcattccgagaatcgaactcgggacctctcgcacccaaagcgagaatcataccactagaccaaatgcccactggtgacttttattatgtttatttggcatttgatatgcttaacataaaattggtctattttcctgttgcagtttccttatttgactggactctgttgaagagtttcttcctatttgtgctgttgaaatgttagaaagattttatcttttactggttaggtcagttctaggctaatttagtaacttcagtatctattgtttgtttatgtcttttgtttaccaatgtcttgttggaataaaatgtgtgattcaccactatataagattgtgggtggttagattagatgacaaagtacatgaaaacttaaagtatcttcattttcagatttctaataattaggttgatgtgtttataattacataagatagaaatacatcctttgcttagtcaagatcaagttacttatagtttttcaaatatgaatttggaggctgtttgtggtcttcctgtttagctcaatactgaaaactatactaattggtagattccttgcaagttggaaaaaaaagatgaaaaactgtgtttaatagggggcattccgagaattgaactcgggacctctcgcaccctaagcgagaatcataccactagaccaaatgcccgttactgtttttcataatttattttttgtactcattatttttaaagcaatttttttttttttttt

SEQ ID NO: 377738 - DNA, 3306 bp, Cannabis indica
gaagcatgcacgcctctgatgtagtggttgtacgtccagtagtggagacataattgtctcactcgaagtaccaacagacactcgataaccacatcttcacttacccgtctgacatgctaatcttcatggtacaaaataaatttatcccctatttgttgggaccacttgtattctggtgtcattagagctccctataaatacctctatctttcattgaagaagaggagggatcatttgtatgagtttagagattcaataaacaccaaatttctccatcaatgttctgagtttctcttaagcttttgatcttcacccatttatattttatattttcttttctaactaaaatataattgatgagttgttactataaaaaataatcgtaccaacataaaattatttaaaattaatacaaaattaaataaataaataaaataacaacatttaagagtgaggactttatgtatctaagaaataaaaatttgagaacaaatttactaaaaataaaatttaaggactagcttaccaaaatatataatttagggattaatttgtaaaaaataaaatttagagactaacttaccaaaacttgtatagtttaaaaagctccatacaaataaataaaaaaaaaatgtaataaaattaaaaaattaatgaacaaaatgaaaataatcattgttcaaaaaaaaaatgaaaataatcacaatccttccaccttggcgtttgcaattgcattatgggttgggtgggtgacgctcctcccgtgaggtaccacatattttggccatacactctacgatgaagacacgtgtcactttacacgtcatcatcagttatcactaaccagtaacccccagctcacatatttatatataataatatatattacatatatgctttctaaacggtaactattaaaaggagaggatgacccaccgacaattttagcagtataaattatttcgtgttacgtactctattgtcgtgacacgtgcacctcattcattgtcgttcacatctcctctaattatgttgaaactttctccttatatttcgtgttactcaactaactcctctccttagttccagcgtgaggaaagaaaaaaggaacaaactccttggaaacaattttaaattgttgttaaaaaaaaattaattgaattaaaaaaatgctcatgattattacgagatccctgattaatcaatttttgcaaataattgtacaacgagcctccaaactttatcaaatttgacaaaaagaaccttctaacgaaaatatcaaaataacaaaaattgtcaattctagtcgaccgaaaattgcatacatttttttgcaacactgaaaaagtcagctaacaaaagagccgttaactttatgcagaagcttactcactttcacaaggtaaatactaaaccgtatgcatttatatttattttggtacattcactaataaatgtattgatttccacataaaatagagatgcatttcctaaaacataaaggagtaatatagtttgataatatttatatgcatttcacaagttaaatactaaatggtatttatttatatcaattttagtatattcactaatatatcaatttatttatactaaatgtattcatttcctacaaaacataaaatagtaatatagattgattatactatgaagcaatcttaattcttccagctatctctaaatatacaaataaaaatttttattcttccgactgggagacaaaaatattagaatttagaacaataaattctatttaaaaagaaagaaaataagtgttgaatagagtaacttgtaagcagctaagatcagtaccacggaaattccgtgcaccctgtggtactctattaagaacctgataccatcatcgccaggctggcatagtaaaagggaaagcccgatgttcgaggtgcattaacggatccatccagctgttatgcattaaagctgcgcaatttagcaccatcggggcaacttgacgactttccccgaggctcagtctacagcgtacggtatttgcagaaaaacaatataaaatcatccccaagctagctgtatattatttcagaaaaataaaacaaattcaatgtacacgtgtgcgaaaagaataggaagagagtcgaggttgtgcacgtgcgaattccaacgcgtggaggcgtacgtgctaactggtcgttgggggtgggggaggaggaagaaaggggcggaacggaagactagaatagatgaaacggagagagagagaattgaacaaggtaaaaaatgcagcttaaaaatcggcgaattttcggtgggagcgagatttcggggcgagtttttgaatctcctgcaagtttctgaggcttcgaatcgccagaatatcgcccttgttaacctccgtaaattggtcgaattcctctactgagttttctgcagagtctgccgtcatgaaataaataagaaaatagattaaaaaatacgataatatacctatttaaataaaaaaaaatacaaatgtgaaaacgaatggggaaaatgggcattgttttagtacctagatgcttcgcaggccatttaaatcctttaaatggagccatatctgaaacaaaaaagacgaaaaagaaaaggtaaaaatcaacggtgtggagagtgaggataggacatgatctaacggtgaccgtggattaagaaaactcaccggattgggtgggactgtgggagcagaggtatagaactatgaagcaaaggagcgttaggagaggaatgaagtggatgaacttatgtggcttgatcggaggaggagaggacaagcggtgaggcttggtggctttgtggttgtcttcatcgtagtccacggcggaagaagaagaagaagaggatgaggcgaagagatccttgcgcttaacgtcgccgtcctccactatgagagagtcctccttcgggccgccatggctgtggagcttcgacaccggcgagcctagagattgtctttgcattgtgttgattgagagagagagagaaagagagggtggggggcagcgtgagggagtgagtgattagtgtattgagcagttatgagaggggaagatttttcttttactttccttatatattaggaaagcgtatggtagtgctactttttttattatttatttatatatgaattgtttgttaatattttattttaatcacaaaaatataaatgaaattttgtttttaaaattttatttttggaaagtaaaaatatgttttataattattttgtatttttattttaaaaataaaattaaaaagaaattattacataaaaaa

SEQ ID NO: 377739 - DNA, 5980 bp, Cannabis indica
  modified_base (5883)..(5883): a, c, t, g, unknown or other
aaataataataataataatttgatttgcataatatagaacaacccaatgcgtcaatacttgaaagagaaaaaaaaaagaatttttaggtgatttaattggttaaagaccaaaggtattgccacttttattaaagtaataaataaagcaattaatataaagttatttgtttaaagataaatagagatataataacaaacatgtaataatatttaaatcacttaaatagcaacttatacatgccttattgcataaatacataaataaggaatcgggttcttattctcggaaaagggaaagcttgagatacaaaataataatttgcactacacaacccaactaggaccaactgccacaagagcatcgcaaactggctgtcacaaaaacctaaagagcttctgtttaggactttctttgatccacaacaaaaagaatataaataacaccaactctcttctcacccaccaatccgatctatgtgaaatattctctctctctgtgaactacaatcaccgagtttcgtcctcgagagcacggaaaccacttgtcaaatcatcataaagcttttggaatttctccaccagaactgcctctccttctgccggatcctcaaacttttgagacctgtaatgttgatgaccagagcataaagatctatatcctcggtagtgaaaaacgaaaacattgtccttaaaacaattatgtcacttacactaaacggtagaagagatctcccatcctatgtttgataagggtgtaagtaatctttgtaccatccataccagctcccttttctactgcctgttcatcacacaaaacagatgaaggttagatgacaaggcaatttctcagatcatgtaagacattttcttgaagtaagaaaccaaataacggcagtagaacttgcacaaaaaccaaatagatcacacaaataatatcaaagaactaacctggttggccaaattgtagaaatgaataatgttgcgcatcatccaaacagacttgtagaatgggcaaaatttgtcatacctgtatcaacaatgtacatttagaaacattaggaatggacccaataaaaaaacagaactagaaaatatggtaaggatgactcacggggtaaatgcattctgtgcaaggtagtcttccctcagaagtttagctgtctctagggtgatcttatctccttcagctaaagcatcctttcctacaagctgcaggtaacccaaaaatccatgttatgctcaaccattggtaaatgaaaataaacaaacccaagtctgctctctaaatcaggacaatagaataacggatatttttagacttgatttttgctgaactctgtttatttattatatcagattgagatgcctgtactctgaaaggcttcataccaaattaaccttcagcaataactctttctttcaaagtaagaacttattcagactagttaacatctcaccattaagttgtagttcacttttattaagactagtcataaggattttgttatggagataaggatcagctaacttagagtcatataattttcattgttttcatagtgtaatgataatatttcctgaaaaagctttaatgaagaatccaatgtaatcaacccaggaaaacaaaatcagcatagcaataaatcttacttgaacaatttcattcaaatcatcttctctctgaagcacttctcgtgccttggtcctaatattaataaagtctggatcaaactgctcatagaaagactccaatgcctgaatgccaacacacacagagatgccaaaaaaaaacatcagtagagctcgagcaaaagatagcaaacaagaaaacagcagtgaactagtatctttatacatcaccagactgaaaagatcatgaacataccgtggagtattttgagtaggaaataagccagttcacagaagggaaatgcttcctctgtgcaagcttcttatccagaccccaaaagacctgatagaacagaaaggggcaatgaaataattccttaaaaaaaataaaaacacaaaccacctgaggtaaattaccaaatagtccaaaatatttggcaatggggtactacaaaatataaaagtagatgttgcacataaaaggctattttgctatgtagcaaaaggaaaacttactgtgatagtgctatatctttgtaagaaggaaagagatagagggcatgtatgatatatcaaaatgaacaaacctggacaatactgagggttgcagatgtgacaggatcagagaaatctcctcctgggggggaaacagcaccaacaattgtcacactaccagtacgttctggcccaccaaggcatttaactttaccagcacgttcataaaatgaggccaaacgtgcagccagataagctggataaccactatctgcaggcatttcggcctgcacaagaagtaaaataatatccgatcagaaatagaaaacaacagacattaaaagttatgccaactgaattcaaaaactagcattttcataaccaaatcatgttatacagcaaattgaaaaaacacatctatgtgcaatattggcttcgtggttaaaggttaaatcttaaaactcataaaatgtaaggaaagaatattaccaaacgtcctgaaatttcacgcaatgcctctgcccatctagacgttgaatcagccatcatactaacattgtatcccatatctctaaagtattcagcaatagtgattcctgaaaattcaaatccacacaagacagaacatcaacttctaaacaagcatgacatgatcggtcctttctaagaaacagcagaaaccttactacacaaaagcatataatataaagctaagtggtaatatgaccgtatgaatatatctaccattttgtaaaaaaaaaatggtcatcaatcatgcattcagaccaaatcttgtttttagacttaaaagtacttacaaattatgttatactagtatacttcaaccctttaatacattgcttatgctacagtaccttttagtttttcccaatatttttattttatgttttaaagcacacgcacaatgtccaaaaacagtcttatgttactaatagttttatagtgtacctttattaagaagccacaaatattatagcgtccaaaacagattagtaacacagttttttggtatacattgatttaattacaagtgctttcctataaatttcagcctattaatatttaattctaagcattttaaggttcacccggaaaaaaagaaccacttagagatgtcatctcatagaacaaaagattttcttttatcattaatcttgttaaacaacttaagtattactgaaattcacatgttcagaagtgcgtaaattgcaaacatcgtgaatggaaatacttttattcgagcataaaatatacgtacatatatctagatcacaaaatcttaagtgttgggtatacaccctgctgctatgttcttatttcttacctgtataaatagaagcctcacgagcagccacaggcatattagaagtgttggctacaagtgttgtacgcttcatgacagattcctcacgaccatcaggcaatgtcattgtcaattgtgggaaatccataaggacctaataattggttagcttgaacaactcagcaccttccacaacaaaatacaaagaaaattaaaaacacgaaagatgtgagcacgtacctctgccatttcatttcctcgctctccacaaccaacataaacaactgtatccgagttagagtactgcaacaaaaaatgattcaataaaaaccaagagtttctgaaaatacattagacatccaaatataaaaataatgttcacctttgaaagtgcttgactaatgacagtctttccacaaccaaatgccccaggaatggcacatgtcccaccaagaactgaggggaaaagtgcatcaagcacacgctgccaacaaaaatagaacaattatacaatcataattctctgagtaagaaagtcacaataatttaaaaaaaaataatacattcattacctgccctgtaagtagaggggtatcagcagcaagcttcgacgcaacaggtctcggtgtacgtacaggccaagtctgcaggataaagtgcataaacccaaagttaaaaaagaaatgttatgagttaactaggaaagaagaaaattaccaaatggaatatcatagcagcaaagttaagaaacctgaagcatggtaattttctttgtaactccttggaactccagctctaacactgtatcctgcagatatgaatgaaacagattaacacaaccaatctttattgattgctcactactttagtatatcagcagaaatgtttgttttgtttcatgcacgtgtaaaacaattcaataattttaaaaatgaaagttctattacatttattacttgatgtttgaaacaaattatcaccctgtgactaatacaataagaagaatactaaggaactaaatttaatatgatatggaattttaaaaataataagaaacaaacctgcagagaatattgacccgctggtgcaatgtaagtaatctttcccatagcatctggaggcaaagcaacacgatgctccatgagactgttctcaaatacagtctgcacaaggatatagccaaaggatttacaaacaatttaaagacaagaaaatagaagaaaccaagtcctagaataaaatattaaaacttctgtacaaagtataattccacgttagaaacttacagcatacaagtctcctccagtaagaaggtctccttcacctgaaaatataaacacataatgattacaggaaaatcaacaaaagaacgagtgcaatgtacatatcaattgattcaaaacagctatcatcaaacaaactcataaattaccaatttttttaggctgaaattcccagagtatgtctttgtcaagagctggaacagccacaccacgaggaatgtagacatcaccagatattcttgcaatagttttcaaaggtctctgtaattttaaggtgaataaaaagtacagcatgtatcagatattgctcaataattgcagctttgaattctcaaagggtgtaactctaacagaagtgtgtaattaataaaactagggcatgattaaaaacatagacaagatagctaataagatgtagataattgagattatctgcaaataattaaaaatgcagccaaacctgaattccatcgaaaatgtttccaagaattccaggtcctaactccactgataagggctgagagcaaaaagaaaaaaacgtaagttactagttatctaaccagaaacaaagaccatagaggaaaacaaaataattggaaaactcactttgtgtgtacggagaacaggatcattcaccatcaacccagctgtttcctcataaactgaaaaaaaaaaaaaaaaaaacttaattacaactccacttgcctcactaagaaactaaaacctaatcgaagaaagtttatattcttacaaaaaaaaaatgaaatacgaacagaaataattgaaacaatggacaattaaatacagaaaccaaacaaacaaaacaaagtaagaaaccttggattgtggcagaatctccttccaatcgaatgatctcaccaatcaggttgtcatgtccaacacgaacaagctcgtacatagcagccccggccatgccatcagcaacgacgaccggtcctgagacctgccaaatcacacgaatcagtccaaattcgaagttaaaaattttcaacccgctgtccgatgcagatttcacaaaagcaataaaaaccagtccaagctcatacgcagatcaccaattggatcaagaaaaaaagccaacagaattcaatccccctttactttaacactcaaatttacttgacgaaaacncaaaaaaaaactgggatcaaaatcaaagtagcgatcgttccacttctagaaaacaacaatgagtggaagtagatcacagatccaactaagcttcggt

SEQ ID NO: 377740 - DNA, 7903 bp, Cannabis indica
  modified_base (64)..(64): a, c, t, g, unknown or other
ccaaatttagatcacatatggcatgattacaaattttgcattacaataaatgtattacttttanattttactttatgttatttgaattatttatttaaattgtattgcattaattataacttttacatttgttttattgctttatataataaacaataataaaattattgatagagttattacgttttttttttaataaaagcattaaatttgtatcaagttttgcaattgtgcattggagcacaaggctaaaaattgatgcaaatatatcacaaagtcattttttgtgccaaatatatcacaattttacatctccattggagatggtcttatttgatagaatctcagttatatgaaaagtttattagtatcaaacagcactaagcacagtataatactcgcataattcgtttcagttcctactagtaatccagtcctgtgtgccaatcgggtaatcagccaattggccaatcgagcccttagtttcatcaaacgagtgagccttgtgtatgagctaaactatacaagttttttagagtgttattaacagccactgtacttcttttttgcagaacaaatgtgatcttatcaacatgagttatggagaaccttctttgctgccagactatggccgctttgttgaccttgttaatgaagtaatattttttgatacattaaattggctgagattgtcgttttatttttttccaactatttacttgaatggtttttaaatatgctattgattgcatggtggttaggtcgtaaacaagcaccgattgatatttgtgagtagtgctggtaacagtggtccagctttgagcactgttggagcacctggtggtactacttcaaccatcataggagttggggcatatgtctccccagctatggctgctggtgctcatggtgttgttgaagccccatctgaagggcttgaatatacttggtaactctttctctatattgaattctttcacaaggaaccattaaatttaaggtctacacatgccttagaatgctcatttgttgtgcaccaaactatttactatgcaggtccagccgaggaccaactgctgatggagatcttggtgtttctataagtgctcctggcggtgctgttgctcctgttcctacgtggactctccaaagtcgtatgctcatgaatggaacatcaatggcatcaccatctgcctgtgggggtgttgcgttgcttttaagtgcaatgaaggtattcattgctgggtttgtttacattgtatttctattaaacaaaaattaaaggaaacaactgttgcttgattaatgttttctcttgttatctatatactgatacccattgttttctgagcaggctgagggaattcaggtgagtccctacagtgtgaggaaagctcttgagaacacatgtgttcctgtaggcagtgtacccgaggataagttgtccactgggcatggacttatgcaagttgacaagttagttttgtaccttctctcatctgttagtcttgataacaagttgagcacggacaattcagacttgttttcaatttctttttgactgcagggcacatgaatatttacaacagtccaaggatgtaccatgcgtttggtatcaaataaaagtcactcaatctggaaaaacaagtaagattagctttttcttctttccttgtggactcttattactgttactatttggctattattgagcttgttcatgttgccaatttatatcttatattagatatgttttattattgttgtggttgatgctaccttctagagagtatgattggtattttgactggttgaaatgtctgaatttttcttgggatcttatcttggtaaaattgtgttacaaacgttttcattgtctttttaccatgattctgtatagttatgactttttttattttacttcttatgacttatatgagggccattttcactcaatctgcatgtgattttgatatgatgaattgatgtttttggtttgactgtagctcctgtatcacgaggcatctacctcagagagcctagttcttgccaacaatctagtgaggtgagatccttaaatggcctttcaggttttgaaagtgattttgtatactaacgttaaacaaatgccttcctttatgtgtttaagttatccctttaaaatatatctatatctatacatatatatatatatatatatatcaattaaaattgttgacctatattgttatctgctatagcttttgtgttctgagaattttggtacatgctcatatttgtttcatttgcttagttacttttccttgaaaagcagttgcagtcttgcagacttttctgtctgcagtttactcaagtatattcgcctccatttatgttttatctggtagctgaacttaattttaacagtggacagttcttgttgagccaaaatttcatgaagatgcaagcaatttggatgatttggttccctttgaggagtgtattgagttacattcaagtgatcaagcagttgtaaggacttcagagtatctccttcttacacataatggacggaccattaggttagtttctattcttttagcaatatgaatactttgagttatccaaaaaaataaacaatatgaatactttggtcatgaggatagaatggtacttttattaattgtccaatttctttggttttaaaatgatgtctttcttttgcaatggcggacatgaaattccagtatgctctgtgttaaacctcatattataacttaagatctgtaacttaagtgaaactataatctcaacatatcttaacattgtattataaccttatgttacgttttctggagaggcagtaccctactaagaaaaagaatgaatgagttaatgcttagttctagggtggtagggctttcatgctggtgctgacacttttatgcctatgttgagggtatgatagttatttgagatgggttaatgagatgtattttcatagttttaaattccttatatttttcttttattaatgtcctctcctcttgatgttgtaactaatgctagttataacttattcttacacctattcagtgtagtagtggatccaaccaatcttagtgaaggactgcactatcatgaaatttacggtattgattgtaaagctccctggcgtggtcctcttttcagaataccaattactattattaagcccatcgctgtattgaatcgacctccattggtcacattttctgggatgtcttttctaccaggtaaaatgatcaatttattctctctttctctgctttttctttttttattaaagccccgagtcctttaatagtagctgctcaagttcaatttacccattcagagaaaatcatttggcatcaggtgcttatttttgatactcaattgctcctatcttgatatttacttggttaggccacattgagagaagatttttagaggtgcctcttggtgccacttgggtcgaagcaaccatgcaaacctcaggattcgatacagttcgtagattttttgttgacactgttcaggtacaggatttaatgatatcttattcatgtactattttttgatgaaaagatatcttattcgtataagattacattagctctaacatgcctgctatcttcagctctgtcctctgcaaaggcctaataagtgggagagtgttgtcacattttcttctccttctaccaagagcttttcctttcctgttgttggtggccagacaatggaattagctatagcgcagttttggtccagtggcataggaagccatgaaaaaactattgtagattttgaggtgtgctgtttagtgccatgtttaatcccaacgtaattcttaattttgtttctgtcatgtttttcttactatctaattcttatttttgtttcagtttaattatttctgctactgttacgcactaggattagtggggtgtgctagcatatagtaataataagggtatgtgagtctttgtttgggagggtagtattgagtgagaaattactatatataggagagtaaggttagaaaaggggtatgcaatgaattgagtcaatctccatttgcatcaaaaggggcgtaagggctcccattagtctgtaattagcttttctatatcaatcttatagcaatttcctactgtttggatatatgcttgctgctgttgtgtgtgttttgctactgtgttattggttctcttgagcttggattatttggttctcatcgactacactcttagatgctaggggcacgttactgtgattgtgtttttaggatcttaaagcatgcctagtaaaattcagaatggatcggccgcctttattatgtaaagaaaactttgttttaacgtgtctgtaaataggatttttagctatttcgtgatctttaaatattttagctattggaattttttatgtttaattacatttatggttcttatatttttaaactttaaaaatattttgctctgattttggtgaactctttaatgtctattattattattattattattattattattaatcaagttgaagttattgatttcaaaatcaggtaatcattgcaaaatttgcacttactatttgattttggtgaactctttaatgtctattattattatttttaatcaagttgaagttattgatttcaaaatcaggttatcattgcaaaatttgcacttactatttggttttacgaatatgtttagattgcatttcatggaattaatataaataaagacgaagtactactcgatggaagtgaagcaccagttagaattgatgccgaagctccaatggcatctgagaaacttgcacctgctgctattctaaacaaggtgaagctagttgccagcttatttatggagctattatttattcttatttgtttcaattcacgctgttatttgtgttcaaatacagtatcttaacaatctcttctctaatacagtcaacaatcgacatcttcgtttctctcttttgtcattatgcaggtcagaattccttaccgtcctgttgaggctaaaatttctactctcacaacagatcgtgacaaactaccctcaggcaaacaaaccctagcactgaaattaacgtatgtcatttggtatttattttatattcttcatttggctcaagttttaagactcacccgctattatccaatggttgtacaggtacaagtttaaactggaagatggagctgaaataaaccctttcattccattacttaacaaccgcatatatgacactaagtttgagtctcagttttatatgatttctgacacaaacaaggtactttgcagcatcagttgatctaatacataaatctattgccatggattttcatctttaaaaattaatttttcctgcacagcagagagtgaaaagtttgtatcagattccgatttatttattgccatggatccaattattattatatcaccaccactgttatcgcacttccttcttttctccaattgtagcgtgtatatgcaatgggtgatgtttacccagatcgctcgaaacttcccaagggagaatacatcttacagctttatttaaggtatactattcttttcacagcagaaagcttgcagacaatcatgtagtaagctagttgttgctattttgctgctttgtttggtatttaagttttcaaatttagaaacgtggctgcttttctcgattccctaatttggccttgatcttaaaaatgtatattttttttttcacatttttgattgttttgtttcagacatgacaatgtgcagtatctggaaaagttgaagcagttagtgctattcattgaaagaaagttggaagagaaggtagaatatatttccaggatcaagtttgttctctttacaaacaatttctgtgctggtttgtgaagtttatacatcatctatcttcggttttatttttaatttctaaaatttcataaaattatatttcacaagttttgattctcttggaaaaagaattcttaattcatttattcaatccaaacatgagaaaatagaatcctttggtagtcattttttctctcttaaaatccaaggtccagagaaggcctaaacttttgggtattgtatatggaaatatgtaacttttactgatgcatgcatgcaagtcaatttatattatgtaagtaatgtagctttatcattttaatacctatataacttgtattcattctatctggttcaggatgtagtacgattgagctttttctctcaaccagacggtactgtgatgggaaatggcagttacaagtcatcacttttagttcctgggtatgtctctcgacaaactatttgagtggttaaatatgtttggttatagttcttacttgacaaatgattgcattgtgtggtaggataaaagaagcattttatgtgggcccaccatctaaagacaagcttccaaaggtatagtctttgcttttttttttctttctacttggtgttaatattagtaatagtattaaaaacaggtattctcaatgttttttgcagaattgtcagcacggttctgtactttgtggagcaatctcatatggaaagctatcctatcatggggacggggatggaaaaaatccacaaaagaaccctgcgtcttataaaatttcttatatagtgccaccaaataaggttcttagttgcgatactctgtttatactttgctgttgtttattgttcaaatatcatggtacagcagacatttatctatggtactccttgtgctttaatctgaattcctgtccatatgaattatttattattttcattatgtttctttgacagctagatgaggacaaagggaaagtttctgctccaacttgtacaaaatctgtctctgaacgtatagaagaggaggtgtgtgggaaaacatgagatgcatgtgatcaacttaaatctaattagcatctaacattaatgttgtaggtccagccaaatatacatattaggaaagagtttggtttgcagggttgcaataaggatatcttatggaaggaaaagaggaaatggtcataattttcattatttattgacaataatatctttcaatgtatcaggttcgagatgtaaaggtaaaacttcttgcaagcctaaagcaagataccgatgaagaatactcagagtgggaaagtttgtctctctcattgaaggtaacattttgtaaattgaagatgacatattgttccattttttttggtagtcattgctgtaagctgtagttgttaacatattttcttacacattaagatttgtcaagacattttatttccaatatttgaacatagattaattttttaggctaattttttagacatgtagataatggttaatagaattgtgtattattcaatagaatagaaagtatttatatacaaacctagagaaactaaataggaaattaggaaagaaataggaaactaagtaattacaattaattctaatttctacaactaatgtatagctcatatatcctaacactccccctcaagctggagcataaatgttaatcatgcctaacttgttacaaagataatcaacccgcaccctatttaaagcttttgtgaaaatgtcccctaattgttctccaatcttcacatatcctacggagatcaggccttgttgaatttcaaaacaaaatgacaattaatctcaatgtgcttagtttgcttatggaacatgggatttgaggcaatacaaaggcagcttgattattacaccacaatttcactagaattgaagtcttaaatatgacttcaatctcaagttgataaatccaaactacctcacactctgattgagccatatctctacactttgattctgcactggatctagacacaacattttgcttcttactcttccaa

SEQ ID NO: 377741 - DNA, 5530 bp, Cannabis indica
atcataaataaatacaatacaagattctaaagcttacaaaattatgctttactatgatgtaaaacaaatgctgagcaaaaacatggtttagcggaaatgtcttttaattggattattttcggggatgcaatgcttatctctaaggttcttctcttgttattcttgttgatttaatgagggtgattcttaggggagtctaaataacccttttaagtgttatctacataaagaaactagttttaaatcctaaatatggcttatacttcatacactcctttttctactcaaccaagctttggtgctaatattaaacttcagaaaaattaggcactgatggaattggaaacaataagtaatgacataaaagttcaaatgggcatagagggaataagcaatgtatcttcatacataacattttagataacttttcatcatgcttcttagaagttagaaccacagaagtttaaattcagggaaatgtaactgtagggtcttgtttaatagtataattttttaatttgcccattgtcattctaaatctaatcttttactagttctgttttaattttaagttactcttcttaatagtgattgttggagaggtagccaattttgctgcttatgcatatgctccagcaattcttgtaacacccttgggagctttgagtatcattttcaggtatgcaatatttcggtatgacactctctaatccaaaagaaacgattagtttcttacgcgttctgtatgcctagttttacaagtatattcgtttcggtttaaagtatctgtattgctatggcactggttattcatttcagtaattatgtaaagtttttactatgcagtgcagtgcttgctcatttcattttggcagaaaaattgcatatctttggtgttcttggttgtgttctctgcatggtaggctctgtaagtattgttttgcatgctccacaggagagattaattacttcagtaaagcaagtctggcatcttgctactgagccgggtattttccttgttcatgttcttcttttgatcttataacttgaatgatcatatttgttttttacaaagttgaaactagcttttggtttattgtttagttaagatttctcaaaattgactgaattcttattcttttcgaacaataaatctttgtaaaagcaactgatcataccctctgttttgataaataacgaattggatcctgtatttttaaaaatagtacataacacctctagcttagagtattgttatgttccattttcaactcaggttactgttatgtttcattttgaaaaatacatgatcaaaattatcatttaataaaataaaggatttgatcggtaacttttgttaaacgtagggtccaaaacgatactcaccttgttttatatgaggctgtttccaggtcttgagattcgagtttaggccaatgctcattacatgaacgctatgtttctaatgatcttgtatgtttttctttagaaaaacagagagtcctataatttttgttaaacatatggtccaaaataatacttaccctgttttatataaggctatttccaatttttgagattcgagtttaggccaatgctcattcattacatgaaagctatgtgtcaaatgatcttacatgtttttttttagcaaaacagagagtctaatcggtaacttttgttaaacattgggtctaaaataatgcttatcttgttttatagctatttccaggtcttgaaattcgagtttcggccaatgctcattacatgaaaacaatgtttctaatgttcttgtatgtttttctttgttattaacaggtttccttgtgtacgcttgtatagttctgattgtggttgctgtgcttattttccagtatgttccacattatggtaaaacccatatggtggtgtacgttggaatttgctctctcatgggctctctcacggtttgatgtcctctctattatatattttttacctttgcatagagttagagagaaattcgctattcattttcgatattctgctgcagttgtcccttatggtattaactcattcttttgtaggtaatgagtgtgaaagcattgggaattgctttgaagttgacatttgaaggatcaaaccagttcatttactttgaaacatggttttttacagtggttgttgtaggctgttgtcttatgcagataaactacttaaataaggtacttaacttacctaacctatgtcttctaaggcgattttgtttcggttgtttaggctcgaccgaccatggatcttctcgtatcgtagtactattagaatgtttaatctgttttacttgaatgaatcttttgtaggccttggacacctttaacacagcagttatatctccggtctactatgttatgtttacgtcgttcaccatcctcgcgagcatgatcatgtttaaggtgatttttaactaactttttcgcaagtttcttgagtcgttttcttagaaatttatgatgtcaaaacctcaatcataattatgtatgacatgaaaatctggtacataatatataaatagactgttgttcaggcaatgtggtttgttctcacaaagattaaggttcaagtctcacctttagtacttacatagcaattgttatagttttctgatcccggaatattgtagggttaagccgaggatcttcaaataaaataaatagattgttttgttatggctcacaatgttgtctaatctaatttagccataaagtagcaagatatgatatttgagcttatatttaattcaacataaaatggattcttataatatataaatttagtattgataaaagctattttagattggagttttctttcatgttgctccaatataaacaagaactcaagattagagaaacaaaaggtaaattctagtaattattaaaccttgctttactttttcttcaactttagaagctatcatggcttttacaggtatctattggaaggaatgaaaacataaaaaataaaaataagaatgagaacagaaataagaataaaatttaataagcatatgaaaattaaacaaaatctttatgaaatagccatttgaaccttggacgaccaggttcaagagataaggaaattaatgatacttagacttatccaatctgtaaagatttattggaaaatacaacatttttacaacccaaccaaccaacaggtttgaccagtgatgcctaacatcttcttttgtgtcatattgctattggtgcaattaattattgagtcccataatataataacttttaggaaatatcgctaaccaatcacaaagaggcacgtgcagaaggtactagacaccagtggtgtctaatagcaatgcttcatactttaaaatgcaatcaaacaaaggaatagaatgaaatttgattcttttccatttcatttaattaccctcctttaaattttttaattcttttgcatcatttcacagatgacacattttgcttcattatacaattatatatcacttttgttttttggcttcttttttgcaaaatgcaggattgggattcacaaaatggatcacaaatagtaactcaattgtgtggttttgtgacaattctatctggtacttttcttctacacaaaaccaaagacatgggaaacactacgccgggagagacaccggtctttcgaagtccaacacaccctattgtacagtcaaatccgcgatgatgatgatgatgatagctgcgttgctgccacgaagatcgacgacgatgacaacgacttcaatcattaggatcattttcactcaaatcataacacttgtgactaatgactatacagcaactttccaaagtttgatggtgcaaagaagagagtagaattagaaaaggtttgacaatttttttgagctaaaaagataaaagacttaattgttcatttttgtgtgagcatgttgtttacatctatgattattttgtctcattgttcatgtgaaaatatgatcacatattattgttcagttaagttttagtggttgaaattcttagattttatttatttattgatttatttattattgttataattatttttaatgttaatatttgagactattttgtagtgtgagcttctaatagtgaagagaaacttgattaggacatgattgaagatatatatatatatatatatatatatttatgtaatattcttgtttagatttttacaatattttctcataattcctattgccataaataaataaagatttttttttgttatatttattgcctcatgaaaaaatctcaacaacccgaaaaaaataatacaatttattgtatttattaatcaaaattgcacaattaaaaaataaaagaaataataataatatgttggcatataaaattagtggtgttcacaaattgatttggccggaattttcatattttttaaattaaaccaataagaatggtttgaatttgttcgaaactatagtttaaatagagtttataatcatttattttttaaagtaattgtactatttatgagattgttatttttatatttaagattatgctttcaatatttccaacaatatagtactctaaaagtatttttcacctttatactattttcaaaatacatttctaaaattttatttttttaaaaaaaaaatctcgaaacatcttctaaagagcagaagagctccaaaatgagaaaaaaaggcaagatcatattattaatcaaatgacctcagacgtacattgtcttaaatacaaattagatatcaagaccgtataagcaagactagctacattaaaaagagcaagattaagcttaaagatgtatccaacaaaatataattgttaatcttataaaccacattcacacaatctgactcaaattgagactcaaattgaaccttgtctaaatcaagaagacgatattgaaacctagcattacgttcattgaatgcgaaatagccaaaccgatgactacaccaaaactatcacgaatcataatacccatactacaaaaatcaccaagctccacagaaggaggcacccataaacgattagtcaaagaaatagaggccgagattcaaggccaattttgagattgggtgggacttatgaaataaaaaaatttattggaccctttatttaaaaaaaacatgcagtatcttcaaaaattataaaaatttatgttcaattttaaatggaacgagtcggccctaagcacgggcctagccctccttatcacccaaaaagtccctgacctaaagattcgctagctcaagagatatcaactttttcttttttaattttctaatatattgtacttattttaaatatattatataaatattttcacatatctacacattttaaaaaataattaatttaatgaaaaatattttataaatatcaaataaatttttaaaaaattttaaaataaagaagcagtttaaaatagagtactatctcttctattttaaaatattttttaaaaaatctttatttacataatttaaagtttttttttt

SEQ ID NO: 377742 - DNA, 6307 bp, Cannabis indica
taaaaatacttgcatttactcttctctaattattttcactgctctaattatttagttgccgaaaatttcagtcaacaataatgatgaacaattgatgatgcgaacttcttcttcttcttctctttctccctttgagtttctctctcaaaaatacagtctaaaagtccttaaaaatgagccttaaaattcctatttatacccccataaaaatcctttgatttaaataaaagacaaattttaaaatttctgaaatcgcactctcactgcaacgaagctttatgttcattgcagcgaagctttaggcttcctgggacgagagcctcctgctgaaattttttgtcgagtgttcagattagtattttcgctatagctcctttaatacaactcagaactggacaattccggatattccaaaaggctaagaacaagatctaaaactttcgtgtttagctccaagtccagttctgcttccaagattatcaaaatttacaattaagttatgtcttgtaaaatcgagctctccaaaattgatatttttcatcgaagtatgctaaaatcattctaaaatactctaaacacatgattagcctttcaaaatcataataaatcaaaatcacactaattaaagatttaaagagttaatttaataataataatgagagaaaataatatagcttaacagacaaatatgcacttatcaagtgccaaatacaacgctttcaaaaacgagaatatgaaacgaggaagtgaaaaaagaaaatcaagtaagcatatacttgttacaacaacaaggagaagaagaacatacgacataaaatttttcaaaatcaaaacacaaagcaaccaaacgcacaagccaaaaccccaagaccaaaagttgttcaaaaatcccctactctttggaggcatttctagaatcaagaaatcttccaaaaaaaaagagaacaatacgcaacagaaattaatcacaaatgagcactaatacttataaaattggggtcgagacatcgagaatggtgcaactgaacaatgctagtagtaccgtgcctgacagcatcggagaaaaagtaaaagaaaatttgacgagctcaaagatatttccagtttgaaccctcaacagagatggtaaagaaaataaaattatacaaaggaagaaggcaagtgatatttatagccttcaaccctgtggatacttttcatcctacggtcctctacaaaatccaattaacacattatgatcaaacgattggggggacatgaaaaaagacatttatgagaagatgtttggagtactcgagtatcctattgttgccctacatttatttcacctctcaggattttgttccagaaaacaaatcgacgtcgccagaattaaggagggaaaaacatgcaagcctacgagccactcattaagaaacacgtggtgtacctgtgcaaacaagcgtgcttcatttacctatgacatcatggcaacccctccgggagagagctaaaaagatagtcaataacaaatcccaacttacaaaattgtaagctggaacttggggtaaatgttgtctgtaatttttaccacaatacgtggccattcgggagtaagtcacgtgtccttgcagacggcaaatctgttatcaaaaagaagttgtactaaggtttagctcataattttgtgacattgtgtcttggagtgtcccatcagctgcaaactcgtcgtgtcttgtctcactaaactcctacttcgaatccagctgaagctcccattatcataaatcatttcctatatctgggaaaagcccaaatagagcctagagagaaaaagagaatgtaccttaaaccccaatgtgcttctccaatctcgtctataaatatggaaagaatgaaaagtaagaagggagattgttttgagaggaaaaacaaaagagaactcctttataagtatattatggtataaataaatacataagtaatttgattaatattaaaatcacataaaaatatactttatcatgcataagtaatttttgaaagacaaaattaagtaattgcgaaaaatatcggtcaactactcatatgtaggtgaaattactctttattaaattataatatgtagaaccaatatttgaataatagacatatttatagtgttaaaaatttattattattattttgaaatggattgtcagacaccttagaagctatcttttagcatttttccttaataaattatgaaaaaatttactgtctattctctcttcacttttcaccactgccaaacagagaatttcgaaccaagacaaaaaggatagggtaaaagcggaagccatggcacatacatatataattattgaacacccgaataaatgtggtgtcgggtcccaaccaaatttaattggattttcaattaacatttgttgaaaaagaaataaaaattcagaaactcagatacgtactctgttacatgttactatcggactcagtctatcactcatataatcactgtgtcctggtaaaaagaaaactcaatagccagtttgatattaagggcccctatccacccaacacaccataccatttttttggtacatgatattgagtgattctacaatgcattcccttaaaagggatgttctaatgcacccttaacttgtttcggcattcagaaaaatttcttagtctaattttttttttatattcatgtacgttatagctatgtaagatattctacaaaattttgaaaaattcagaataatttacaatatagaaaataatgttcaaacagtctattttacacgcgtataaaataaaatagtcacgcgtgcaacacactgtttgaacatgattttttctatgttaaatttttctaaatttcttaaaattttgcaagatgccttaaataactataacgtacataagctgagaaaaaatttgacaaataaggatgcatcaatatattcattttaaaagggtgtattgtagaatttatattttattacacaatattattatggcttcacaaaattataacaagtcagggaccacgtgccggtcaacactttcgtatcttacgtggcaagagcttaaaagaatctaatttgaagaggggtccgacaagttcacggatcctcaagttttctcgtcactttttccaataaccgaagcttcagtccactcacaggctcatattaacggctactttcttagaaatagccacgtggcttcacccgattcaacggtttgcttttggcgggaataaaactttttctctgaaatatctaatttgacacacagaataatatagtggtgatgttggtggtcccagtcggaccctccgaaccggcgaggtcgggtcaagtcaagttattatatatttcagcaaaaggtggggaactgaactaaactcatgaaatataaaatatatattgaaagacacctacgaaaccaatagcgaaaagaatatggaattaatttaacaaaagtagagattatacaaagaagataatgcatgcaattaaataattgaaaatactgaaaagaatgacttcttttgagaagtaaatcctttttttttttaataaagaaaaaagaatcatgccggggaggggagtgacgtgggatcggccgaagatgggatttctgctccgacacggcaaccttcgagcatgaacacaatgtccgccatggatggtctgtcaagtggatcaggagcagtgcaaagaagaccaactttgactcccaacaagaactcttcccactccgttgactcagggtcaatttcgagcaaacccggttcaagtagctccgagatttgacctctctgtaattgtttcttcacccatttgactatatcctcgtcttgagtaaacatcaccggtttcctccctgtcaaaatctccaacagaacgattccaaaactgtatacgtcggcttctttggttgcccgacctgttaatgcagcttcgggggaaacatagcccaatgaaccaactggggtcgatgaagatgatgctccttcagccggtgtcgaaattgtcagcctgtccagcccgaattcggatatatgggcttcaaaatcagcatcgaatagaacgttttgcggcttgatatcgccgtgtaccatcgagagagagtggaggaaagccaggccgcgtgcaatgccgagtgcaattaggtgtcgcattggccaattgagtacatggccgtcctgatgagacgcctcttggagaagagttgcgaggtttccattaggcatgtaatcatatacaagaagcctcacgtcaggaggaccagcgtaatatcctcttagaactgtgagattccggtgcttaacctttccgagcaactcggcttcttttcggtatcctccttcgtctaggaaaccgtctgcaaggcggcgtattgagagcaccattccatccctggaatgaggccttgaatacgagcccgtattttcctctgctcaaaacgttttcctcatcgaattgtcttgtggcctccaatgtctctgccaacgtgattttggtattgaacataactagtttaggccctccattttctccacttcctcgacctctttcccctcccgagcttgctcgagcagggctcctcttctttcctcctgcaagtattccttctctaagctttttacgccaacgcagtaggctaaagatgtagccacaacagcagaatcccactaggcaagctcccactacagagacaccaattaaaacaatcagttttctcctttttcttctcctaacactttcacattctttatccagtggcttcccacatagtcccgggttcatggcgtatacagtttgatcattgaatcgagagcttagtggttttggaatctcgccttggagattgttatgggagagatttaaatgtttcaagccaggaatgagagtgatattctctggtatgattccagtcaatcggttggaggacaggtctaagtctgtgaggctggataatttggacaatgagctcggtatggggcctgaaagttgattctcatctaacaatagagaagttagataggaacacttagagatctcatctgggatttcaccaaccaatctattttgacccaaatcaagcttcttcagatgggagagtttagagacatcaccaggaatattgcccacaaagccattcgaacgaagctcgaggacttgtagttcagaacaattagtaatctcttctgggataacacctgaaattttgttaattgctaaggataagacgttcaatgaccgcagaaatccataggtggtgggaatatcaccagtaaagaaattggatgagaggtttagatgtttcagactgaccaaactgctaaaaccttcgggtacatcaccagagagatgattttcttggagagcaactacctgtaggcctggcaacccaaagatctcaattggcaactgcccagagagtttttgtttactcaaatctagtgtagaaagcttcattaagtttccaatactcgcaggaaatcttcctgtaaaaccacagttgctcaaattcaaaacctgcaaattgctcaagctcccaatatcagtcaaaacttgtgcacccaacttgttgttgctgaggttcaatgtagtcaaattacccatctgcatgacctcctccgggacatttccagtcagattgttgttgctcagattcaacgtttcaagctccaaaagctttccaagactgacaggaatggtaccagaaaatgagtttccacccattgacaacattttcaagttcctcagtcctcccaaaactgaagggatctgacccgaaaacatgttatcttcaaggtcaagaacttttaacaaactacattgtacaatctcaacaggaacttctccaactaatgagttgtttgataaacgtagctcttccagccggacaaggtttccaatctgcaccgataatgggccagaaaaagagtttccagaaagatccattgaccttaaagtcgtcaaattagtcaaccaagatgggaacacgcctcttatgtgattctctttaaggtctaaaatctccaaaagactcgaagaacaccatccatttggcggcttgaccatccccgtgaaagcattaaatcctagcttaatgatctccagagaagacccattgacagcgacgcgacagagcagggaaataggaaccaaacctgagaggttgtttctcgacaaggagagaactttaaggttaggaatcgttcccatggtcgccggaatcaaacctcggagaccgttgtcttcggcgcttagatgaacaagcgaggtacagttggatatggctgaag

SEQ ID NO: 377743 - DNA, 7039 bp, Cannabis indica
acataggagtcaagtcaagctggtacttcccttgtttgaaaatttctaaccgtgcttatttaaagccttagcattgcgcttatccagtgatattttttgggttgaaatttcgttagttgtttatatattttttttctcgtttattttgaaatataattgaatgagatcccatatgcatgctgctggagatacaaaaacatgagtacgattcaaagaaactcaacaaccatatttctgatcgtcttccttcactatcaagtatcaacaaccattagataagctcaacactttgccccaccaccaagcgacttggtttcatgagaagtactataatatttgaatatttttcccgcttcttttgttcacaacaatgagctcattccctcaaaattctcatattatcatgacagtttccatatggtaccttgacaagttccaaaccactaacatcatatatattatttatctagacgattgccacaatgaatacagataaaaattatatgttataagatcacaagtagatcgtcaacctaagagtactaagctttaagctgtaatgatttgatacaatggggatgtttctcaaacctaggcaataaggagatttaaaaggacaatgagatatgcacccgaaaggattcttcgacagcacgttccaagagcactatgctcatggaattttacactgctgtccaagtgagcgtacttgaattgagcacgagtttgatgtttgtccgcataactctgcacgtcttacagctggctgaatgttttcacaatgaagattcgatgtgatgatgctcaagattgcgaagtacgattctagcaaatattttagcttctagaggagcagttgctgctgcagcagcagctcgtaagactcttcctgctcctgcattttgcataaggcttgcatggtggactgcatgtctgccaccagggattgtaaactgtagaggaaacaaaatgggacagattgccacaagtttaagattttccactaatagaggatcacacaaatgcaattcaattcaaacatgcgcagcatacctgtaggagagcaaacgcagcacatgccttgagtacagatgatggattccgtagcatggtaacaaatcttccaatctcagctccactagaagatgcaatacagagtcagatgattcaggcagacaaaataaacatagttaacctaaattgggtttggaagagatcatagttaacctaaagggggtttggaagaaaattacacggaagtgaaattatgctcttatgagagccacatgaccagaaaggaaagagtcaactgactcagtttataactggggttgccaacataagaggacaaagtggaaaaggaattgggtaaaaatatgttgagcaaaaagtcaggacaggttggtagagactaatggcaagttcaagcagaagatatactttcaattgccagtagaaatgttggtccatttaacagataatataaagttaccaaaaattaatcaagagagtgaatcagtaaacaaacctgcatctcaaatgtcctgcttcctgaattcgagctccttctgttacctgtgctaatgctgcaggggctgaagatgcagctgcggcggcaaatgattgtggatcagagaatgtaagaacaaaggcttcaatgtgctttagagccatccttctagctccatctaagctcacactctttgacatactgtctgatgaagtcccaacaagagcatattcatccattctgcataataatttaagtagtgccagtgatatgtcaaggagaatatttacatgccaatgaaagaaacaattattgatttttaaagaaatatatatttctctcatataaattatttctacacaacaggagaaaacaaaagaattagtaatatgatcatctcagctatcgtgagaacacaatgagtacctcccatcaaacatgtatgccaaagccaaagcagccatgaaacgtgccatctttgaaacagaggaagagcaaagatgaacaagggcaggaactcctccttcctcgacaatgcggagtgcattaccagggttaaacgccaaattccatagagctcctgcagcagtttcgtggacatcctgaaatccgaaattaatatcagttatggcaaagacagtccagtagataaaaaaaaaacatatacattttattccctataaattatgggcttcggccttactatttctcaacttcatttgtggaaagaaaacaatcaaagcaccacatagtacattgtacttatcaccacccacaacacttcaataaataagtaactaaaattataaaatcatacttacttctgcttcagagcgtgccagtgcaataagaggtgcaacacccccttctcgcccaatagcaatgctaaaaatttacaaaacaaaattcattaaaaattgttgtcttaagtaatcctaagcaaagtcgacatgactaagattaaagtactccacaggcactaaaattgataaacaaaagtgtaaaatggaagacttctgttgcaaaccaatatctatgaagtatgattccttatccatacatgcagtttaagcataaattccacaatcatgtaacatgtatagcaataagaaagaaatatggtgcttcaacatgctagcaaaaacaaactctaaataatatttaaaagctaactaatctgcgaagtttaaaattataaaactggttcatacacaagtcggaatagaaaagactagacattaatggtaatgcttttcttgtttagtcatttaaatgcaatcaatcgccaataatttaggagcagagtcaacagcaaacaatattttttaaggattccaataaatgatagttgtaaacaataaaacctactgtcatacagttgttttcagggggtccataacaaaaaggttacactcagacaaacctattgacttctgagacggacaatccccagagagcaccagcagccctttcttgtagacctggggaagcatttgaacatgattgtgcaagagcaacctaataagcaacaagaaaagttatatgagaagaaactatttgattacagaaaaactcgggaaaaaaaataaaactgtatttaatccaacgcattcaattagagatgtaatcacattgtataagttccaaacattaattgttatgcttatctttcagaggctattgcattgatatgcttccagctaaattcttatggaaaataaaatattttattttatcaaatgggatgatgatatataaataatggaagtcacttttgtactttttcacatcagcctcaatatttatactcaatgatcattgatcacatatggtgatgttttctgtcgactagtcaaaaccatgaattacaatatccagagagttataagatcaacaatgttataccaaggcttcaacaccgccagctgctgcaattgcttctcgatttctatcatcaaatgaaagattccacaatgccccagctgcttcttgcctatgggagaagtgcagttattggtatcaaatcaaactaagaaactaaggaacatataaaacatccaatcctcctattacatggattaatttacacagcacaaataaaatgggcaccaacccatactcaatttgactccatgtcaagctaacccacgcagcaaaatatataaacaaatgaatgaaatcattgccaataataagattataattaggtattcgcaccacctcaattagacagagtgagataacattaatatccaaaccacttcaacaaagggcgttgaatacagattatacagtacctgacaccttcatgtggagattgtgtaagctgtacaagtgcttcaagagcgcctgcttcttgtccaactgcagcattgttgctgttactatctccatgagcagccaaatttgccaaagctcgggcagcctgttatatacaagaagaacctataagtttaaaacagacagatgcagtcggacatacaaagtgcattcactgaaaactgtaaacgatcaatactagcatctaaaccatgtaaataaaaaatcgctcacataacagaaatgtgagacgtaaaatgttgtttcagaacactttcagttaatttaatatctcagttattctggtagtttaaaaagggcttaatgagtaaggcacttgcgccctataatataatggaatgtactgttactacctgctcttgcaccccctcaaacttgcagttacgagccagcatcaccaaggcatgtacaccacctgcaactgcaacctccgtgctacacttatcatcagcggccaaatttgcaagtgcacctgctgcgcgttcctataaccacaaatacaatatgaatagtattagattcaatagttgtgccattatagcatccacctaaaaacactataaatcctaatatctaagcattgtacttaaatagaaaaaatttcatgacaaatttagagtaactgaccagtactccatctccaccagatgaccatttgaatataagatctactagagctttcactccaccagcctcagcaatggaaccctggttggaaaatctaattagttagagaaagtgaaatataatacttttcagcatatttgtgcaagacaaaatattactttcaagatatcaaaccttatgctcttcaccaacagagagattccatagcccaccagcagcctcttcggctactagcctgttcatagaccttgctaaaccagcaagaatggtgattcctccttcttcagcaacagcttttgcaacattggcattaacagacaagtttgctatagccttctcaagaaaaacaaacagcaagaaaataagaaacaaaattaacatttttggcatttgtacataaaagtatgctcaaacatgaatagagataaaaacattattgtacagcaaaactttacattaaacaaggtttaatttatcatgacctgcgcaggcaataattatggaaatcaactgtatgcgattactttaggtggaaaagactcacctttgcagcttctgactgaagaccttctctccatgactttgcaagattcagaaggaggcgaataccaccatctctcataacagcttcagcccttccacaatctatgctagcattttcatcatcaatgactacaaaagttgcaagtcctgtggctgccctttcctggacatcttcttgcgaactttgcattaaattgagcagtaatgatgcaccttgcttgagccaaaattcatccaatccttgttggttgctctcggcgatgcgcaacagtgtatgggataggatccactctagccaaatcataatttcatccaagtttttatctgtactttttgaattcctccaatcgagaaacacattcctccccttagacatatcgacaaataaagaagctatatccttcaaaatgtctgtaaacagagccaataacacttttcctttatgtttactgccagcaaagctaacgtctccttcaagaactggacaattcaaggcacacaggcaccgttcaaacacgacgacgataacaatctcgcaacagcagttgaaccaatatcagttcttgaaacatctaaaccaattaaattagggagcttacgccagtgatgtgaaaccgtaccccactttcatatttgaagttcctgcaactgataggaaccggactgatactacattccccaatgccatctcgtctatggttaaacagtctatgaacccgatatcagtcaaattcggacaatgcttagctaaagcatttcatagcatcagcattaacatccctaattccggaaagcctaagcttttttaatttatgacagcaaagagctatggcttttatagcatcactgctgatcctttcacagaaatcaggaccaagttgaaggctttcaagtgcctcatgacgggcaacgatcacagaaagagaagcatcacttattttccggcaataatcaccacttatttcccgcaaattcctagcttgaagatgaattattgcatccgcggattctgctccacggaacctaaccttctgaagatttacacaccttgaagcaagtgaagctgccattgtagaatcacatttgtgggcacgaagatccaaagtgctccacaagcacggagaaatgccaagaagcctccatgtcttgcatgttgatgataagcttgcacggtcacgatagttcagacaggataaaagttgaattactgtgtcatgaggcaaactagtccaatcaacaagtccacttcggtctacacccgaaatctcttcttcaatttcgggatagcttggcaaaatcaccttctcttttcctttccgagccacctttcgcctcaccctacgactcatatctcaatcaatctacttagacccagaaacaaataccattcaccctctctagaacccaaatcccattacaaatatacagaccagcaaagacccagaagcatataactttcgacctcgatatcccaatcctaaaagcacaaatggaacacaaacaaacccaagaaccaatgtttttcttaacccaaaaaccctaatcctcagattagcaatgaattttctgtgcacatgtatatctcctgttcatattcacatgtaattcaagattcacaatctacgataatttaaagtccagctatatcgaaaacccaacaaaatctagtatcagatatgcattagactcaccaacccaaacctgataggcagatggtatatgaggttactagcaagaagttaaggatttgggaaacaaattatatgcccttaaaaggattgattgcattcagtggaggttcttattgattagagagacaaaagaagagggagagaggagacaaagctaagatagaagggtcggagagaattcaggttgtgcgtgattggaaagagcaaagccaaaccctcaaactcaaagcatgtgtctaccccctctcccctatttgtctctgttgtaattagtggagagaaagaatgagagagagatagtgagagagagaaaggagagagagagaga

SEQ ID NO: 377744 - DNA, 1825 bp, Cannabis indica
aggacagctaattcaaggggatgtgtgtgatgctgtttaaaatttcttgcattcgggatagatattaaaggagataaattccacagagctcactctcattccaaaagtcaaatgtccaaacacagtaagtgaatttagacctatagcttgttgtaatgtgatctataaaattgcaactaagttgatgtgttcaagattgaaacatgtgcttcccaaattagtggctcagaatcaaggaggttttgtcaagggaagattcatagcacataacatcatgatctatcaagacctaattaggtactatggaaggagagtcacaaagcctagttgcatgattaagttggatttacaaaaggcttatgacaccattgattgggatttcttagaggagatgttgatggcctttaagtttccttctaaattcataaagcttattatgaattgtgctaggacacctaggttttcattgatgttcaatggaacaatacatgagttttttgaatccaagagaggactaaggcagggaaatccactatctcccctcctttttgttcttggaatggagtatctctcaaggatcatgaacaagattgggcaaaaacaagactttaaatttcatgacagatgtgaaagcttacaactcaatcacttgagttttgtgaatgatgtattactcttttgtcatggtgactttaagagtgtatacctcatgaagcaaggcttaaagcttttttctatcacatcagggcttcaaccaaatccaacaaagtctgtaattaattgtagtggtatgcatgaagttgaagttcagagaatcatggatgcaactggttatagcagacaacatcttccattcaaatattttggcataccaatttgttccaagaggatctcgagaaaggaatgtgtgctactagctgaaaaaatggcagccagaatcaagatatggagttcaagaaacatctcttttgcagggagatctgttctaatcaactcagtgttgctttctatacacacctactggagtcaaatcatgaagctgccaaagaaagtaattactaagttggaagcaatatgtagagtcttcctatggaagggtcaaagtatgatgcaaggggccggtcctatagcatgggattttgtgtgtttgtcaaaaaaggaagggggagttggttttaaaaagatacttgaatggaatcatgctgctctcttcaaatatgtgtgggcaatagcaaataaagaggataatttgtgggtacgatgggtgcacaatgtttatcttaagcagtgattggtgggaatacaaactcccacaaaatggcagctggtactggaagcaggtagtggctgccaaggatcaaattaaaagcaaaatggatgttcaggcctttgctatgacaaagtatgccattgcagatgagtataaaatttctttgtccaatacaacaaaaggtaaattgggataaggaggtatggggaaggattaatatgcctaagcatagctttatattctggttggcaattcagaatcgattgagaacgaaagcaaggctgaaattatgcaacatagtgcaggaagatacgtgtgtactctgtaaattacagcaggaaacgaacgagcatctgttctttgagtgctctgtttctgctgagtgtttactggagactaaaaggtggctccaatggagagctcattgcacaaccttgaagcagctggtgagatggattggaagagccaagttgtccaagttcaagaaaaaagtgtattcaaccacggtagcatgtttaatttacaacatttggagggcaagaaatgatcacatat

SEQ ID NO: 377745 - DNA, 1547 bp, Cannabis indica
aaatataaaagactaaattgcccgttaaaagtagatattttctatctagattgttgtgatgttaaaggcccaattcgcaggtagcttgcagtcaacatatcaggctatacaaagaatcctatcaggtcaatcttgaccggccatacactgcaggatatggtctggtcggccatacaagttctacagattgaggtttgactggccatgctcctgctaggacctagcaggtcatgtgcctgctaggatcttgcaggccatactactgtcaactttaccaagaggaggataagctttggatgtggaggccagcctttggcaagtggaggttagctttttacaccatttccttgtagatgtcaggtttccttatcgaacagtctgaaagtcaccttttggtcggctatatcattacattggaaaagagaacttcagatctttccaatatgaccaacaagaataatatataagacaaatgcaaaaatttcaaacttatatgcaaacgaatatgtatatatacacaataatattttcaaattcctaaatgttttactagttcatacaaaaataccgaaatgcaaatcactttagcatatacacacaaacagctcaactcaactcaaaccatttaaaattaaagttaaagaaagttcattcggatattaaacaagacattgaaataaaattactcagataaacagtttaaataatctcaactccacatctcacatatcacaactctatcgcatactcgcattactcgaaaaccgcaccactatcacatcaaaatataaatgaatacatgaatttaaattaccacaatagtacatcacaaaacattctgtatagtacgaagagtttcaaagtcttcaccccgtcatcatcagatgtagcttgtggaaaaacacaaagaggcttgagcgagagaggttcggatacatcgaagaaggtagagaactggtttttgttcctaaccaactcgaggtcatcttcatcatcatcgtcgtcttcatctttaactttaaatatggaatctactgcggtgggagtagcagcggaaggagaagaagaattgttaagacccttaggcttggtattaatatcatacaagatttgtgggttcagtgctagtggtggtgggaactgttgtgggtttgaagatgagagggagagagagacaagatatatatatagagagagatagatagatctaaatgtttgaatgaaatgatattttttgggtttttatacattaaacagtatccctgacagtttaaaattgtcaagaatactgttttaactcatttttaatttttaacatcgtgactattttgcacagtcgaagatctaaacggctatttaaaatcatcgagaatagtagagtattcttgataattttaaatagacacataactttattagtgatgatcctccaaaaaaactgatttgaggactaacggtttgtagtagtgtgcactatagtgttggaatagtggcttcagacaaaagggaggttttcttttggtggtgcgcgcactcttagggtctga

SEQ ID NO: 377746 - DNA, 4277 bp, Cannabis indica
ttccctaagtacaacacatttactattttgaatttgatcaaaacaaccaattcatcgaagcacaaatcacttgagattataagatctcacctactaacaacttttaaacgacttcctgaaaaccacaatccaatgtctccaatatgaagctatccatcttcatcaataacttctctcctattcagaggaataatcatgtgagtcatattgaacaggtaataaactgcaaagaatgaaaaaacaagcaacatcatttcctgtgcacttcatctttgtcatagccacaacaaataattggacccttgacacatatttcacctcaaggataaggctcattcgcaattgtgcaattcatttctgggacatcaacaagttttatgtctgcaatagaaagaaacaaaacgatttagtgaaaatgcaatcctttatttttcaaataaataaaacaaaataaattggtaatagaaaagctaagatatgataaattcaataaactaatcaaaattctcaacaaagaaaaatacctttggagtggtaatattgattctcaatatcaaacttcttgttcttcaggctcctcattggagtattcgaacccataattttccatttcagcgtttgtacatcataaacccataagccataataaataccaaaactaaaacataggatcaaaactgcaagacaatgttgacactatttccaaagaaactgaaatggaaaccccaaattgaaacattttctagggaaacaaaaaaaaattggtttttaaagaatacctcattacagctaatctaaggagaatcataatgttcgctggacttgataactggaggagcaggaaagatttgattatggccaattgcaatgataagaagttgcagcagaagcgtttaattctgttttgatgcatgtcaatatgtggagaataaacagaatttatgtgtaggaactattgacagaaaagagaaattacaaaaactaaggaggttggttgagctttatataaaaggtatagatatagataacttaccaattttcaaattttgttattgcccaaacacaactatattcaatttagtttcggtgaaaatgattagtataaatgatcattgaatcttattcctagtactcgtcatcctttcaaacaatagttctcacagctcattaaacacccctctttcaatagttaaatgagaaactatatactagaaacaacagccaacggataaatagtttaaactatttacatacaacagtaatgaatgtgcatagaaaatgccacctacatattgcaatttaccaataacactcctactatgccaaggaaagtgaatggcccttcactttatcatctgcgtttagcacaattagacccaatatttgtttctctgagtcattgaaacaatatctagaaactgactttggaaacaaacttttaatgtcaaaccatcaattttcaagtagttttaaattggtaactcatcaaacaattacacgacaacatgatctttagctcaacagaacaaacaaatagaaacaaaaacagaaccttaaaacactaggaagtaggaacaaccaaagtgcttgcagccacaacaataggtaacattagctcaaaggtttaattttacactgttaacagcatctttggtttaaatttcattcaagtcaataacttgtaataatcaagtacttattccagagaaaattatgaacagattttcccattagcagtttgcatcaatctataaaagcatcaaagtacaatttacaaaacttgcaaaaagtacccatatcaccccatctggccatctccgagctacaccaaaatgactatgagttcgaaactaaccaatgatcatagaacaacaagtaagaaataaagaaaaaaaaagagccgaaaggaaaaaataacttggccttaacaatgactgcagttgtgccaacaattatgactgcaatcgccatatccaagaacaattcatattccacaaccccttccaaagctgaaatctccttcccagttaaggagattttcaatggcaggtattggggtctgtaggcccaagcaatatcctattcgacccaattctcaatatgtgaagaggcgaatcccatgaattcttcatcggattccaaggcacacataaattctggcttaaggcacatctctaaatcaatacttccacctccatcacgtccagggtaacacgaaactttcccatcaaacttgtttgcgtacccactacggactgcaactgctttccccatcccaaattcacatccatacttgttgaatctaggtgaactccccatcatcactgtgaaaggatcaaaaaacagaccatattcatacacctggggatagcaaagccattcctgaagaaactcacgcgtgtccttattgctatggttaaccacagcctcatgcaatttcctcgctgcccatcccaaatcatgatcaagcaaatcaccagccttgctacaactctttatcgcataaagtacattcccaaagtaattctctgacaatggtggatctaatcttgatctatcattcgttgctaacttgcaagtagttacctggtcaggtggtagattgcgtgctcgtgttatggacctccacacaagtgcagacaaggactgtaaggaagagattccattactacagtctacattggctctggctttgagtctcgctattgattcaactgagaagtggaagaatctctctcttaatagaggtgattcgaatcggccaataaactcatcagggttagtgtaagggaggttgatgattggaccatgaccgtctggaaaccatcgtttcaaaatgggtgggcgagagatagagttaatattattattaccactaaactcttgtgctcgaaagatttcagaccacatgttgaagaagttccaataggaagttccatcaccaacggagtggttcatggagcctatgaaaacaccatcaactagctcggtcacttgaattgaaagcaggctcattgtgtggccgtcatgactaacagctttgtgatgatcaaacaacgattgcacaatcttacaaggcacatcagtaggggaaaggatatcagatattgttaggtctagagttgaatatatgaatttggctccgggggtgttattgcaatccacataaacaaggtaggaagatgggttttctgttttgattgttttaaggcggcctgcaagtgggtagaagtgaaccaaagaaagggaaagagagttcttgagcttgtccagcaaggattccatgaaatcatttccttcttcttccttcgcttcatcattataaggtttagcaaagagaagacccttctggatatggtgaatagagagcatcgctagatcccatggcgtcaaatagaaaggttgtttggaatcttcagggacatactgaggttttatgaaacactcactgatgtgttgaactgtaggattcgtcttcatggtatgagttttatcttcaatatgtttcataacatttagacgaatttacattatgttttttcttgagtatcaaaagaaaataatgcattaatacattataatatgtaattttaaaaaaaaaaaggaagaaataaaataatagaatatttcttattcccaacactatttattttttatttttaatttactctaagttgcaaacttgcaaattgcaatcacttacatttgactttatccttgaagattgttggggtaacgaaaatgataaaatttatatatatagaaaatttgtatggtaggaacttttatttatttattattattttattttattttttttaaagaaaacaagttcattaatcaagagaaaagtaattgtgaattacagggggaattctcttcccttgaaaaacacctgactcatggctagacaatctagctcttttggccaagccatccgcaacagcgttaatgtctctaggatcataaaagaaactacagtctgaaattacattcaacaaatctaaggctaaaagagaaacattaagaaacctccagtcaggagggggagatcgctgcaccaaggccttaattaaaaccctgcaatcagaaatgatgtgaatcctagaccaggaattctgaactgctaattccaaggcagaaagaacagcccaagtctctgcctccaaagggtaagaagctacacccgagtccagctggtacatccaaggtaggaacttttattcaggcccggccctgggcataggcgggctaggcctgtgcctagggcccaccta

SEQ ID NO: 377747 - DNA, 8358 bp, Cannabis indica
tgaataactctaattaaaatcccagaatgtttctcttcatgatgattaaccaaagtttctggctttatatcttttaacaccctctccccattgacaaagccactcatcaagaacaaaatagcaaaaaccatccatgttagtattgccaatgatgccttctgcttcatgatcaaatattgcttgggaaaaaaaagaccaaatatcttttagctagatagatatatttcttctgttgatttttgtttttgattttcttcttctgtattaatttctattgaatgagcttacttctatgttgctactactactccaattagagcccaaacaatggagtagttaatgtatatagaattgaagagtgattctttaaagtgacatttattatatctatctctttctatgaatatatatagttattttgcataattttgttgtctacggattgttcgtgagtgatgaaaattaagaattaacaagtgaaaatagaaagtgggaccccaatattttatctaacttgtttggtcccaagtttatatttcagctgcaaaaatagctttgaatctttataatatgtactcattcttacttgtaatatgttagtacttcttgtatttttctaacacttagattaaaggtacttgctaattgagaaaaaaacattcatgtactcaatttactcagtatggcctttaattaactacatttttgtactgtgtataaatatgataaatgctattatacttattgatataattatatattatcttttttttttttgagtgaaaatgtaaacttcattacttaagatcatccaaaaccaacgaagaaactacaaaaggtaaagaaaaacaattaaaaatacgatcagcctcaagaagagaggatcgcgccaaacaatgcgctaccctattcgcagatcgctttacaaaacaaagagagatgttaccaatctcggcatataaagccttacactctgagattatatggccataaggagagaccatatttttattaccttgaatatcagagataacccgtaaacaatccgattccaaaataaccccattccatccattggtcttgatccaactcaaggcttctttgattccaatagcctcaacttcatgtggctgaagcgagcccattttcagcaaagtaacagcttgaatgaccaagcccgcagcatcccgagccaccaaacccactccaaaacgaccttccaaagcaaagagagcgccgtcgacattaactttgatgttaggaaggtttggaggataccatttctccggccaagtactatgaagctctgtatgaggttcggactcgaatcgttgtgcattgcaccagtccgagtagttcacttttgctgtgtgaatcacctcatcaaaagaaggagaaactgaattccacaccacctcattacgaaccttccataacgcccaaagcgtcattgccgcctccacacaaacagcctcactccaccttgagaatccctcttcaaaccagctgccaaaggtcatagcagcaggggccacagtcgggacagcagtatactgccagcagcttttggcaaaattacaccgcaccagcaggtgcaaagccgtttctggtgcagcagaacataacgggcagctggtactaatttgcacatgctttatggaaagcataaatttggttgggagacaattggtgcacacacgccataagaaattaaggactttaggaggcagatttaatgtccacaccttcttccacagatcagaagaaaaattatgggagagctgtccactttgcccatgttgcaatctatatgcactcttcacagtaaacatacctttactatctttccaccagaaccaatcatcagtagaactagcctcagataaagggatcttccaaacaagagcttgatctctatcatttaaaacatcagagataacctcactatcccattcaatcttgtccactttcatcaaagagttgaccaatctcccttcaagactcgggtgggacgtttctataaaaggattagcctcatccataagccaaggctcacgaagaatagcaatatttgacccattcccaaccagtcttctcgctcccatttgcaccaatgcttgagattccaaaatactacgccaaatgtagcttgggttgcttccaatagtagcagtaagaaaagtaccgttgggatagtatctagctttgaagattttggaagccaaatttcccccccccacgagtaatctccaaccttgttttgctagcaacgaaagattgaagtcacgaaagtcccgaaaacccatcccaccatcaaacttatgagaagccagtttatcccaactcatccaatgtattccgttagagttattagacttccaccaaaatctactaatagcgctttccacttgttggcaaatactcaaagggagtagaaacatattcattgtatacgccggcaaagcttgaacaactgcttttattagaacttcctttccagctcttgagagaaatttattatcccaagtctgaatccttttttgcaccttatccaccacataactgaacgctaaagtcttatttctaccaatggagctaggtagcccgagatacttgctattttcctcagcctctctgattctcagcctttgacagatagtttgcctcattccactattcgtattagtactgaaaacaacagaggatttgccaaaattgactctttgccccgaagcattagcaaagagatcaagcaagtgttggacattagaaacttccctctccgtggctcgacagtaaataaagctatcgtctgcaaaaagcatatgtgatacaacaggagcaccattagccactttacatccatgtatgagcttcctttcctcaaagctttgaataagagctgacaaaccttcagcacaaatgagaaaaaggtaaggcgatatagggtccccctgacggagccctctactaggaatgataggccccaccgtatgtccactactgactatgttataagagaccaaagaaagacatccaataatcaatcggatccatttatcattgaagcccagccgaaccatcatagccctcaagaaattccaatcaacccgatcgtaagctttgctaaggtccaacttcaaagccatacacccatctctacccacttgttttcgtttaaggtaatggaggacctcaaacgacaccattatattatccgtaatcagccttcccggaataaaagcgctttgattcaaagaaataatgtcgccaagtaacacctttaatctattggcaagcactttagttataattttagcaacaacattacaaagggagataggccttaactcactcatttgttctggtttcttcttcttcgggattaggacaatgttggtatcattcatcccaataggcatcacctctgacataaaaaaattcttgacacaagcaatcacatccgaccccactatatgccaatacttttgaaagaactttggattcattccgtcaggacccggagatttatcaggatgcatttggaacaacgcatctttaacttcttgatcttcaatcggcctagtgagcattaaattttgttcttcattaacctttggttttacacaacttaaaacctcatcccatctacccggttcagcagtaaaaagattggcaaaataatccaccattaattcccccaagccattatcccagcctttcgagacccccattgtgtctttaagacaaacaatattattattacgtctacgagaggaagcctttgagtgaaagaacttactgtttttatctccattttttaaccacagttgcttggacctttgacgccaaaagatttcacgctggtttagaacctcaaatagctgctgtttaactgccgcatactgctctttcccttcaacatcacgtcttcttttaagaagcttaagttgtctattacactgcttgatacttgaagaaaaattcccagcaaccaactctccccaggcttgcaaatccgatccacaatgttgaattttctgcactagctgatcgccttctgaatggctccaactctgcctaataaccgcctcacagtcttcaaaacgggtccagaaattttcaaaacgaaaagatttaaccccagtagcatgaaacgaatgcataatatccaacaacaaaggattatggtcagatggagacacattcaaattaaagactttagcatcagggtaccgagttaaccaattaaaattgaccatcgaacgatctaacttagcttcaatccaagccggagtgtctctgctcttctcccaagtgaaaggatgaccctgtaactcaatatcacacagaccacaatgctccaccacctcctgaaagccctcaattagccatctcgggtaaggattccctcctctcttctcactttgatgcagaatgttattgaagtcacccataatgcaccacgcctcttgatgccgaccatgtaggactcgtaataactcccaagtattctccctaagacgtcggtttggttctccataaaacccagtgaatcgaaacttcctttgtccttcaaaatgaacaaaacaatcaatgtggtttatcgaaaaagaatcaataaccacttcctcttcatttttccataaaagtgctaagccaccactcctcccctgagaatcgactacgaagcatccctcaaactctaactttctgctcaaagcaactatcttttctttattacttagcgtctcacataaaaacaaaactttgggccttttctgatcaaccaatgacttaaggaactgaatattacgtgaggggcccagcccacgacagttccagctgagtattttcataatggtaggcgagccccaacaccaaggcccgccccatatccattttttgagagtccaatactttcttgggcctgtcccagctgcccacctagtattccttctccaactttcctttttttgctgtcataaacaaccaattcagcacttcccttatttaaattctcctgctccttattctttcccttattaacgccattgacttctcctccttcaaaaccatcactatcctcctcttgatcattctccctcatagcactatcaactccatgatttcctccttgatgtagaagattcacataggcttgatttgcggctgattgatttggatgatttgtttccaaatttggttgctctgaagaattgtgtccaggatcattgaatccagtgtgtacctccggctgccaccctctgtttcgcaaccatctcgccccaatgttcttgtgagtcctttgtggcaaggctttcatgaaatctccataaggcttaacaatttgatctgaaggctgctggaacaacttactacagaatcgatccgagtgcccaattacaccacaaatgaaacagaaagtgggaactctttcgtatttgaaatgcacccaaaaccagctaccatcatcccgagtcaacttcatacgcctacgaagagcttttctaatatccaacgtaacccgaactctgagataatccctccacactcctatgaaattctttgggtctgattctatgaactttcctagcgcattggccacccctttcacagtcccttctgtcatacatcccggcttaacatcatggatttggatccacatgtcaaggtgattaagttgtatcaaatgcggatccccccctaccggcaaacgttgtatgatcaattgcattctgtcaaacgtccacggactgccgttaatgactctcattatatcaacttcatgatagaattggaataaaaaccgattgtcgtcaagttttttaacaaacattcccatccctggttgccatagcgacgccaagatattctgcatcttatcgaaatcaatcatacgatttgataagaaccttcctacgagacaccatcgatcatcgataccctcctcatctccttcccttcctactggaaccgcctccaagtcctcttcttctaactgaaaactgtagacgtcctcagcaacccccctcgttaccccacttgaacttgccataaaccccacacagaatcagacaaatattactagagaagacaaaaactaaaggactttcaacaccatgtcagaggacatgtacttactattatggtattttaaatttccctttagtcccataattatatattatcttatacatattttaatttaatatttattataaaaaacttttaattattcgcaaaatgtcaccttttaaatatttttagataactagtgcctaattaaaatgttatatgagtggagctttttcaaaattttactgttggaatctttagggttatgaaattaatataattaaaaaaaatggtacttttttagtgtaatataaagaaaggattcaaaacattccatatataaatgaagtaacacacctttaaatatgccaatcatttgagacttgggaaaataataagaaacagccaaaaaagaatcacagttcaaaattagtactataaagaaatatggaaagagtaagaaaacataataggattatattttcacaacacttgaaatttcgtggaagttgatgtactattaaaatagttgaattatacaatataattgaaaaaatgtcacaccattactaaaccttgtttattatggtttaaaccactgttttattatcttatggttgccaacaaatgaatgattttaggtacaaaatcaaaatcttgcttattattaagttttaagtaaagcaaaaggaaagttcctagaaacttcaagccgtacatctctataatatgaagcttcatatcatatggctctttcttctgcaactgttttaattttatcaattactacaacatttggattttgaacttgcaaacaatttcttcaaaaaaacagaaaaagtacatctttagctcctcccatttttctaacgtctttcttacagattcttcgctctattgtataaatatatataggatcacaaaaattactccaataattaagctaattatatattagggtattttaatttttaacctttaaagtcttttcattttaagagctttcatgatagtaaaataaaagaaagaaaaaaacaccatttagagttgcttttacaatccaaaagcttcttccatatgtttgtttgttttcgttagataaaactctattttaggaattttgctacaatgtagctgttgaactctttatcattaaatgaaaataatcaaaccctttatgggaaaagaagatgagaaagaaagaacacttgaatgttaagggaaaatatgcaattattgtattatttatttacacttttgttaatttgactgcaatatcttatctgagcaaaaatcattttggtatgtcaaaggtgaaattactaaaatggtgagggcagtccaaaaattattaactaaaacattttcttgatccactgtgttctgttgcggctaaaaatctacattttttacaagttagattttacagcaatctttacagcacatttttcttttcccatcaatttatgttgaacacataaaatactaaaaataaatgggaaattatagtaaatgatcccaaattaaagcactatgtaagcaaatgtttttatttcaaaactattagagaaatgacccctttaccctatttattatttatatggtcttttgccacataaaaaaaaataattttcttccatatttgttttagaattagaatcaaattatttaaagatcatgatatatctttattagttttattaaaatttcttttattataaagttatgtcgattttttatgggttgttggtatatatatagattttattgtacattatatttttattttgttctatgatatattactattcttatatgatatttatttattattttgctatgtataatagtagtatatattcttgttagtataatataaatattttaatgtatgtatataattttattggtatatgctatatatatttaattattatttttatatattttaattgtataatatattaattatttgaaataatatttaattagttttaatttgattatatataatggtggtatatagttttgttatcatgatatatatatatttgaattatagtgtataatttgattagtatagtatatatatatatatatatattactaatatatattttattattattgttagtaaatatgttttggtaaatgatatatgtattttttgttatacggtatatcatttttttaaaaaacttaacgtggtaaatccaacatgcaagtatacgtaagttttaacaagtaatactcatgtaagtgagatcgttcccacgagga

SEQ ID NO: 377748 - DNA, 4878 bp, Cannabis indica
tgcccatagcaaaattgcttcctccaaagcatcccgttcgttcccttttcattttttcttgaaaatttttacaattttaccaaaaatttatacttatcctttatttaccttttttcgtacctaattgattttgcatcttcaaattaaatattttttttaaaataataataataataataaataaagaagaagaaagttgagaaagtttggcataggttgttggactaatgggcctcatagcgtggcccattctaatggcccaaaatataaatccattctaatgggcttttttgtacagagaaaccgttgttgttgatgtcgtcatcgtcttctacatcctccgtctttgttaatctgtgtatctttgtagctgttaattgactgagtgagaacgttggtgacaagattcatattttctcgcactttctcggtaagcaaacagcgggtggaatcgaaattagagacctgaatttggaggtctaatggcggatacggtctcagcaccacctagatctgccaatgacctctttgcagacccgctcgacggtcatcccctctggttcaagcccgagctctttctatctcccaattttgattctgagtcttatatatccgagttacgaaccttcgttcccttcgacactctccgatccgagctccacagccacttgtcatctctcaatcacgagcttatcgacctgatcaaccgcgattatgccgacttcgttaatcttagcaccaagcttgttgacgtggattctgccgtcgtgcgtatgcgggctccattggtggaactcagagagaagatcgaacagttcaggagctctgtggagggcgcccttgtggctttgaagaatgggttgaagcagagatcggatgctgcttccgccagagaggtcttggagcttttgctcgacacttttcatgtagtctctaaggtacgtctgttatagcatgtgcttacttccctttcagcttcgtttgttctgacattttttagtttgcctagactaaatttttagtcaattggaaaaatgggttggtatttactcattgttaatgatctattacctgtgatttaaaacatatggagtagaaacagagaacttattgatcaacttcaattttgtcttatcaatcctcatggtttataattttgtaaacttttcagtctttttctataaattgttttatgttcttgagaaataaaagaaaaagtgtaagcatttcttttttctgttagaaatattgaaaattaagctcaattagtcaagtatatttaatttgagcttcttgatcttgtgcattgattctatccaaattctatacaggttgaaaaactgataaaagagctccctagtgtgccggctgattggtcaaatggagatgtaagttctacagagaagaacttaatgagcaatgggacttccgtacaacatgttgaaagtggaacaagtttgagagaaactcaaagcatgcttttggagagaattgctagtgagatgaaccgactaaagttctatatagctcatgcgcaggtcttcattactctcttaccgtgtcacattttcaatttttacttcatagtttcctccatgtgtttttctatgttctgaagtacaatctttttgcacgagttctattagtattcatgtgttgtttgttcaatttccccattatgtaaattaattgaagactactaattaggttgctttcttcgagtttgagagaaaaagttcatgctgtttgaagttaatgaggcttagtaaaagaaattcaatagattcgtcaatacaatgctgtcttagtagttgagcttatgttgtatcagttttctaatttgtatatatgtcaaaaaatatcaataacttactttcattgctgtgggtatttttgcattgtattattgggtgtgtttctttatcatgagagccttgttccaccatcatcagtacaaacaaagatatccagttttgttagtttttccctaacatagcgatccttgattgttcataggacctacccattttttctcttcttaggtgtttgcacgatctttgctcattggttttctctgttttgccagtacagaacctacctttcattgaaaacatggagaagaggattcagggtgctagcttattattagatgctagtttgggacactgttttgtggatggactggaacaccgagatgcaaatgcaattttcaattgcttgagagcatatgcttccattgataacactaaaaatgcagaagaaattttccggacaacgattgtggcaccattgatacagaaaattattccatatggaccatcatctttggctacaggatcaaatgaacttgaaagtgattacgtacaggtcaatcaatgcattgatagagattgcaaatttttgttggaaatttcttttgaaggtattgtattgcttttgtgcccccattagcttagctgaacatttattttcactcgttgctgcaccagaaattttgtcatcattatgtgctattctgctgtttaagtttgtttattttggtgctgttcttgcgcttggaacactcaacacattttctagtggtctagtattatgcggctttctttggaaggtagcaccgtttttacagaagttgaaccaaattggcctgagttttagcagtctagctgtggttctagacctagtaaatgtcaaagtgatttgtaaattttttatgtggcttggtaatgtaattttatcatcacttttccatcctgtctgccctttttatattttgtagttatgacattagtaaaggtttattcagaagtatgccagtatatttgatgacaacttgcacgcgctaaccttattaactagaatatctcacaattgaattgttgtgatttcttttactccccagaaaattcaggtttgcatgtatttgatttcctggccaattctatccttaaagaagttctcactgcaatccaaaagggaaaacctggtgccttttcccctggaagacccacagaattcttgaaaaattacaaagcaagcctaaagttcttgtctcatcttgaaggtaggtattcaaatcctttatttcattgtacttaaaagtatgccatagacctatttgttaatgcactgccgcactatttacatgttttttttggggcctaatagttacatgtgtctgagagtaagctataaacatctgattgttatgcaaggttattgtccatccagttctgctgttgctaaatttcgagcgcaatctgtctataatgaatttttgaagcagtggaatattggggtttatttttctttgaggtaattcctatgacagtacattgtctatttctctttgaggtaactcctatgaatggtgatttacagaactgtaagaataccacgaactgctgttaataactcaacttttctcagatttcaggaaattgcgggtgctctcgattctgaacttgtggctgccagtcttgttcctgttcaggattcacagtctagtcacagaaattctcaagatttgaccttgaaacaaagtgttgctttgttgaattgcatggaatcctgctggagagaagatgttcttgtcctttcttgtgccgacaagtttcttcggttatccttgcagcttctctcaaggtcaatttcattagtaactttggcgtgtgttatacttatttaactcatgcttatgcttgaccaacatccccacccacaccagaatatttgactatggctttataacagatactcaaattggctatcagctggactggctgctcgtacgtctgctaacaatgcaagatccaacagtggatgtgaatgggctattagagctgtcccagatgattttatttatgtacgtaattcttattttctaaaaatctacttgtcatttgtggcacctgtcaaatcttttaatttatggtttatccttttgacacttgtacaaaggaaagtggtgggaaagtccaaaatgtcacacttctggattctgcaactataagcgcactagatttcattaaggaaaataattttgctcagaaaagaatcaaacatgaattgacaacttatgtttgcaaactaatttaatagatattatgaataattgcagattattcacgatattaaatgtttggcgaccgaggtttctggagattacttgcaaaatgttcttcagcttctttccccgtgttctagtgatgttcttgctgttgtaaagcagagcgttttacaaggtggaaaatccttgaatgatttactgcctcaagttgtcaaaactattgttgaggcactagttgagaagtctgttcaggtaacattagttaggatttggtcccacatgatgtaatatgaatgagtatgtcatttatttcattttatgctatactggttgatgtcaagtatgttaaatttttatttccatgttcaaaaatgtaggatttgaaacagttaaaagggataactgcaactttcaggatgacgaataaacctattccaaccaggcattcaccttatgtttcaggagtactgcgtccgttggaggtacatgaactatagtttctttaataacaacaattttatctcactaatcatttaaaagtaaatggtatattccacaggctatgtggttatattatatttatataggactgttccacttttctaaaatcttttcagtccttatattttagagcattaagttgtctaaacctctttccaattgttgtcataagatttaagtaatacatgagatggtggttaacactcaattgagcaacttgtgtgagcttttattttaggctaattagcaatttttccccccgaactttgacatgtactaaatcgtgccccctgaacttttttggccgt

SEQ ID NO: 377749 - DNA, 2019 bp, Cannabis indica
ctgctatgacagttatgtcaccacactgtccaagacctagaaaaggggccctcaaattttgaccttcaacaacagagatccagatcaagccattgcgggggaatagagataaattgaacaaaaacaaaaaattgagtgagaaagagagaaatgagtatctaattgtaatttaagcgaagcttcatttgaacatatatgaactgttcttgacagtttctatctttggtgaacattctcaatcaataaagatcaaagccttaaagggttctttctggtcgtggagtaagcaggataacattctgttattcgtgttcgaaccacgtaaaatctatgtccatttatctttgattgttttagttcatattatttgatgtagattgagttctacactaattgatctactctgttttgtgttttatcattatgttcttgttcgagtcatcctcaaaatcctcatttatatgtataactcatcatcacattagcaaattggttagaaaatatgagcaaaatgtaactgaaaaatatatatttacaaaaaattatataattatgaagaatttttgcaacaaaataatattcagggtcaaaactctatgataatgttcggaccaagggaacaacattaatttcctttaaattaaatttaattgcaaaaaaaaaaaaaacttaaatcaaattaatcttgagagcaacatttaataaaaattaattaaataaatatccgatgggaaaaccagcaaaaccgtatctatgtaatgtgtgatgaaggtatgaattttctaaagttaggaaaattgtgattgaaaccattaaatcatcaacggttctgatctctgcttagtttgcaaatctctaaaattgtgttggaggaattttcaacgtctgtgatcgcatcattttggagcctctggatagatgttatgaccgccgttgatcttgactctgattgaccatcatgatcacgatcacgaccatcgtcttcatcatgagcagcatcactagcaagaggtctcgcagatgatctgtagtcttcaccagtcaatcttggccgtttattcaatggcctaactgaagatgtcgcctcatcattagcctgagaaaagaaaattaacttctgtttggctctcaggaaaattttaggggaaaaataaattacaaagtgaaagatgatttcacttacatcagaatgcagatcagcattttctagccgtcgttttgaattggaaaacctatcctcgtcgctactggatgaagattccgccataggtggtggtgacgaagatgaaaacgaccatggaaccacctggttctctccttcctcatcaaattcatcttcgtttagactaaacacaccatcattgtaatcatcttcatcactaatatcggtttcgttctctgtatcttcttcatcctcatcctcatcatttccgccaccactttcatcaccgcgaccttgctcaaattttctgttgtgaaaatcaacgcagctttcgcagacagagaccgtgggagtaagcttggcaccagaggccatccatggagtcggaaaattgcaaacatgacagaggagactcctggagtgtttggccaccaagaaattggctccgtgaactttctcatcacagtcccagcataagcttgcctgatccgattcacagtacatcctagctcgtagcccacaaagttcacaatctttcattttgtttgttggtttctctctttctctctctctaaactttttctctctttcactttgtgtctctatgatcttggagtgtagaagaaatatatggtaagatgggtaaaggttttattgaagaaccaaaatatttttggttatacttttttagtcgttttgcttttcataattctggatattttggtcatttcacagttttgttgagttgctcttcatagttttttttaggagagttctatttacatcccataaaatgtaaaatgcacctattattaaaaaaataaacttaaataattttaaaaaataattcttaatat

SEQ ID NO: 377750 - DNA, 3657 bp, Cannabis indica
agaggccactagtattccaaatctgacaatgccatcacaatcccactaaaacactcaatcataacaaacctaaatcacttaaataagtacggaacctacggacagtgaaaacctctaaatcaaggaaaacggctacaaatccatttacttctgaataatgtaaggtcaacctcataatttgattttcacacttgataaattaaagactaaaggtcaatggaacttaccttcgatttcagagatagaaacaagccttccatgaccatgcagtagttgtctcagtgtgtttgagtgacatttttcaatacatcgggcccacacactgtccaatttttcggagtttatgcatcgaatgatcatatttccaactgtggcatcatcacatgaagctgttgagataccaacatccatatgtgagaattttgaattgaaacttaaatcatcattttgtgaagagaaatttcaattggaattggaattaccatttgcttttttatgacgaacaggagaagttgatttatgaggcagatattgaacatctgacttgtgtctgtacagattagcttctctggaagcacttgatggatcatcatcagttgttttatagctctgtctcctactgctacctgaatgattagggtcaggagaaggcactgaaccaagttgtaatagagtagcagtgaaccacgttgagcgttcacttgatatcctgagctgtttctcagcctcagatagaagcttcaaagcatgctttaatctctccagttctgcttcagtcactaaagtatcaccaccaaccacatagtaagcaaccatcaagtcacaatgtctcaaacaaaaaaggaaagaacgaaaagaaaaggaacaagattagtctgcatggccagtaaacatatattggtgtatgagtgtttgaccatgtgtgctatactgtcataacggctacaatttggtacattgtttgggaggtctggaatttggatgtttccgacaaggcttacaaaaggaatatcacttttcagtcaacgataaaaagtacaagtgtgcctgagctctgaggagctattatattatatataaggttcattccaaaaccaacggtaaatatccttctaggaaatataaaaagtgaaaaggacagaagttaacaacaatagccaacctagaatgatgctttacttagtaaaggtatcggtagaagatgggtgcactatatagatgccattcaatactcaaaataaatgccccaactaccaaataacatcaacaaattaaatcatcaaacgcagaaaataatttatataactgattaatgtccaactaacagtcaataaatattcttatgaagaaaaaaaaaagaaaccaataacaatgtatctagtctaggtaatcatgatgttgcaattacaattcgctatatattctatgataaaaataacagctttaatagaataaagaatggagggagtaagactcacaattccttccaccaaacaaagaattgcctttgctatcaatcacgttgtaagttccagcaattatatccattattaggctggctagttgagacattaaaaccattggatcaacaccagagtccatcaattgtcgggctcttttcacagtttctgcagtatctgacgacattgctaactccaaaagttccaacagcttctcatcagaaacaactcctacctaaggaagacagcagagtcatttaataagcatatattgacattcaaaaaagaaagaatttaccagtaaaatttcatttatactcaaatgtttcaatcacatcgttgcaataatatatatcgagacgaaaccattcagagagaacttacaagttcattcactagagatttggaaattcttttccccagtaaactcaattgttctaacattgtttcagcatccctaagtgaaccatctgcattcaaagcaattaaatccaatgcttccggttcaacatcaaggttttcttcagcagaaatattcttcaaccttgccaggatgtcagtatctttaattttgttgaagagatacctctgacatcgagactgtatagtacgaggcacattgtcaagatcagttgttatgaatatgaacacaactcgttgaggtggttcttcaagaaatttaagcaatgccaaccacattttggagggtagcaaatgacactcatcaatcacaataactttgaaccgtgaggagcctgatgaaggccccgcagataaatgtttcaatacatgtctaattctatcaattcccttcttattcgtcccatcaacttccaacagatcattgctcttaccggagatgaaatcagcacattctctgcagtagccacacggctttgattcgcctggagccaagcagttcaaggcagaagaaaatatcctagctgctgatgtcttcccagtgcctcggggaccctggaaaagataaacaggggcaatacgaccttttgaaatggcatttgtgagtgactgaaccacaatactctgcccaatcaactcaccgaagaacattggcttgtgcctttggctaaaacttttattactttctggtgtcccttcctcttctccttccccattaagggcaacaatctctaagccatcctgacttctacaactagatgaccaccttcgtccgtccaatctgctcagaccctccaaatcaagctccccgaaatttgtggatagttcatcatcactccttccagttcctagagatgaccctcccctgccatcggcactactagcaagcaatgggagtacaccttgggcacttctcaatgccatccttcgtttgttggcgcctactgatgcccgacggcgcctaggatagatattctgacttccacacagtatgctactacctgtcctcctcaaagtatcagaaaacgaaggagagtaacaaccacgacacatgcttctatgttttggcgtcctcttggaccaacaaggaatgccgcatccctgacgaccaggcaaatccaaagggtcatccacctcgtcatccccatcattcatggaagttgtggtaccatcccaagatccaacagtactggggttgcgattaacatacctattataagaactagttgacaatgcaggagtgctgtaagtgtaagatgagtcctctcttctactactccgtaagaacttagaggaggggtgagaccaattcttgtttttaagttttaaaagcaatggggaagctcctgaaatttgtctaatatcttctgaattgcagtaatcctcggtgtcatcagattggtcaacagagtcatcacggcccaatcccaaagccatttggggatgactatcgagcagccttctcgaattcactgagtttctagctagtatcatttccttatgtcgatatttcgacaaaacatccaaatgggtatcgattttcttatttcttttctttattccacccgttcttttgatggatggggaccccagagaccccagattcgcatctctacgtctgaacagcatcgaggagcgtctgtcgcccaagtaggtgtcgctcttggcatctgcatccttgccattacgcgcatcgctaaagctatcatcaagactgcccccggcaaatgaagacgactctgcaagcccctcatcatcatcatcgtcgtcatcgtag

SEQ ID NO: 377751 - DNA, 2262 bp, Cannabis indica
cgtatcacattgtaatttgattaactcgcgaaaaattgttatattaaattatatataagatcttatatttaattatactagctagcattctctcacatgagaaaacatatattaattttagtttcttgtcacaatcaataacttacacctgaattactaaatggccacatcagctctgttctggttacccataaaattgttaactacttttcctaaattatatctatatcaatataaatataagatttgtcgtaagaaaaccgcaagtaattcatctttttttatatatatatatatatatatatataaatatataataaagataaatatatattggacagattgcagtactattgcagttttggtgcaccaatgatccctacccttagctgagttctgtgtttgctcaaaatgtttggctaattgtattgataaaaaaaaattgaaatattaacaataaatataaccaattattaattgtgatatcataagacaattttcgtaatttcatataatatatgaaaactatgcataacttcgtagacgtagcctaacaattaagtgtgtgaatcgtgtaaatttagtatctttgtttccttctttaattttgtttgttgcgttggtttcttttttgtgaaaactcattaatatatttagtgtaaaaaatgtatgtataagtcattaataattatcaggaagtaatgcatgtgttagaaaatttgagatagtcctttttcagagatttttttttgctaaaccttttcgggcttttattaatttgtagactattaatattcagaaaaaaaataatagtgtagctagtgccattagaaaaaggcttgacaccatatataagaagctaacaataattaactcgattaaatataaattgcatagtgtatagatatacatatatgtatataaaatatggcggtatatttagtctagaatctcacctactttttcatcaaaaagggtaagcaacagttttgcacgcacacataaaaattatatgatctgatcgatttcaactaccctaagttttgtattaatagtcaatatatttgactgcagttaaatattactgaaatatttttatttttgtatcaaataataatatataaaataaaattatatgtaaaagagagcaagaaaaatgaaacattgacattttcttttgtcaattttaagaaaatgttaattattattattaaagcttgaaattaattaagtctgcaataattaaattaatcatcaaaagcattaacagataatgttttgttattaatctctctcaactgtaactgagacagctgaaacaccctatataacatttcttgaagtagtgtgtgagaaaaaaaaacagtatcatacatatgtaagtaattaacatgttataatatctaagtttcattgtataaattagataattaattgaatgcccaattgattagtttcattttctttattgtttcagcaaacctctctgtgcctttattttgcttaatatatattagatatgtaacaaaaaaattgaattatatgtatatgcaactcaactcaattgatattatatacatataaatatatatatatatatatttatatacttattcatcttttcttggttgtgatagtgaagggccggggtgttatgtcaaagtgggtggtgaaagggagggaaagcagtgtactgatcactgtataatttggaggtgtgactaaatatataatttatatatatattaatgcaattattaattaattaattttcttagatggtaaggaaatggcactagtaccatccacctgtttgacccgtattttatggcttacaagtcgccccgttgttctctcatccccaacctaattttcttaccccctcatcacttgttatagtttgcaccaaaacccagggctgaactacataacacacccacttgagaatattttctttacatatacaactaggaaacagtccgcgcttcgcgtgcggtataagaatgttggattaactatgtaagagtgacaaaatcgtattcgtgttatatattttagttaatatgcttttatatttcgtgtcagatgcgtcaattcgtttttaaactgcatctaattttcttaatcctaacccaaagcataaaaaatcatattatattcgtgttaacctactttgacctatttttctattactggagttaagaaaaatgtagatgtatctattaaaaaacttatatatactatgtatatatagtttttata

SEQ ID NO: 377752 - DNA, 6688 bp, Cannabis indica
ccactaactataccaaatacaaatctaatataagtgaattgagatggaaagttttcagctcacgagcattcatatcatacataatgaaagttttttctttgaggaaaaaacagcattctctccatatggtaacagtgcatttttggttaatttcaacataaaagtaattaagttctgattgactattatctggattctcgttttaatctttcattaaaaacaacaaatggaaaatagaacaagtgaatctcaccgatttattaatatgccaccttcagcttgacccttttgcagaggcaatattggagactgataaagatgatgtttgatctggaccacctactctaatagagtccggagaatgtgcagtagcaatggataaaccgttctgagaaggctgtggtgaagtcaatttataagcattttcctgagacgcgtgcatgttgaccttaatcctgtttgtccaagaaatatcttttagaattgccataaatgcctaataaattaaaccaaaagaagaggctcttccttgatgtagattaataaaatggaatgcaaatgcaataggcgacgacggatcaagcttaaggaaacacgtgtgaccgacatgttatggaagaaaaatggttaaacttttactttacctattatggatgttcacatactcatccgtttcatccaatatctcctcctgaaagaaacaaactgaaaattagctctgatctttcagaatgaaatacaagaaggacaattataacaatctgcagaagtagaatcctgatctgctcagccagtctagtcagtaggattctagcttattaatgaaaccacatagaatgacaggctccacaaataacacactgatcgggcatggccatgatttgcatttgtttcgaaaaataacatttacctgaagaagttcttcgataacatcctccatgctaattactccaacaacttcttcatcaagtgaaaaatctggaattggagtattctcaatgtctagaatgcaataggaacaacctcggtgtcgtttcttaaaggctggtgtagatggtggacttttcttcatctgtcctccactgcttttatttgtttgagaatcatgaaaaccaaagttttcttttgcaccagaatgggccaccaccttatcatctgttaatccagcaagcaaaccaattcacacagattaaggagcatcaaaatgacaatgctaaagtattaataaaattccacaatggcccaccaccttatcatggtgatttctcgaccaattggattaacaaagatgtagaaagaaaatagacaaatttgtgcactattttacggcatgcactcaatttatgctatttctaagaaacgttgcatcagatctttaactataaagaaaacatattacaagagtcacacaccactcaaataaatctcattttctgatcccaaaagactttgtagttatctaaagcagggtatatcaaaagcatcttgcagagattcaatatgaattgtgtcaagacagttagtacacctcacgtcagtcaccttcatctatctaaagatgagttcccgcagacaaagtaagagaaaaacttcatggttaaggtgtcttagaactcagccatgttgtgcattgcaatgttgagggaataaaaagcagattgttgtgcatgtcaaggctttaagcatcgagacagacagcattaagtttcatgatgccaagaggataaaaagcttatcattgtgtgtacaaggacttaagtgtcacggtacctaatgcctggcaacgcaatgctgaaccgaatacaaaaaagggtaactggttttgtacaggaaagttactagttttgaccttggctataaaattgatggacaggacatttttagagagtgaattgaaatttctcttgtatacattggttgaagccatgttggagcatccaaacaaagcaacaacctgtctagtaactttgactatcataactggtttaaagtaaatgcttaaggagttttatactaatttgacatcataggaatatagatagttgattaagtaaaacatattggcatgaccatcgggaaagtcctgcaaatcaatatggtttcttggttgacatttcgcattgaggggtagaattaagtaagcgtaattatgttcaatgaaatattgagggaaaattgtagtcctaggctccccagaaatatttgtttatttgaatctgtttaaagtactcaacaacttttagtaatacttccctgtgggacagtacttcactttcactttattacctattgacatagtgggcatttgcattgtttgaaatcataagagtattgaccagtcattagacaagatatggtttcacaattgttaactaagttaagattcaaacctgagaagaatgtgacgccaaagaatattagatttcgttgtcacttcatcaagtctttgttagaggatatattgtaaggacataaaagatcctagctagcaaaaatcagcatccatgttgatgaagactatggatcaccaacaaattgaagttgtgttccacttcagttggcatgcaagcatgacacgatcaagaagatttggcacatagatcagggtgtgaagacgtaattaaaatcagcctatatatgagagattgttagataggtttgaagtacaaacaatggaggatgggttgacggccagagcaaaatagaaagaataaaaaaatagcctttggaattagaagtatgtgaggtttttttttttgagtgtcgtgtgaaacacgaactgttactcgtgttttgtcaaaacctcacatgtggggtgttcgtggtcgtcatgagacatatgtcacgcttggaacaagctgtcacttctcaactagataactaatgctactcatggcccattgagggtcaaggccgactagctcctcgagcaatgacccctttgcaccagcgatattagtatgtggtcttgtccaaagttcctcgaaggcactagctactcggatttgatgagacatgctgaaaagtaacaactaactaccagaagagcagaggcaaaatggacgcggagaccatggacaaccaaaaagcaagcatgtccaactaccaccgacaactttgcgattgtaagaggagtggacgctagctttgtacatccaaaaacttgaaaggtaagaaataaaatcaaattagggaaatggaggttaggtgcacggcctgacatctcctgccatttcccaagacacgatcgtacactcatccagttcctcttccaaaagttatggctacaggatgcgagtagaccatattccttattgaacaaaggaaatgcaacaaatttcttgcacttaatatatttttcctactcttccttgggtaaacatgttcttggcaaatatttaggataagtaatgtaacttaccctcattaagagtactaatcgcccaaacgtctataaatagggttgtgggagagacttgaaggaacaacacaatttgagcaagcaaaaatgctgccaaattaaaaggtaacatgggatttgcaagttcttactcaatatattgtctagtggactaagtcattaatgaatcacgcaaaaaaaatcattgcctcgaacagttttaagctttctaatatcattgacaaaaaacaatgtcaacactaacaatatttatcattaagcgaaagttttacaacatcatgtggaagtagccacaattggatgaatcacatagaatattattagtggattagaagttagtattttccaaggaactcgaaattccttcacaaagtgaatacaaacaccttcacaatcaggaaaaaaaaagaacggtgtctactattaacacatgataaaatttggcattagatttctcattgatgttttaaaaagtattacctttcttagacaatggcccagactggtcaattgtttcttttttctcatttagatccttatagacaacagcaatgtgactgtgacccttctgaaattcatttagaatatcatacaaaggcatgttttctgaaaccctgtaaaatgaatgataaaatcaagaataacaaaccacaccagcaaaaagattgtccaagcaatcaataagctcaaacataatttaaacaaaaaagctcaatcaatcaatcagcatcttactactatatcatatctatcattaaaaagccaatcatgcgaacgacatcgtgcctcatgattattatacctaggaatttttctcaggatcatctttctcaatggaactgcatcgtctggatcaactgccaataaatttttaacctacacaagtaacagaagtaatagataagtttaatttacaaaacaatatcaggtctttgttttcaaacaatcaattaatactatttcccaaggcaagaggaatacatctaaaagtaaagataaataaagtagacagacataatcaaagtagaaggaaacataaaaatctggtgaccttaaaaatcaagttctagaaaaatggtctttcaatacaaaagaaatgaaattaccaaaataagtccaattatatttttgggattgccagcataaaccggaactctactgtgacccatggtcattattgaattcaatgtctccctgtaatgcaccatgagagagataagtcagaaggaatgaaatgtatatagacatgccccctagtctacttttttttcttcttcttcttctctttgctgaatcactagtctacttaaacaaccaagataatatatatatcggttacttacaaattaagatttgcatccaaatcaagggaaaaagcatttgatattggagtcatggcatcttttgcggtcttttcagtcaattcaagtgccccagtgataattgtagtctcgtcatgcgttaaatctccacctttcccagcctaaataacagcgtcatatatacattaatatttcatcgatgaaaatgaataaggtggccagaggtaaatgtccccacggatgtaaacaaactccaagcatgtaagtttttgaacaaaaaagagtgaatcagggaaacacatcattccaatggaactcttaatacctcattcccatggaaattcacaaaggtcttgagctctgctctccttaaaaggacagcgtggcccttgcccaacatccaatcaagcacctacatgtcaaatggattagatcaatagaacaaaaataacactacaccaatgaacacagaaacatgaatgcaagcatttaaactgtttagtgaaccaaacaatcaagtcaacttgggaaaaacacaggttgcttggatttttacctacaatcagttatcatctatagatttagatgagaagatcaccttactgattggataagagattgggaaaaataacatgagtagaactcgaacaaatggtgccaattttgctccaatagtcaagccatagcgagtgcagactgcttgaggcaatatctggaacagaagagaacagaacatgcgtgtcattattaattttataaaccttctggctcagggaaaggaaaagcaaaacgtacctccccaaacatgagaataagagtgacagatagcaaaactgctgcccaaggaggtactaatttgtccaaaaatattggaagagcctatccgaatacaattcgacaaaccataaaaaaataacccacaaaattgaaatcaaacagtaacaatcgccagattatatccacaagaagagggtaccgtaattatacctccattgctaaggcgttgcccattaaaagcgtgcaaagcagaagatgctggttcttcactacaggataaattttagctgccaaaaaatcagaatagtcggagttaacgattaatctcaaaccatattttcagctgatattgcttacttgccacaatcgaaagtagtacgctaacaagaataaccatcaggatcatacaagacgattgaaattctaaatttccaaattcaagaagaccagaacccctaaaaacaaaagttatggaaggagtggtagtagtagtagtagtaggtaggtaagggggaaaggaagattactaaccggcgtgttttcgatcctggggacggccggacttcatgaggacctcaaggtcgacaaggccaagagacatgagaccaagagtgagaccggccatgagtcccgcaaagcatactaaacctataatcaccaatacatacaacgagaatagcgacccacaacaaggcacgtccgaggccatatcacccttttgggttttgctcaacccttcaatcaatcaatcaatgtacatatgtattataattgtaaggctagattcatatgctctcctactctgatgttcttccacttccagtttctgtcaccaaacaccaaacctttgcttgatatgatcagaattattcacaaattatattacaaaggatttggttggcttgtgacgtatttcacttatacacattttctttagagtacatcaagaaagaagagtgtaagtacaattacaaattacaatacacaaacggcaccatggtgcctactgcggcctgcccacccttttcttttaatgacgtcttctatctttatttatttatttattttactttaactatcattatacaaaattattaattaacttaggtggcatttggtaacacttttttaattaattttttgttgtttttacttttcaattttataa

SEQ ID NO: 377753 - DNA, 3873 bp, Cannabis indica
ttagtgagaatggcatagttataataaaaggataatattatgactagttattaagtaaaatttaaccttattaaaaagatgacatttatcattaaattaagtagagagtgcaaaagagagtatgatagagagtgtccctagaactcctctaaaaaaaattcaaaagtctattttaccttttatttaaatattttataattaaaaaaaataaaaataataggaatattttggttaaccaaatattgtaattaattaccattaggattcctattccattatattactattactattaccattaccattacatttctattacaccaaatcaaacatcactttattttaatggaagttgcaatcacctttcaagaaaaaaaaaaaatagaaattagctgttttttttttttttgtaaacccaaaattgtctagtgtttgagaaagagactatgcccacttttttttttcttatgggtagagacaatgacactttagtttggatccacaaaatttattttttattttcctcactgttccgtaaggtaacggctagttatttgaatattgtccattgactaaatctgccctcgcatctgactaatatgccttaattaggaaatgatggggagcccaaatgcgtatgcccgtcaaagtaataaataagtcattttacaaaccaaggggtattttggtcatttaggtatcaataatttaataaaaccaagtttaaaatcagatgatcaaactgtaacggtccattccttcgtcacttcccccaaaatttcgaatttcaaaaactctgtacaactctctctctcttctctctctttgttcttgaatcttgacaatgaggcgtagtaacatcgcagaaagtacaatggagcctcggttattcgggaccatatcggcttcttcgatccgaaacctgcttccgagatcgatgtcctcatccgcatccttctctaagaagaagcactcaaattccgatgttcgtaagtccaaatctaatgccgaaaacacaccgcctatagatcctaacatcattgaccacggtaacagtcaagcttcctctttggtggttaagcagctaccgtcgaaagatgttacaaattctcagacggagatcgttacaacagatgctcagaagcgagcgtctatggatgcagagtcgcccgtgaaggtattgaaagttgtaaaatattaaagactccgcggagttctttttttttttgtgctgtgatttttgattgattttgtgatctttatttttgcttaggttgtagtgagaattagaccttctaatgatggtgaccgaggaagagatcgaactgtaagtaaggtttccccaaatgcactgacggttggagacaggaaatatacatttgattcagtcttcgactcaaaaaataatcaggtactttagttttgcccaaggaggttttgggttgtaattatccggataagagatgaagtaatatgagttttactcataattatgtaagggaacttgtagaagtactagaaatttgggacaactgatcaaataaggtatactacatatgaaaaggacaggactgtgaatataaaatcttagatttgaataatgagaaagaattttggaaattaagacgttcaccctagcaattaaaacttacggggagtgcaaatagatataaattttgatgttggatattggattaaaagggtagtcataagcaaaataaagaactaacatttcactagctaaattatgtaatgacatacaacatgcagtagtactaggtatgaatgtttaatatgatgctactttgaataactttatacgattcttgatttgtttatgaaattcaaggataaattcatgttaactgcttttccttttatggctctttacaggaagatgtcttccaatgtatcggtgccccattggtaaagagtgctttagcagggtacaacacttccattgtgtcttatggacaggtatttgaaaattactttgtatccgacttgaactttctgtagctgagtaataattttctgggtttttcatcagagtggtagtggaaagacatacacaatgtggggccctccgagtgccattgttgatgacccgtctccttgtagtcagcagggtgtcgttccacgcatcttccagacactattcactgagacagacaaagtaagatacattactggttcttgctattgaaattgatgaaggatgaaataattttgacgaaatttaactaattagtatgtttggttttatttgtgccatggtaggagcaaaataattcggagggaatacagacaaattttcaattccgttgctctttccttgaggtagacattcttatttatctcttacggaatggaatgagaatataaaattttgctatattaataatgtttttgttttaacaaattacagatatataatgagcaaataggggatttgcttgatccaacccagcggaaccttgaggtcttgaaaaatataaatgatatgatttgttgatcttgttttctccttctctaatttcattttggttcataacttaccaagtcaaatagtaatatggattttgtctgcactgttctagattaaggatgattcaaagaacggactctgtgttgagaatttgacagaagaatacgtgactagctacgaggacgtgatgcaaatacttattaaggtaatttattattttcattctatgcaatgcagtaataattatgcattgtagtcgtagtatgctcttaaatttattattttcattttatgcaatgcagtaataatgcattgcaatcgtagtatgctcttaagttttctcttgaatatgcagggtctctcaagtagaaaagttggagcaactagtgtgaattccaagagctcgaggtcccatattgttttcacttttatcgtcgagtcctggagtaaggtatgataaaatggggtttgctctcactcataaatggaaacaattgttttgtgaaaacttcttgttgttcataagaacacaacgtttgattattcatttggtttatgttacaatttattttcatgatttccttttaacaactactagagttataaatttaccggcacttgtgtcttttgtacctattctgttactaaccatgatataaattacgcaacagggtacctcatcaaagtgttttggcagttcaaagacaagcagaatgagctttgttgaccttgccggtttggatagaaacaaagatgatgttagaggaagtgcaagggaagcaaaaagcgtaaagaagtccttgtcacgccttgggtacgattatgtggtttatttagtattctagaatgatagcatgtagtacttacagaaattgtgtttcagtagtgtgcggcaacatgaacactagtttcacaagattattcttgtaaataatagtgaaataagcttcgcgtattttaggtatcctattcttttaggccaaaagatcaaataattaaataaataaccttttcattttatagctgcaacatctttgtgatcacccctgtttgatttgattgcagacatttggttaatacactagcaaagggtcctcagcctggaaaacctgaagatgccttatacaagagttcctgcttaacgcatttattgcgagaatcacttggtggcaattctaagcttacagtgctctgtgccatctcacctgattttaagtaattttcattacaatttttctgtttcttcaggtttaaaatttccttttaccaagaaagccctcacaaagatgataaatattaattttggtgccgtttggtaatacttttgtttttcaattttttaatcacaaaatgaaagtaaaattttgtttttaaaaaatttaatt

SEQ ID NO: 377754 - DNA, 1808 bp, Cannabis indica
ttttttttttaaaattatttttgctaatttgctttttaattttcttgaggcattcctagtttatgtccgtttctcataaattagtagtgcatgtaattaggtgaatgataatttagctttgattgatgattatccttcttttatttttgatatgtaataaactttggttcttattaataaaatttattacaaaaaaaaatatatatttggttaaatgccttcctatatttttttataccactcgtaaataactagttagaacttcattttcaatactatataatattctgttaaataactttaaacacaatcttaaagaattataaactaaaaagtttttctaagtataaaaaaaaaaaaaagaattgttagcgaataaacacttcttactattaacattttctaattttaactcattaattatatacctatatgtatacaatctcaacaattttgtcttattaaatttaagaactacaataataattacaacaatttatatatttcgtttgctttcgatggcaattaatatgattttataaattaagaacaatattaatcacacggtctatgatcagttgaattcaacttcatatataataataagtgtagctagccaagcacttaattaattattgtactagtagctgtctaaatatggtggtggaagaaggtttggcacatataccctaagcccatgtattgatgcaacaaaaaattattttctagggtcatatttgtaaatttgtataatatacaaagaataggggattattaagctaacgaggtttaatacgtacacagaaaacccaaatgattcaaaataaaatggatacttacatattaattaaaaaaattagagaaagagaaatgacatgcatgggggtataattaattaatgatcgatggatatagtgggattaattatcgatggatatagtgcgatagtgacccatgcaattaaaacaataatttactcgtttaactcttttatttgacaagactatcatcatataactcttttaactgaatgtaactatattaaattataaaacttttctagcttaaaagaatgtggagggaagcatgattcattgatcaaccattaagaatgaaagaatgaatacaaacagaggcggacccacgtagaggcgaggtggggcagtcgcccaccctgaaaaaaaatataataatttttggcaaccaaactttattaataactactaagaagatatatttaagtaaagtatgagccactatattaattaatctatgacaataagaaaaactagctagcataatgagtgaattacgaggataattttagctaagtcgtcatgctgaaatctatttacatcctcttctccatagcaattattctcaactatgagatttgatgaaggccagagattcctcaagactacttttcttaacggaaaaacttcacgaagcaaattatatggagctacctgaaggatacattgttctggggcaagaaaagaatgtttgaaaactgaacaggtttatttatgtacttaagcaagctttcttgtaacaccctactaatttaggcatactatcgtgatttagatttattgtgcactcctttgctattcaaagagtttaataaaaaaatatcaatactacatatataaatactttaatcttaaatatataaatactttacataattcggcatctcgttttaaagttacaaccgttttcaaaatactatagttacaataattgtcgcctagcgactatcaaaataaagcttgctgtcctgaagatttgaacactccaggtct

SEQ ID NO: 377755 - DNA, 1715 bp, Cannabis indica
gagagagagagagaatgaaagaatgagctgaaactttttattaaagaaaaatagagtacaatagcagagcttatatacacagctcgattggagaagatgaacctaaccaactcactctaactactaactaactttgtaacaaacataactaactcgacaccttacaagtctaatatgctgcaaatgttatttgataaatttctcactcgagaaggggcattatttttcattctctgagagtatggtgtcgagaagacataagacctctatcggtgaaatgagtattcccaatttctcttcgaacacaattcctccctccacctaaaaaagataatatgttgttatatggcattagacatctcaatctaatcaaattcacattgtaaataagaaaaaaatggggaagaaatttccacttcgaagttaacttcaaattttgataaagaacaaatatttacctactaaaaagctagggtaatagttctcttaaccacacctctacagacttgttgttaatttgtcttcatagcctcgagtattaacgttctacaatcatcataactcaaattattgatgaaaaaagaaactaaattactttcaacaaaatctattgtataaaaatcaagcttttaatcattagttcaatcttacatttgttttcctatcacacatgcttttgttctcatgaaattatggataaaaagagaaaataaaaatagagattgacgaaactttttttttaatttttcaataaccaatccaagctttttacttctcttcatttaggtgtcagtattattattattttcatttttaaaaaagaaaattttattcttatacacgtaactacatattaaataagtgcaaattgtggcaaaactcctaaaattttaatttcatcagcaattaactcccaaaacttaaattttagcggtaaagcctccaaaactcatgttctgttagcatttagctattttcatccatcttttgtagttaagtaccacgatgactatccatgtatacacagggtattatccacatggacgcagtatacacatgacacaatttaattggcacacgttaataaataatttaaaataaaaatatatataatttgtgttgacaatttgaattttaattaataaataaaagaatttaattagaaacttaaaaaggaaaaccctaactgcactctccttcttctttccaatctcagccgcactctcgttcttcatcttctcctagctgctctctctcaatcgcacgatcggagaacctacacctcgaaaatccctagagccaacccaaatttgacgccctttagctctcactctcgaacctctctcagcgtggacacaacaaacctcctctgccctgtcgagggctcaagacgaggccaagattggactcgccgtgttctgaagaccccaactctatgattcccaagacgaatgtcattgtcccgtcgctattaggaactcgtcggacccgagattgcatggcatcgatttgaccatttctagatccctgatggtaaatgacgtatagatccttaccctggtctatgtgaactctatgatttcgagatccattttttttttaatgttgaacgttgactggcgctgtgaatagggatgcacacggggcggggaattagcggggagtgctctccccgtcccgtccccattaaggattttaatccccatcctcgctta

SEQ ID NO: 377756 - DNA, 3907 bp, Cannabis indica
gcatatgagacttggacatccatctcaaagctaattttgaataaaattttacacatttgaattttgtgatgctagccaaacttggcaaagctccatcattttactttattcaaaatccatctacaattactcaacctagaacacttgttcaacagaccattgggagtcctatcaatactgtccaacacacaacaaagctttatactacagtcatactacctttacctctagtttcatctagttctcttcaccactcaaaccagatcaaaatctagtattaaaaaaccaagggttctaatatcaagcattgatgaactataatacatgatccttagtgccatatcactgtaaatgaatgtggtacaaaataaatgggttttgagaaccaagttgaaagttgatggcactaaacaatgctggttgccaaagggtttcaacgaaacaaacccctggaatagattactttgatacttttcagacatgttgtgaagtccttagccataaagatcatgtttactttggtagttacacatggttgggaaatttagcaattggacattaataatgttttttaatatgaaacctccatgaatttgtttggatggaataacctaagaagtttgaggattcagaacatcctacacatgtttgcaagcttaaaaaggcattgtatggcttaaagcaagctccctacgattggtatgacaagctcaagttatagtcttattgtcatgggattcttaattcagtgtgtctaatagttctctattcttttgccacaagaatgggaattcacttctgattcgtaactggtgcaaattcaagtgatgttaacctaggtcttgtagtgttcaaaccaaccactcttttcaccttagaagcatgtttagatgttgattggacatgtagtcttgatgattgaaagtctaaaaacttggtggaaatcttattacataggattctagaaaacagaaggtagttgctaaatctagcactgaatcaaagtactagtccctctcaacagtattatggtttgacaatcaaaatgctcaatcctaggcatcaacttatgctgacatcttcaccaagccacacactttgccaaagtttaattttctatgtaacaagcttaccaatcttgaggggggatattgactattagaatacttagagctgttaagtattgttagagaggtcaaagttatgttagcttagttagctacaaagtagttgctaccaatcttgattaatcatattaagtggttaatcttgttagctcccttttctcttcttgtgtttttcttagacattacaatttaatacaacaaatctttctcattgctaactttatcaagtattccaaatgcaaaaatatacaatagatgggatgatcttacaaattttcaccaaaggaaaaagtcataagttgtgtacagtcgttttcatctctaagacaaacttcatttatcttctctagaaagtcatgtgtacaattagccagtttggtgctattatctaagcccaactaaatcttgtgtataaagaaaaagaaacaataaattaatagaaaaggataaagaaaaagccttgctagacgaagtgctcagttgggtattcatgctcatcaccattataatcataatacaatctctccccctttgatatatctctgttagcaatcagtaaaacccggcattcaccattgacattaaatctcacacacttgaggttctgcttctttttcccctctctgcataaagaagaaagcacattagctttaattacatcaccaattatgcttacaatgatcactaatcaatagtcttagtgtacttgatcttcaattccaaaacagattacttttcaagcaattcaaattctttgagacaacaaaaactcttgtcaagacttctgctagtgagaaagtaaatatctaagtatacaaacttgggaaatgggggatgagagcttacaatgtgtgattattaatgccattgatgaagcgggcaatgttactgcgcttatcaggacaaataacgaggctttttgaaggattagcagcagaaagtaatgtcatcatgctgtctccatcatcatcttcacggttcttcaagtaatcaacatctcccacatactctgtgattatagtcaaatcttttatatacctatctgcagcaacagtaaagctgttggaaaaacaatcagttaagaatgcgagctacatttatatatatacaaaggttaaactttaaagtgttaaaaagtaatgagcattataactctctactcacccctcctgtggatcaaaagcaaccatgagaggaggccattctcctctctccatcatagtcttgcacaagtttaaagtttcactatcttcttttgaaagaatctgaagttcagtgatgttagcaactcgttagaatgcattcaatgggcaaaaacaagctcatatataagggcataatatctaacaaaatgcaagaatttactgttgcttcctaccattttgcaaatatggaagcaattgttacatactagaaattgaaatccaatatgaagagcaattgtgtttggaatatacctgcattcctccacgttcaagggctggttgattagccgatcttggtgccatgcctggtctataagtgagctcattactgaactcagtgcctgtggctgttaatgcagttgctagtgatgccatttgctccagtctccttgtgggatccgggcttggagtgaatgccagcaattttcttttcttctttgccatcaccaacccgctacgctttcttttctttcgaatatctaaccagaatatcaaatgcacaattaaatttctacaacaaaatcaaaagtgaggagctgctgcaactcaaaattatcaagagttcatttttaccttggattgctttttgggttgactcttgagacctctgaattctaaaaaagtccacaattttggtttggactagtggaaatgctgcacattagataagaacaaaaacaaaaccccattaataaaatgtatcaaatcgaaatcaaaacccaaatataaataaaaaaaaaatcccagaaaaatccacgaataccgatttgaatttcagctaaatagaacaacaaaagccctaaccaaccaaatctccaataaaacagtaaattgaaaagaaaaaggaagaaactttgacatacatttgagcttcttattgtttgtgcaagtgggacaaaaccaagaccctttaggaacagaagcaaggatgggtctaaggcaaaacaaatgaaatcctttatcacatttatcacaaagaagaagatccgccggataatcaccagacccacaaaccaggcagctaacatcatcgtcgttttcggaatcagaaacatcgctactaatatcttcataactaaatgaagagctacaggaaatgggtttcggagcttgcgttcttctttgcctgaaagccatttccttggttcctctggaagatgccattgcctgatgagatcttgaagctatggagaaatctgggtatggaatgtgtttagtcagaatagtgataaaatagaattaaaagggaacttaacagccattttcgcgccctaatttggtcagcgggaaacgaattttggcgccaagttcattttcggcgcccaaattaataatatgggcttgggcctagtgttagataattaggaaaaattttaaaaatacctaaaaacttaagaggaaattacactctatatcctttttatattgtcctctttcatttttaccctcttttctaaagtctatcatttttacctctttttttaaacattgtacaaattttgcccctgtcacttcaagatactttccatgtgactctcttatgtcatggtattttgggtacaatacatataaaaa

SEQ ID NO: 377757 - DNA, 8775 bp, Cannabis indica
attaaagaagacataagtaagacttagattcttaatcattaaatatgggtagaaacatgtactatcaattacttttatttattttttactaaatttaaaacaaaatatgtatttggtacttatgtcgcgataataataaaataattaatttaaatttttatccccggaactttattatatactaaatcacgtcccttcaacttttcagactattataaatttccttaaattattgaaattgttatctgattttgttcaattttaataatatatttaacggttcatgtactaaattatcttcaagatagttatattgaaaaaaattgtctacgattaaactcaagtttttatttttactattttgtaaaatataaaatatattttatcacttaacaaaataaagagatcaatcagtaactattataaaatataaattcaaaataatatttacccaaattgtaatttacataaatgtaataatttcacacaactgtgatgttattatatgtaatgtttagtaatatattattactctcaaatctccatagttcaaaatatctcattaactaaaaaaaaaaaaaaagagaatgattattaaaactataattaagtttggttatatttcaaatatttattatattaataaaatattaaacattacctttctcatatattccaccataccaacccaaaaaaaacacctttaaggctttaacaaccaattaagagatttgtttgcttgatgacaaaggactagactaggtagctaatataaatataatatttatatattcacacattgaataaaatagagtcaccatcatcaatgtttctaattgttacaaaatcattttcaaacttctattttattatgaagataattgttaatgagtaaaaaacaccactttgttatattattacttgtaattaagtattaaattctacgtatattttaatataagaaaaagaagattcgaactttaaaattttttaataactattatgaaaacttgataatcatttgtagaacaatcctaagcatgtttaatgggagaggtaacatttataattgtcaaaatacacactcatcctaaaatatatatttttttatttttttctctcatccacataagattcgtcacctcttctaaaaattgttcatcatgttctcacatcacattaaattaataaataattttttttaagtaaaaaataactttttctaataaaaaaatgtcatgcgatcattgagcaacacttttcgtaaaattaatcctaaaaattgaaccacattgagtatgttataagaccactttaatggcaacctccacaggaaatgctctaacaattctttgagcaaattatatagatatatatatatatatatattaaatgtgattaaaaaatttgttaagaataatcaattaagcaaaaacaaatacttaaataaaccacttgagaatgaccaactacttccaaaattaatagaaagacttacttaaacacaatacaatttacttacttgatcccaccaactggttgttgcaacaatgcatggtctactcaactaccttagaactcaagttaagctaactaaacaaaaccccattttcccaagaaaaaaaaaaatcagagagagagagaaagaaaaaatgaagcaaatagtctctcttgatagaaagattcaatctttgtaccctcttgcattggcttctattctattgttaggaactacaaggttgatttttgatgggttaaagagcaacaatagctatgtattccagaaatatggaaggcaaactagggcacaacaacaacatgtagtggtttctccaaaggatcttattgatgagagttgtaatgtttttgaagggaattgggtttgggataatgtgtcttatccactttatgaagagcaaagttgcccttatctggtcaaacaagttacttgtcaaaagaatggaagggaagatagtttctacaagaattggaggtggaaacctaatgggtgtgatcttccaaggtaactaactaactaataaactctttctttcaatattgattgggttcgattatggttaggatcgtacattatcgagtcaccacagagtttctcatgttttgttagactcgtttgatgaatcgtgttgataaagtatgatagggtaaccaattgggtcatttacaaaatcaaaacccgggttttcccttaaagcatcaaacattgtgtgtgtgtttttcgattgaaatgctttgtattatccatttagaaaaaaggagagtaaagtgggtttaattaatattgtgttgatgggtgcactggatctcatcaaaacttcgcagttaagtgtgcttggaagagagtagtattaagatgggtgacctcctaagaagtcctcgtgttacacctaaaaagaaattaatattctgttgatttttcaggtttgatgcattaaaactactacaaattttgagaggaaaacgtttgatgtttataggagactctgtacaaagaggccaatttgaatcattggtttgtatggttcaatctattatacctaaagacaaaagatccctagaaagaatccctccaagaaagattttcaaaatcaaggtacctcaacaatagaatagatgaaatgtaatcactcctttgacaaaccatttcggcccgagatgagcttgttctcgggtcaaaatagcactactatattgaatatttcattatcgaaacaaactttcaggaatacgatgcttcgatcgagtactactgggcaccatttatagtggaatcaatatcagatcatgcaacaaagcacactgtaatgaaaaggctggtgaagcttgactcaatagctaagcatggtaaacattgggaaggtgttgattatttggtgtttgagagctatgtatggtggagatacaagcctactatcaatgcaacgtaaattacccttatctctatactagcactaatataatattctacactatattttctgaaaaaactatgctaaactcactacttagtacttacttacaatgaacagtgttttgttagagttttagttaccataaaacattacacaccaaagagcataatgaatcaatggctactctttcaattttgaagctcatagaattttgtttatgtattactacattacatgtagaatccactaaaagcttgttgatccgaaaaagagccctattcggaggaggtgactttttctcatcggggtaaaagaccccgtttggcaaatcgttttgcttatattttgttttctttttgagaagctaagaatcccaacttctaaaaaaagattataagaattttaccaaacggagccaaagtgtcatctattccgagatgaactcgtccttaagccaaataacaaacggagccatataacacgtcatctattattattagagatatgttttgagtttgtatcagacatacacttaatgattcttttttagcggtacaagtattcaatgtcagtatattgtaattttcgtcggttggatttcgttaacatcttaaacaagaaacatgtaagacacacctaaattattaggtctagacggaaattggagtctaaaatgaggaagtctgactacaaatttaagacactaacagagtctgtaatgacgaagttagacgaaaattacagtttactaatattgagtacttataccgttaaaaataaactcaaaactttaggtacttgtgtcaaagtgtcccttaatgttatttattagtcaaacattatgaatgattttttttcttttcttggggtatagatatgggaatccagatgatgtacaggaatataatgtgagtacagcatatagattggctttaaatacatgggcaaattggatagactccacaatcaatccccaaactcagaaggtcttcttcatgagtatgtctcctacacatttatggtaagtttaatctattccaatataagattaagcctctgactaatcctaagctaaacccaataaaaagaaatcctttttatttcattttatttttctataggagctgggaatggaaaggagggagcaacgaaaactgttttaacgaaacatacccgatacaagactcaccatcctactggggtagtggttcaagccttgaaatcatggatattattcatgacactttatcagggctgaaaactaatgtaaaatttctaaacataacaagattatcagagttcagaaaagatgctcacactacaatatatggcgaacgcaaaggcaagctcttgacaaaggaacagagagctgatcccaaaaactttgctgattgcatccactggtgtttgcctggtgttcctgacacatggaatgaaattttgtatgcatatttgttaaagagtcatcaaaatatttcataatataaaaatgactcttttccgaaattttcttactatgaagaagaagatgatcagtacctgcaagagtaagaagagaagaaaagagagaacaaacaaacaaacaatcaccacaaaagaatacgaattttttgttattttttccatttctcatttatttttcttgattcaaaaaaggttcaagagtaattttgtaccacatttgctgcataactacctcatttcatggggttctaatcaaaagagagtgcctcaaccataataaatgactataccggcgatttatataagagtagaaaaaatcgatgaaactaagtcccgttacacccttttttttgccgttatttacagataccagacccttttcttttattatttacagtagctcccattctgaatcacgtgtgtgacgagtttgttgattgtgtgaatcagacgatgaatcttggctggaattgatatcggcgtccccaaaccatattgctagctgttcatactcctttgccagcctcttcttcgaagcaaaaatgttttgtatctttttctaattagagaagagaaaatgaaaaagaaaaagtttagtttgtctgatcatcttgctgaaaagacatataagacttcagacacacatggcctaacaacaacatcgaaatctttatagagaaaatgaatgttcaatttaagacgaaagcaagacatgtaaaatcaagtgaagcctaatgctcgggcaatcgaatcaaaattgtctacatctcatagtaaatttgaatccacttattattaaagcatcataaaccaatgtcagaccatgatgaactgataaatatggcagaaaactaacatggaagatgactataagaaggaagcatcggattttttctagaccgtataagcttgttctaataacgcaataatctagagctcttcagcgctaaagtcgtaaaggctagtacaaaaaaataattaccatcttttaatagacatatttccattgagtgaaatcttcattcaatcaaataaattatacatttgtaagaaaaaaagactggcaaagagaagtaccttgtatgacccaagctttcgagctctacgagatatggcacgaagagtgctatcatctacaaggacacaactctctgaaagcttcatctcatcgcataagtcgatattttccatgcaagagtcagaaacatcagcattggagacatctgaatattgtttaaaatcgtagcaagatgagcaacaggtaacataggtaaaaaagaacgcaaagcaatcatttcgaggagtttgtaaatgtgttattatagttcctatcaattcccattctagccagaagcatcatataaaatagcacattattaagtcaagatgtgtaaattcagattagatatggatgaaagatatttggaatgtattatacatgcctacagaaaacctatcgagaagaactcgaacaaatccaatctcactttttctataaataccttcccctatccaattattaaaactataagaaaaagagcattactatttgtacaaaagaatttaagaacaaaccagttgattccgatggcaaaagagtacaggagggaataagttgcttccttagctcttcttcattaatcgacacagctgaggctggtgtagaagaaaggaacccgcttaagacatcagatgaatatgtaggaagactagtagaattacttaaactggagttggtcgaagtatcgaaataacactctgcatcatcaacaatgatatcatacaaagcttctgaacattgttcattctctagactgttttgaactgtggttggcagagcaacattcaccgaaaacatacattcattttcataattagctttagtcagtccatcaacatatgatgctttagaggattcgttcacatcaggagaagttagctccgattctccatccacagactccttcatgaaatttacatcatcaatatgtattgaatttgcatttccgaagtaatctagagaaagatgttccacagacaaataaacatgatcaagctgctgcttctcaacatagtccatttcattattggtttcaatggattcatcaatcaaggatgtttcaatagattctgccacactaggaaaattcagctcggaatcatctgtagactcttttatagcattttcgtcaatgatgaagtccaagtttctatttgtcaaagcaagtactaatccagagcctgaattctctacagtttcaaatcgatcagaattatcacgactatttctaagtgatgattcttcgaagtgttcttcattccattttgctaattcagataatgaatcttcatgggcatctgtacacttctcatgatcaatttcatcaatcaccactggtgatttttcaacaagaagatttggaaaaaaattctcgatactaatcgctgagttattctctgtaatggtaccggtggcagcaccttcttctggaaccagttcttcagcttcacaatttacagaatccgctgaaggaggaagaaaatcttggacaacatcagaacatagttttttcaaggttccacctacactattcacatggttttcgacatatttaaatgtaccctgcaacaagtaaaaaagagattcactaagatgatgaaagaacttgcaaactacagtcaaaatctacaaccccacgagttcattgaagattagcttagaccgaaactatctgaaaacatactcaaaattttaacactaaaaatatatagttcgatataaatgacccaaaacacatccccatgaaaacaaagaaagaaaatcataaaattaaaaacacactaaaagcaagtgataacagaaatatcacctgaagcattatatcattaacctctggaatgattccttcaaaccagttcataccgttacttgttgaatccttcatgagttaaaaaaagttcaccttcatccattcaaatgaaattttgtgaaaatcatttcagtaagaaaaggaaaaagtgaagtaataatcaaaagcaactgaaaaaaggaagtaagtatctaaatttcccaattatagaaagtgaaaataaataagaatttcataaataggtttgcaaaatttaaataaaattccccaaaagtactaaaatcaaataatagttccaaaggttgttaaaggcttagaatcaaactaaaaacacatcaaataaaaccatactaatcattacaattacttctataaatacacaacccaatattgtatataattatagttttctcataaaaacataataatcttcttcaacacccttttgaaaaaggtataatcttttctagtaatcgattctctaaagcacttaaaaaccaatcaatacacagcttagcttgatacttaagctttaagattaacataagaacataataataaaagcataagcatatacatatgtatatatatcatcatattgagacataaagcaaataaatttatcgaaattgtattgaaaaaatgaataaaaacgagtaattgaagaacacagaactgatcataccttgtgaattaaaaaaaaaaggtatgaaagaagtgatgggttaccggaatatgaaattggcggtgagttgggtggaagcgtcggctgaggagccggcgcgccacacggtggttgggattggtgaatcgatgaggttgggagttcttggttggttgaatttgaaaaacataatcaaagggttttgggatttgtggcaaacaatttcagggtttagtttaatagcaatatcacaattatattatttatgactttttccaccacatacttaaattttaattttttttacccttttattgtgaagtagaatttttatcaaaaatattatgtaaattttgcattgtgttaagtttttatggttgttttactattattttaattgttttgttttgatattttacagttcttttataaaaagatagtacttttacaacaaattctgtatgacagtaaaattataaatttttacctaaaatttagtatttttgtgaaaattcctattattattaggctaatttcaatttttgcctgttaaaaattttctttaaattattgagattgttcgatttcaagacttttgcctaattttactatagaaggtttgacgtgaatgcaaattttgggagcacaatttgttacatgttaaagttcagaaggcatgatttgatatatatcaaagtttagaggtataatttaatagagaattttgcggtaaaactctcataaatgcctagtttattgcaattaactcctaattctaatattttggtagtaaagcccccaaaactcgtgttctgttagcagtttaatatttccatctattttt

SEQ ID NO: 377758 - DNA, 4391 bp, Cannabis indica
acttctccttggtatttgaatgttgttacttgttagaagggcatctgaaaacatgaagtacttggaaacatatgtgtagaatagctcttttctgagagtaaaaaatattagaatagatgtattatatatcatttacaattattgtcacagcttacaggtaaaatttctttttcataacttgttttacatatctcaagttaagaagatcatgatttttttgacggaataatatgttgattgttgaggctacttggattgaggattaaaatagaaaaaccaaaacttcaaatctgaccctgagcaaaacaataggtcagctttgatttcggagtgacaacaataagtgaacctttctgtacattgttccaatgtactgttgagtgttccagtggaagccttcttgcttctcaaagtgttatcttttgtcacttgctccaatgtacctattgaacatgaaggagaattatgcagtgcccttttctccattgtcattctctatgatttggacttggaaaccatttgggaattgtaatcctggagtccgaactatgtttcctcctccaatagtattccacctgaaaaagaaaaaaaaaaagaaaaggttccgacctgtaccggttagtctatattcatttatgtatccatttaatattaaaacgcgtttaatcctacctgtattttttaaccaaacaatggagaaatactgccatttgcaccttagtaaactctgttccaacacagaatctcatgccaccaccgaaagccatgaaatgtttagaaccaccatttaattcaatcccctaaaacaagagaaataacatgttaagaggtgtgagggatttcaatatatgtctatatatttatacatttatttatctgtatatatacttagacatagttttttccagaagctgaccttccatctccaaggattgaaagtcaaaggatcctcatattttgcagggtttagatgcacagctgggggacaaaccataactgcccaatctgctggaattgtatatcctgtgttgagaccaaatatacttttagatttaccataacattaaatggtaacattctctaaaaccatatagaattattacatatacatacatacatacccttaaactggatgtcacgtagtgtttttctgaagataccaggaactatatttgctaatctgactgtctcattaatgacctggaaattgaacgtcaatatatatattatatataaaaagaaaagaaaactcagataaaattttataatgtgtacttgtattaattcacctgaaatgtaaatgtcattgatttgtattctttccatgtaactccagagtcagcattttctctatttcttactattctttcatgttcttcctggaaaagggtagtagaattaagagtgtgttaataagggggtgacgatgacagttaatgtctgttaataataaaacggttattatagtttcacataccgttaactccttaagcactaaaggatggtctgtgagtagcttaacagctaaagttatagctaaggaagttgtttcaaagctggcaaagagtagaacaaacattagatccaaagcaatttcctctgtaagaaatgttccttgcttctgaagttcttccaggacatagtcaaaaaaatcactttgctctttttttggattagcgcgcctttcttgtagcaagttcttcagcattttcattgcttttttcctaccctgagaacaacaacactttaataggtagtttaatataataaaataacgtaggaagtaatggagatagattacctgtaagcatttgtgataagctgttccaggaatgttcaaaggaaaagagatcaatccttgaatgaaagcaacaaaattttcccttagattctcagacgagttgtttccatcataactgatcagtttctttgctgttaagtcaaagatcatctgcacataaaaaagaaaaaagaaagaattatagtaagagacttatataacaagtacgtattcttataaatgagtcagaagaagaagaagaagaaaaaaggttgttacccttgcagttgattctttcagttccaccatattttgagttgaccaatgctgtaagtttctgttggttgtttgttcgacttcattgagcattcttttgaggctttcaggaccaaaaagattaagcaccatgtttttaaggtacttatacatgaaaccatgtaaagaaccaacattttgctttccaaagatttctgtaaaggtttctggataccaactctgaaataagtgtccctcttgttgaaaaatgaagtgattaagatctgggtccgtagatatcacaactggtcttccaaccaaactggtcttgaatatggatccatacctggaaccaggaaaaagaaacatgtcaaaaaaaaaagaagatattgatataaatttttccaaaggtaaataaaaaaggtttaaccttttcatccttttttaatgaaaggagggatatcagaagaagtattgggactgaagaactgaagggtctctcctagaagtggcaatcccattgaacctggtggaagttttccattaatgcatctgggatttctccatctataaacccaatgtgttatgcttatgattactaaagctccaatcacaagtgcccacatcttgatcaaacttggtcaagaaaagaatgatgatatatatatatatcaactagttgatttgtgttttgacagaagaagaagaagaagaagaaagagttgaggtggaaacgtgtgaagaaatataaaacagagagagaagcaggaaatgctggcatgtacatatgagaaataaactcattacaaaacttcttaaataggcaaccaaaaagggactcaaacagtcaaactcaataactctatagtactactacgacttgggaaagtaataatatataaaatataataatattaatgatatttttatatatatatttagagcttttgtatttctctactctgttttgtttctgtacgtgcagttggttaatggtgaaagaagctggctgtacaaacaacaagtagttagagataacattattagtttagtcagaatatgtattgatttctgtctagatattaataattaataatctttttttgtcaacgggggcatctatctctttattattattaaaaagaaaattagaaaactttagtgtagagagttgataaaagagagcttagcatgactgagaaactccccatgatgcttcctatacatacatatacacatatttcatagtttataaggctataataaaagaaatattacatgtaacacggaaaaaggaaactataaactgaagaagcacgaggcagaattttgccattttttatggagatattatatatttacagagtcttctcttccctagatttgagaagatagaggtgcacagtatctgtctaccaaaacttaagtgtatttatataaatatatatttatagatttatagattttcaataggaaaaaaatcattataatccaaagggggttatattgtgttttgcaaacttctgatcaaatctgaccaatatctgagttaaatactatagtatctattaagtgatgttaaacatgtttttgttcttgtgttcatacacacattagattagtttctttttatgttaattagaacaatatctttgctagatcacaataagggaataatatatatcattacatcacttgtgatatgatattaatgaataggtcttatggttttaagagtaatgctagtagggacacacaaaaattatacacatttcttacccacacaatggtacagtagataattgtatatgggagcatgttaccattaattatgtgtggagtttatctatagtagctatatagtattttgataattaggtaaatagagggtcggtccttaattgaaatgggttatagacaaataaattttttttgggcacttaaccccttactataaagataaatagtatttttaagaaggctaattagtaattttctcccccgaactttgacatataccaaatcatgccctctgaactttttttgccgttaaaaattctccttgaactattgagattgttaaatttaagaacttttgtctaatttcattcaattttactgtttcaggtactaaatcatgctctccagacttcgatatctaccaaatcatgtctctcaaatttttatatgtattaaatcatgccccctaaactttcatccatgttagaattttttttactaaaattagataaaagtccttaaatttaacaatcttaatagttcagggggaatatttaacggcaaacaaattcaggaagcatgatttagtacatgtcaaagtttggagggaaaaatt

SEQ ID NO: 377759 - DNA, 12996 bp, Cannabis indica
acaataactatggaagaattgttaattgatctatgtcatttaaatttttttactttttatataaaaattaatttaaatatataacactcagaaattacaagttaaaaaataaatttagatattaatttataatactaaaatcaaacttaaatatttacaccacaaattactctaataattattgttcttaaatttaattactccttcaaataaaaaaaataaataaataaaaaaaataaaagttaactatttccttccaattgcgggtggaccaaataaacatttttattattatttataaatattacaaaatatcatatgaaaaaatatagtaatagatttttttttttactgtaaatttcattaaattagaccaactcagtcttaataatatcagcaacataaaaaaaaaaaaattggagtccaaaaaaatacgatcaaatataaacaagatgctttaactataaagtgagcaactcaattagtagatcgtttgacaaaacgtaaagagatatcactaaaaaaagatactgtttacaatcctcaacgacacaccaaaaatggatgtccaaacatttaaaattctaacaacttgtatcaataccacacaatcaagttcgataatactaacacccagaaaatcatatgcttcaactacaaaagcactccacgacttcaacaatctctaaaagaacttgcgcaatacgcagtcccaaaatcccagtcatgacccaaccctggtgatcctgagcaaccccactaaaatcatgcctctcttccttgttagacaacacaacatcaatgtttaccttgagtttcttataacctagtttaaaccatagctcagctccatccgaaagatatcaagtatcaaacgaaggaaactaacttcttacttgagcttttctccactaagcaagagtgaaacaaaccaaattggtaacgaactctgctcgacttttcttatctttccacaagagttccgtgcgaaccaaattgcccaaaccaacatcaccgcctaaacgctttgttcctcattagtcgtgagaataagtgaagaaagcagtctccaaacgttcctacatcaactggaatcatagcgaaactcgctacccgtcaacaattctgtgtaaaattataggcaactaaataatacaaaattaattcacatgcctcatgacaaactagacacaacaaagaaacatccacatatttagtcttcaattaaactctcgtacgaagatacccactaacagccacaacctcctcgcccacactaccattttggttttactttaacaatttaaacccattcttaactatatactcgccaaaatagtcaaaaccttaatactaataatctttaaaaaaacttaatcaaaaagaaaaatatcaaaaataccaccactccgccactttctcattaaacaaatcttttacaacatgattaattacttccaaatactaatttgatctttttagccttctacgaattacttcttatttctaatcaaatctatatttatttttaactctaattaatatgattgatttaggaataaatcaacgcacgcgctaaaattcgcgtgacaccgtaatcatcggttagtccacgtcattctggtttcggtttcacaatatgaaaacacggcgcacagtagcccattccctctaatttacgcacctgacctgacctgaccgaccttcctcacgctacccaataaaaaaaacaattttaaaatttaaatttatttaaaaaaaaaaaaaaaaaaaatcaaattttgggaactttcttggaaaccaatcagagtatttttgatttttgtattttgttttgctttgattcgaattgttgattgtgtttggttggtaaatttcgtggaaaaagttcggttattttgtcaaaactggaatcgtcggagcgattagggttttctttattcaaagaagattggattggattgattgattgatgttgatgatggcggaggagagttcgaattttgtgatggataataagagtttgagtggttttgaggagtttcagtttaatgaagatgatccggaatatgggagtatgtctattgatttggatacgttgtttgatataattgatgagaaggacgatgatgataaggagttatctgaacttttacaggtaggtatttggaaaatcattactctgaacttactcaatttcacgttaggagatgaatgtttttgagtgattttggaatatttgtcgtgggtttttgtttagagctctttgtaccgattgttaaagtggtatggaggatttgaactgtaatgattttgaatatgggtatggtttaggttattgaatgatttatatggttgggttgttttgagagtaaattggtaaattgtgttagaggaaatggtgaagaacagcagagagtagagaaagttggtgcttttctcatacttaaactcattctagtgtgctgaatggggtgaaagtgtaaatgaattgcaagtgcacattgctctgatggttcttatttatggttatatttatgatgacattcatcataaaatgtcatagagaggaggcagttgttcattggcttcttatttcagttttgagattggttagggaccaaccattgctcaaattttgtttttgtataaactattgtagattaatccaacatttggatttttaacaatgttaataaatacattcttgatctgcaccctggtatttttccccatgttgtggtttgttttgtttttatttgttttcaaaattgagtgttgcctgaagtttacagcagagagcttcctttttaattatttgttttatataatgtatggatttgtttgaagtttgatggttaactttttgggtaattcaatggcagacttgttcagaggattcattaaaaagtgcatcgggtgaagcagttcttggtgccattaacaatgcagagaatactgagctaggtagtgtagagcaaactatgcagattcactttgttattttgaatgccctatgttttatagatgtcttctcagatactgatagtatcttattatctatattttgcagagactgacttaatgtgtcccggtccagtgaactctttgtataactcaggagcttcaaatcgtaatgtagggttctcaagtggttccttgggcttgacgccatgtgatgatttgtcaggcaacaacagggttcaagggtctcctgagaatactaattctgcaagtataaaagacttgttttctctagttccaggtaacggaacttgcttaacagagagtgctggtttttcactacccacttgcagcacaacatctagttttcctcaaagagatgctgaaagcattccagactttggcaacaattttgatgatgatacttcgcaggaagaaactgagactcaattcaggaatacagtacctgaaatcaatcgccagtgtatgtttttgggcatatttgtagggcattagaagtggcattcctaatatgttcttggcaaagtatattgtatggcattgcatattatgagtcgctataactaatatttcttatgcttgcaggtgtttttccataccctggtcctaagaacattggtgtaaatttgagcaagcatgatacatatggagaaaatatagatacagtgggatcaccagaaaatatgttttctcgagaaaatacgatgcatttgcatgatatgtttccgcgagacatgagttctaatgagtcttctatctgtctaagtggtgataatatgagtggctatcatccagcttttcaatatgatagtggaatagatgatcatctccttcatagttatagttctcaaattttgacaaccaatgatgggctgaagaataatgtgaaggatgaggaatttcaaacagaaagtgtatgctcaagtactaaactgaaattgaatggtcatttgggaagagttgagaaatatgggacaggggttgcaatgaataattacttggatgttccgggatggaatcatcaatatgaagctaaagctaatgattacatttcacctatgcaaagctcttattatgatgtcaatggctatcatattgatgagaagttaccaacacagccgttctcttcttctcaatcatacatttacagtgaagagagagtaaaagatgagaaacccgaacatatgcttgtgcctagtagatctatatggcctcctgttaataggtttgatgaagctgttagcagagagcaaccctgctcgtcagacaccaaaatgttttccaatgactttaacccatcattttctgtttcctctttgtctactcagaaggctgagcaactaatggatttgaaagaagacatgatttttgcatctaggaaactctgtcaccctcccaactttatgagctcagcatcccctaaaaatattggaaatttcagtttaaatgccccaggacaatatatgccctttggccaacatttcactccaagttataatcaatcttataatgtgggttctcatgtttctaaggtcagtccagaatcaagtcatagtaatttttcagagaaatctattgtggaggatgattctgatatatgcattattgaagatataagtcatcctgctcctcgttctgctcccttaaatcggcctgtagcttttaagaataccattgttacttcaaattattctacaagcgttgacaatcacgtgggagttggaggaagggtcaaggcaaaagatgagcgtgtaatcctacgattattgcaggttcgccttgttagttttgcatttatatatccacttgctgttgaagtcgttggactttgctattaatacgtatttgtttttttttgttattgtgtaaaagtgtaattattacttagatagttacctgttctcataacattcattagtctgggcagtgtggccatggtatgcaaacagctctttgctaaattttaccgtgctatttaaacttgttagaaatctatatcatgcatttccttattccggttccaagtgttttatgcatatctctactttttttattacccatgcaattagggacagaaactatgtgcaaccacactcgtgtagatttagattagacattgttcttaatgtacattctgaatctgtcttccaaattgttacgtctattaaatatacattttgtgatggactggttaagttatggtcccaaatgtttctttaacatcattaacattgatctctcgctcttctttttcttttgagttcactgtggtagggttttgccaaggatcttatgatatttgtttgtaaatattttaagttaatattgcacaagtacttttgatagactacttccttgagctggtttcctaaataatatttatcatttctatgttacgatttgatacttttgattaactgagctttcatcttgcatatgcaggatctttcacagccaaagacagaaatcagtccaccagatggatctttaactgttcctcttcttcgtcatcaggtttaaattgctcccccttttcttttccttctaactcttagtcatattggagaagaacaaactttcccctctttagtagatatatggtaactcacatatgtagattattggcaatacttgtgaagtgtgactaaatttgtctaaaaagataattttagttgataagcacgtgtgcctggaattattactgcctggtacgtgttaaaatgttgaagtgctgaattgtctctaatgtttcgggtaatctaggcttaataatcagaaaagaaaaatgggcaatcttgccaaaaatatctgtaatataatcataatgtgagcttgtattcctttggggcaaatacaactctaatttgcacatgctctctccttctcatcaagatattctatgatatttaaccttggcttgaaatcggtttttatttctatcatattagtcttcctttgcttggctaatttgtgctcatttcttgattctgtctttaatcttactctacttcttgcacagagaattgccttgtcatggatggttcagaaggagacagacaacacacattgttcaggggggattctagcagatgatcaggttgatgcgctgttatagtttattgacactatcttgagttatgacttatcatatgtagatcttaaagaataatactgattttctggaatcatattattttttttttactgtaggggctcgggaaaacagtatcaacaattgcacttatacttaaagagagacctccatccctctgtcctgtgaaacaagatgaggtggaacccttgaatttggatgaagatgatgatgttaatcgtggagtgaaacaagaaccaaaagctctttcattaacgtcaaatgagtctccattgagaagcaagaagcctttggtgattgctaagggtagaccagctgctggaactcttattgtttgtcctacaagtgttctgcggcaatgggatgatgagttgcgtaataaggtaaccagcaaagctagtctctctgtattggtgtaccatggaagcaaccgaacaaaagatcccaatgagcttgctaagtatgatgttgtcctcactacgtattcaattgtgagtatggaagtaccaaagcaacctcgtgctgatgaagatgatgatgagaaagggaaacccaaagctcattcgttggccggacagaaaaggaagaatcctcctggttctgataaaaggcgttcagataaaaagggatcggacaatgcattgcccgagtctcttgtgcgccctcttgcaaaggtgggatggttcagggttgtcctggatgaggcccagagcatcaagaatcacagaactcaggtagctagggcttgttggggtcttcgtgccaaacggaggtggtgcttgtcagggactcctattcaaaatgcaattgatgatctgtatagctacttccgatttctcaaatatgacccttatgatgcgtacaaattgttctgtcagtatattaagaacccaattagtaagagtccaacaaatgggtacaaaaaactacaaacggtcttgaagacaatcatgttacgacgtaccaaaggtgagagttaaacttagtatttgtgcgtggatttatttttcttcttcttgtgagctacggttatacattggaattaataaacttggctccataaaattgggaaatgatacattagcatgctcaccatttttataatggcttgctgcaggtacacttcttgatggtaaaccgatcatcaacttaccacccaaatctgtagaattgaaaaaagtggaattttcgctggaagaacgtgatttttactccagattagaggctgattcacgtgcccaatttgaagtatggcatattttttatttcttatttcttacgaatatgcctttgtttttctcacgtgaagtggttcaactgtatgaaatttgaaagcactgcttatgtaaattagtagctgcacatatctattgctcatggtggtaatgttcaaattcggacacatgactatttttcaggagtatgcgaatgctggaactgtaaaaaattatgtcaacattttgttaatgctcttgcgtcttcgacaagcgtgtgatcatccctctcttgtcaagggtgttgactcaaattccctctggaattcttcagctgagatggctaggaaactaccgcgagaggaacaggagtatcttctgagatgtttggaggtttctttggcaatttgtcgcatctgcaatgtatgtacaatcaagtctacttacctttttgttcattgttgattctgatataagtttaggtatgtggctcaaatataccagaaaatgcttacgaaaacatgatgattatttaataggatccacctgaagatgcagttgttgccaagtgtggacatgtcttttgcaaccaatgtcttagtgaacaactttctggtgatgacactgggtgccctgttacaaactgtaaagctcggcttaatgcctcttcagtgttttccaaagctgcattagacagctgcgtcaacgatcagtctcgtgtagataatttagctggttgttctcgttcagaagttgttcaaacaggagagtcctgtaatgacggtcctctgtataattcttccaagattaaggctgctcttgacgtcctaaagtcgttgtgtggacaacaggatagttccccacaacttagttccacaccgaatagttccccacaaaatggttcttcttcaccgggtatttcaccacaaattggtttaacactggatagttccccacttaatggttctgcacagaataccttagatggaaatgtcagctcggttgagaactcaatagatacttgtgcagctgaaccgccaaaggttattgctgatatccaaagctcagatgcggccgataaagggtgtagtaccgcgattaaggttgctggagagaaagcaattgtattttcccagtggacgaggatgcttgatttacttgaagcatgtctaaaagattcatcaatcaagtacagaaggctagatggaacgatgtcagtaacagccagagataaagctgtcaaggattttaacaccatgcccgaggtttgtggaaaccattcctttctttctggtgtcattttctttcaaaaatttgaaggatgtggttctgatgttcggctctatttttctctttttgcaggtcactgttatgatcatgtctttgaaagcagccagtcttggtctcaacatggttgctgcttgccatgtcttgcttctcgatctgtggtggaatcctaccactgaagatcaggcaattgatagagcacatcgaattggccagactcgtcctgttacagttttgcgattaactgtgagagatacagtggaagatcggatcttggatctacaggtacaaatccgattgattacgagcgcttattttgtctcttgctttagaatccaaaacataagtttcgggtatcttagttagttaatatgttctcacaatattgtgtcctttttccatctttctcagcaaaagaagagagagatggttgcttctgcattcggagaagatgaaaacggtggtcgtcaatctcgcctaactgtagaagatctgaaatatctgttcatgatgtgattaggaggaatgaatgtgttgttcttcgtacaggtttcgacagatattattttgctaacagagaggtaattagcagttagtttttcattaaacccctgactcaaatagattgattgaaaaggaccaaaggaagtagaagaagatgaagaagaagaggttctactattactactactgacaaaacaagcaacgaagattattatgttcatagttcttatacatgatcccattttatttttgattttttttactctctattgaaattgttccacttccttattttctccaaatcacaatgtataggatgtgggggggagtcaattgcttgaggtttaacctaaagatacaaagtggtcataatttttgttagtccattttttgtttacatgtaaatgatagattgcccaccatttgaagatgtgtctcttattccatttggtttttgttattaggtttatattttgacaaagagttgttggtttggttgtataatttacttgagagattagttcattttaatcaaaacattttatgagcaaagcaaatcattccattttatattgttttggaattcaaagaatgaaaaaagaaagactcgaaaaagaacaaatatgatctgaattttagtttgaaatataagtataatttcaaataagtaattatggtagaaaattagtagagaggtttcaataagcaaaagggtcccatggtctagtggttaggacattggactctgaatccagtaacccgagttcaagtctcggtgggaccttttttatacttcatttcttctaattttttttgtgttcttttgtattttgtaataatcaagtgtatttattgattgtaataattatcattaataccatcaagtttgatattactctttccaatcaatatgagttgttttgtgcttagcttaaatcaatttgtggattatttaatattaagaatgatgaatttgattgtttgtatattggccattagtaatacactaacattactaatcctcgtaattttgcacaaaaatcatatattaaagattcaaactttgataaccaaaaccaaaaccattctcaatgaaattaacccattgattcattcactcactcaataatgattataaagccccattattcaattaagaaagactattcatttataacaatctatatcaacattcccaatcaaattaacaaaacaatataacacaaatgtacttgttccaacaacaaaataataaccaaaaccaatagttaaatccattcattcaatcataaattattgatgaatatgaagtataagccctatgattcaattcaaccaaaaagaatattcatttatagcaatcaaaatctcaaacccctataaacacaacaatatacacataatgtaattgatcaaaaaaacaacaaagaatcaaactttgatattgatcaaccaaacccattttagataattaactaattcaatcaatcaatcaattatgattgatgatgaagatgaatcattatcattcttagacctatgattaagccaagaaagaatatcattcctaacaatctcaacattctcatcactttcaccaaacaacaatgaatgcatcataccatcatatatctttatacacttatcttcactcttagcttcttcaaccaatgctaaactcacctgagggtcagtcaccacatcaccactaccatgaaccaccattaatggaatcttcacttccttcagtctcaagctcaaatactcagtcactctcaaaagctccacaactgttccaagcctaggctttcctctatatctcatcggattccgatcagccaccaatttcttctcctcaaccctaactgatttgggcatcaaatcctcagtcggtaccacagctagggttgggaaaaatttagcaaattgagtcagaatttgaggaattggccatcttggtttcaatttctcgctaattctacacatgggtgcgaccaaaacggcgccgtcgaagcctttctgatcagagaggtgaattaagagagaaattgctcctcccatggattctccgaagagaaaattagggattttttcaaaccctaatttttgaaattgggagttttgatttttgatgaaattgaagaatgagaggcaatcttcgacgactagatcgacggagggaacgaaggctttgagaccgtcggatctgccgtggccttggagatcgagagcgaagcatgcgtagccgttttgagcgaggaagatcggcgtggcttggaaggtccagcttatgtcgtttccgtagccatggatcatgaagattagggcacgaggagggttgttagggttttggggaagccatgaacgagtgaagagtttgaggcctcttggggaagtgaagaaggaagatgagcctttgattccttgttgggtgtagtaatcttgttcttctatgtctcctccccagtaatagagattttggctcttctctttctcctcctccgccattgttggaggacctcaaagcttcaatctttgatatattttttttttttcttctttggaagatgactttttgtttggtgtatacaattgatattattgagaattattactattagtctctattaaatttggacatatttcataaaaattattataattaagaataatttatagtatttaagtttaattttttatgataataatatctaaattaattttaaaattttcgtaagtatttaaccattaaatattatgtcaatagccgtaacattattagattgggttatgtcattaaatttatgtttttgtttaaaaaataattcaaatataataatttaaaaaaaatatgtggataataatttgatatttagagtttgattgatttgtgattgaaaaattgtgttttttgaaaagtgatttggaaacaaaaatttgagttttgtaggtaaaaaattgttttaaaaaatatgattagttgtagtgtgatttattgtttatgagtttcaaaaataaaaattgtgattgattgggaattttaaaataaaaaagtacaagaaaatttggagagattttggatttaatgatttgaaaataaaaaataatttcattttttgtcttaaaactcaaaattatttttcagataaaaattttgaaccaattaagaattctcatatgtacctccactttttaagttttggaaaacaaaaaaaaattgtttttgagttctaaaccaatcaaacctgtaatagttaggtacatacaaaagttactgaaatataatttaagtattattattgctaaaaattaaacttatgtatttatcttcattcaaacattaaacttaaatatttacgccacaatttattcaaattattatatttaattgggtaatttgaggtgaaatttttttatattttaatttcatacacttaacttaacaatttgattttttttttgggcaataccggtttaagtatacttttgcttacaaatttgacacaccagttaaatttcactgttaaatgttaattggattgacattgtgttacacttatgtatacatgacatattttcattggagattttagacgtcttacatgtacatagatgttaatagtgataatctcaattgtcatttaacgatagattttaagtgatatctcaaatttagaaaaaaaaattaaagagttaagtatataaaaaagtaatttgcgactaaattctatgaactttgaagtttaacacgatcaaccccttagactggaaacattagggctgaactccccaacctccgtaatcattttgctttatactcattccgtcaatcaggggcggccctgagttaaaatgggtcataggcaattttttttggtccttactataaagata

SEQ ID NO: 377760 - DNA, 5077 bp, Cannabis indica
gtcttaacaggattgaattagatccatccaataaaaaaagtaaaattttaatgttagtttttatatatacatatatatatatatattttacatatataacataaaatctaattactcattcaaactaaataaaaatattaattagttcaattgaatgtacgatgtattagatttttggacatcccatctaagattcgatcctatccaattagatattaaaaaataacatctaatttaatccaataataattggatatctaatatttaattgtcgattgtcagtaaaattggatggatttattcacactcatatacattttcataaattttggaaaacttacaaaaatactggaatttgggttaacttttacaataaaactgtcacacggaaatcttttcaaaaatactgtgtttttataaaacatcagtacaacacaaaatagaacaactcaaaataatagaagaacaactaaaaaataccaatagaacaacagtgaaaacttaacacagtatacaacagtatgaacttataaaaaaatatagtaaaaaagtaaaaaaataaccgtctagtagtatttttgtaaaaaattagtatacatgtaaatttctctaaattttttgaaattaaaaaaaaaaaaaaaagaattactcaatccgaccgttggatcagattacaaatatagttccataaataaaaataaatttgcaaaaatccacgtggtcatcctcctcctccacatatggcttctgactcttctaattttcgattccctttcactccggctccgttcgttctctctctctctcttctctctctctctcttcgtaatcttcttcaatggcggaagcttcggtagtgtcttgggttcaaaaaccgatctctctcttctcgaaagagttttctccgtctttcttctcctcttctcctccccgttcctcgtttcctcgccggccaacctctcgatttctccgatcctctgctaaagcttcctcctccaattccgcaaactttttctccgatgagtcttccggcttgttcccttggtccgatggcgactccggtaactcctcttttacattggttttttttttcttccctttcagcaagttcttacatttttattttaataacagcatgttcttaatcgatctgcgtaattattgtttggatcacaaattggtatcaaagaagtgtttgtagtttgatcgaaattgggtagttataccgtaattggagaggagattattgtaacggtattgtatcaaataaatatttatattttaatattaactaaattcattattgcttattggacgtttatatatgacaactgagaagctcttgatttgtcatacataaacaaactcatgactttgtgtccaattaaatttaaggtcaattgcattgaagggtatcatcatcttctgttaaatatctttcaattgaaaatgccgtcttgaattgttttttattatgcataagaagttcaaatttatctatttgtttgttttttgtttagtaaaaagtaagagcaattttgaagcatttgtgattctatggcatgaatttgaaccaaaactttgtactatgtatgatttttttgttgattgatatatgaatgaggacactttcccttgtgttatttttgaaaattttgtgttgaacaaattgatgacataaatttggatgatttcccagaaattcaatggtttcctggtgggaaagtcacatttttcactactgatgggctcattcagattggaggctccatggtccctagacgcgttccttcagatgtatgccatgtttatctttcttagaacctttaattttggattctttgtttttacttttggatgggagttttcttgtctggtatttgtagtagcatcttgctttgcgtattcaaatgtttttggtatttatacgaacaatagttctttggactagattagaggacataatggcatgggagatttgatccattatgcctaattcttttacttcttcttcgtgttggtggttattactgttttgtttattgacatcttatattaattccaagtgtacttttgacagaaaagatcaaagactgcacaaagacttcaacgcttccaagagagtgattacatggatccaaaacaagaactttgtttaggcgcactctttgatattgccgcaacaaacgtcagcaaccttcatcctattacattattcaactttttaatatgttaagcattctgtttatgatattatgtacgatgattgctcaaatagttaaatattcaatttagggacttgattcgggtagaagactctgcatctttggattttgccgttccatagagatgctgagtgatgttgtggaagacactgttttggagcatggtggggaggtatgtttagttcatattccaagtatactttttttaaaagtaaagaatggtggagatggtttttttaggaaagtattctttctcaaccacgcttaacatcaacatcttattccacaatgcaaggattagagaacaaaccttctactaaaatttactttcaatttgtcgaatttcccaaccttcaaatgacattattttggggttgtaaatttcatgcagtcacgaaacaatttctcttattcgttctatacttttaggctatgtttggaagttggattttggcgtggaaagaaaaatttaggaaaaaaaaatgtggggaataaaaaaaaaaatgaattttccatgtttagtatggaaaagtttgttgaatcaattttttttaatacaatttttctttccatcataaacatcagaatttttttattattattttctatgtttttcctctacattccttacctttttcttctcctaccaaaatccaacttctaacatagggttattgttgtagccatagaaaatacctttatcactttgtttcaggttcaatatgtacaggtgaatgaaaacagcctttgatggcctatacaaacatggttttggcatttcagatctggaaagattaatctaatttcctttagtaaacattctaaaaagaagagcttaaatagttaaagctgaaatccacctaactttatgtacacacaattaacaaaaacaacacacatctttgtatcatcaggttaagatcttaaaatctttcccttttcaaattttcaggttgtttctgcagagaaagctatcaagggcggtttgcatgagaagctaacaatgactgttgcagtgccattgctttggggggttcctcctgcttctgaaacacttcaccttgcggttcagagtggaggagggattgtagacaaggtttattggcaatgggatttcttgtaaatgaattatattatatgtatcatattatggctaaccattatttgtgaatgttgtacataactatcactttcttctgtacaaactctaattcatattctcccatgtataaaataaaacccaattgttgtatttatgtatcactgagccatttcagaaaattgaaatcgcagactccatttgccacctgtatggcttggaactactgaagttctttactcactgattttgatgtattacttggattaaagggagtgaaatcagaaagcaactactcttagtggtaattttttttaattgttaatttactacaaatccaggaagagacaaaaactaaaaaataaaagtaaaaggtaaaagaggaagctctgcaagttctgtgcaaatggaagtgtttattactattacaagctttactcaaatgtcaaggtttttgaagctgataaatcagccatcttaagggaaaatcttgatattctaattctaattgtaattttagtttctcgttttcttttacgagtgagatttcttttaagttgttggaaaaaaggcaggccgatgtcgatgcatatataatatgttttgttctgaaaataatgtaataaaacaggggaagtgggatttgatgtaagccagccttttatatctaatagtatatgcctttttaagaattcgaacacataatattatattagattattaatgatacaataaaaagaaagatcttactttaattaatgctccacacactctgatagagattcatatctaactctaccccaaaccaggaaaccagccatagatttaaatatgaggagtttgaatttgagacatgtaacctagccaaattatacaaaagactactttttttttgaaaaattctttcaagactattaggctagactttccagctagagaaagaaccttcctattacataaaaggtctgtccagctaaaccacacttgaacagtaaaacaaaacaaaattaaatttgctttttagtttttgtgcaatttccatttttggtcttaagtgttcttagcttgttgtgagtgacagtaaccatttctttccatggtgatgatgaagggttcagagaatagagctaccccagtaagagcttgatagtatcatttatttatattattgggaaaagtaaattaaagcactgttaatttcttggttaatggccccacaagaaaaccacagtagatgaatgaatattaattaaagttagagacttgatcaaaaccaaattgtctaaagagataataaaagtctgaaactatgatgtcccatttaagcaaacaccccaaatttgattttatcatgaacagttcatctctgtttacatactaattaattaatcaattttactttgtgtagaaattatgagccaaaagagatgttcttggaaatttcaagggccagtaggaactacctttttgacatttttatcattgcactagaaaagacattctagaaaaactttcctcttagttgataataactttaaaagacaattgtactttatttttaatatgaactataaaatgcctttagctggcaaagctcaaatagtcttctctacttggagaagaaacaaaaatggtgaagaggtcaatgcatttatttttaaacattgtttaatgtttatgcttttcctcattaaaataaataaataaataaaggaaattactttttatctcttcttgttttttttttttttgt

SEQ ID NO: 377761 - DNA, 1335 bp, Cannabis indica
agatcaaatgctattatattaaacaataaagttataatacaataggtattagtggtaaaggcatctcctcaaaccatgaacaattaatatccaccgagagtgcaaatttttccaacaaatgagcggcattattagcaatctaaacacatgagagatctgagcactaggaaagttagatactaaaagagaaatattatctaagatacaatgaaaattagaagccgacatttgtgcagtttgcaatccttaaaccaccataagggaatccgtttcaattaaatgaactggtagtagtagctccccaagccatttaagactgtgcattaaagccataacttccattatttcgggtttaaagcagcctttaaaagggatagtcatagcaacaactatatcgtcagagttatttctaaggacgacaccaaagcctgttacttgtttcctgctgtcgacagtagtatcagtattaagcttcagacgaccggaggggggaagtagccatggagtgtctcgtgacactgatcgggcattggattagttgttggatgcaacagattgagaatccctcctagctttatgataatcttccagaaaagagagggcaaagtaaagtatggtttctgcatattttggcacgaaaccatgcctctccttatttcgttcactccatatactctaaagaatcgttgagaactgttctaactgcagagaagtccatgatgcagaaaaatgcatcagaatttctttcatgcttctattgttaaaagacataccttcaagactaaaagtggatcgattccacacttgtcgagcccgcttgtagaaaaagagagcatgaatgattgtttctttgttccggttacaaatagaacaagttgcagagtcatttatatgcctggtgtgtagaaagtcagcaactggaagacagtcatggatggcgcgccaaagtaaaattcgaatctttgatgacaaggaaaaccccaaaactttttccatcattgttgggtcagaactccactagccgatggagaatggtcttctaactgcatagctaaagcatagcctgatttgactgtatacatcccatttgattcattatgtcacattagattgttttgttgttcatcatgtgtcagtggaatactgagtattttgttgacatcagagtttaatgggtacaacaataaatctattttgtaggggtgtaccataaacttttctcataaaactttctaaaattgaaagaaaaaaaatctatagaaaaagtagcaaatgtaaattctcaattaaagaaaaaaaaaataagaagttaaagaacttgtttggctgtgtttt

SEQ ID NO: 377762 - DNA, 2026 bp, Cannabis indica
tatttttgtatataaaattaaaagtacatgccccctagttaatttttgcattttttttttcctcaaaacacttttaaattttttaaattctaatagctaaaatcacaatcacgaaaaataaaatacacagaggttttatttaagaaaataaaagttttttttttggaaggaaaataagaaaataaaagttgatcaaaatcttttaaaaatttactcaaaaaaaaaaaaatcctttaaaaataataataataatgtcctaaaataatgagccaaaaataatgctgcattatattaaaaaaactatattcaaaattagtaggtgagaaataaactagatttggttttattaataaagaccaattatgtagtgattaagcaatttataagtttgtgttaagatagtgcattttttttttaattttatttaaatatacttcaagaaacccccacatcctatataaataaatattcatcattgaaagatcatttgttaattaaatggaaaatcttaaccaaatgaatctctccctatgtactgtattgtactttactttatttataataaaaactaattatgtattaattaattaggtgattaaataaataggcctcatatcccatgttgttgacaaatctattaaggttaattaatcaatatctcttttgtttagaataagtcggtgcatcaattttttatttttatttttggtacaattttttttgaatgttaatttttggtacaataaaacaaataccatgacttatttattttcaataaaagaaataaggtgacattgtttagtgaataattgccattaagttgcaatatttcattcattacaaacaaaattaaaatagataaggttgacaataataattgatgatggtctacaaaattaaataatgagttttggttgcagagaacaataagtagttgcattaataatttaatattgtcaatcaataaccaaacaacacttgtttatacattacaactttatagttagcatcacattttttttttcaaaagaaatctctcatattttttgtttgtactaaatatgattaaattaaaaaaggaacaaaaaagagaaaaaaaaaaagaaaaaaggagaatgcttgcactttgcaagtggggttgtggaaagaacaagaaatagccacaatagggttgacaagtgtacaaaaacatactctttcttatgcttaaaattgatgaataaattaagttttaaatcaaataatttcttgttcaaaaaacaaaaaaatcaaataatttcatatttttaaggtaaacttgtgtcatttagtaaatattttatttgtgcaaggcctaattaaaatgctagagtttatattaaagataaaaacaatcctctgcatttttgttaaaagaaaaattgaaattcgaaaaaaaacttaaaaatcttgttagattctatgattgcgcaactattttgctcaagctagcaatcattcccttaacacgctcttgcttgattccctttcccgactctgttcattgagggatgagtaagtgagagcccaagagcgacgaaatgaggctagctaaatcctcttgttgccctagtttcatctacgtacgcatacgcatatgttgatgcttctttgctagcaaccaagcttgcccgagaagcagccttccctttcctagcgtgttatctattcgtaaacaaaacttttctttctttcttttgaagatccatatttttgtatttttttattatttttaagtatttataaaaatatacctttaattaatcatatttatctaaatttagataaattgttaaggtagtgcaatgcataatttgggctgggtgaacataaagtccaattataaaagaagaaaggaatgcactccacttgggctttcatgaatattgggtccttcttctcattatattatgaagcccaatttcttattacactagtaagtttagtggttatcaaaagtagaatttacgtggggtatgggttttttaaaccttttatgataaatatg

SEQ ID NO: 377763 - DNA, 5653 bp, Cannabis indica
tctcaattactaaagcggtcattgctgttaagaaagtttgtaaatgtctaaagtatgactatatgcttaaaagtccaactgtaagggcataaaaaattatccccgaatatgtaagagttggataaacttgattaaggcatggatgtgtcctttggaggctgagcattatcaggctatacatcagtgatgactttcaagatcatagaattagtcacggaaggagcttcaatggctggaagagctaggtcttccaagttctcaccctctagggtggaagttctaagatcgacgacttctactaccctcaatgtctccttggcttattctgctttagctagttcaagaacatggggcatcggttattctctatcttcatcatccaaaaaatccatcactgagtttttgagttttcagaatgtgtacagagaatacataaaagcctactttaatgcttctgatgtctgacctattggtccgacttctcctgagccatttttttaaatttggtgctccatcttgggagtctttttcttagattcttcacaagcctaagctagggtttttttggaagagctcaacttagctacaatttcctcggccgttttgatagcctttttctcagcttcctttgcctttagccacaattcaaaagaaaatttcacatttctatccaaaatggcttcaataacaatcttgtaatctagtatttgagtttgcttgtcgtattctttagatagaagggtgagcttttattctgactctttgaaatcaagattagcttgcatcgcctctaagtcattgatttgagagagagcttgagtatattttgtacttttccccatggtctttctcaaccttggtcaccttcttctcatgagaaatagccttacctaaagaatcatttaccctttgtttaatgatggaatccatcttggcattaacatccgctaaagctttggtggcttcttctctcctttgttcagcattggaacattcagacttcatcaacataagttcataggccagtttgttgacaaaggagcagctcgtctccaccatcaggctcacctatgaaaagaattgtaaatgaatcagacaaacaaaataaagatagcttttgtctgaaataactaacgtaaaagtcaacttacatcattggcttgggtcctcatagtatccaccatgtaagcggggtccccacttgccatcattgtgagcctgttagccccaactttacaactagttgtagcactcttgtccattatatcagataagaatggagccacatcagtccttagtctaggacaaagtctctctgtcatctctactctatctatgatgtcagttggaggctcatcccacttatcgtaattaacaaactcagcattgcgcctggaggaaatgttgttggtaaccttattcattcgtcatactcactgccatgcctcttcaagtgaaattgttcaatgacctccatgtgcgctctcacttcctttggtatagatgtaagcctgattggaagattgaaatatggaggtggaaatggaggcaaagttgtcttctctctaggaaactatttggcaatggtaggaatgcttttgagtgttagggtggtggaggtggatcattatttttcttagttgtttgagtgctcctcctgactggccttcaaccattagagacatcagatccctttcaggactgagattcgacaacttgtctccttacaacaaccaactattgcacattttccttggtctctaccctcgttttcttggcaccaccatctatagtactagactacttcctgggaaccatggttgggccattgcaatctgagctatcctcttcaacatgccccacgggtacctattgtaaaggcacacaatccaaaactagtgctatcaggtcgataacagaggtggataagtcctctaaggctagaaccttttaagtagcctcctggatcaaagcgagaggtgttgacttctaagatccactcccaaagacttgccccttcttgcctttgtttttccctcattggctacctcgcaaagctcatcaactctggaactaatggtatccaaaaagtttttgagaagtccattttggaatgtagctggtgtttctgcaagaaacaaataaaagatacaccattttagattatatctaatataatcacagctacaagctacaagatattataacaaaaggatccaaaccatttatcttagtataattcactttccctctagcaaaaagggtaatgtcctctcgacctaaattagtctcgtgtttgaagaatactgggagataaattttactaagtacatccactctaacgtgatgatgcactggtggaacaaaattgttaggattccttacaatgcaatctcctttatctatgaattcactacaaggattatttattttgatctatactaaaaaaatatgggtcaaatccccccttagttagtattatctaaatctactaaggagggagccctaattatatgaaaaggtgtctcaccaatactagaagtactctctcctagagcatcctcatttgggaccacgtccttcaaacagatagtgagcccttcagcttcacttctagaaatctgctcttccagtcaccgagccagtattcatcggccttcacagcttttaaggcctctttagtagtaatgactacaatagcctccttcaccttgttaggatcctctctaagtgattcctgaacagtctccttcatagacattgggtcaatcatctaatgagaagcgatgaggcaaaccttttgaaggttctccgtagtcaccaactgagccacttgcaattccttagacaataagaaattgtaaaacatgatttttttcctccagttctggagtcaaggtgattggagaagataatctagaagatatgaaatgcacataagtatataacaaaaggaagaaaatgagaggtgaaatctaggaaaagaagaaacacttgttgtatgaaagtccaagctaaatgtggtgactatttttagcgggaagctgaaagtgtagaaccagtagtcctaaaagtcatgtgtatacttcgtggaactaacaggtcaagcttcacccttagaatggtactctagcttgtagaaacccaccttctctttatgacccctcatgggttgggacttaatcttataaaatataagatctccttcggcatcgatgcagacttgttatgctgagcacaaaagacatatcatccttacaaaagacagtaggggatgaattggaacggtgccactctagctacaacacaaaaattggcaaagtaacatcccaagaaaaggtgtgcacccatctccacatgggtgcaactctagatgccaaagaccccatccgtgcacttacttggcctctcattgtgaatggagagtctattccagtacaacaccaaaatggtttcaagcccacgttgggtctcatacttccttaagttgttatatatgctaaatttattgatgtgttggtccatctctaatggactatcattaaggaccaactttagagcctctttttgctccaaaatgtcctcttccatgtcaaacccatcttgttggatcttcttagacctgttctctataaaaagaagaaaaaaccaagtaattaactacccaaactacctaatacggaaagggaacaggggagtcctcccatgaactgcatggagaggtccccactagactcatcatccaaaaacaaaaacctttaggggtcattcattccagatggaaagttaggaacaatgaagagaaagaatggaatagacatcaacaaaatactcaaaatcaaaaggattttaagcataggaaaaatttgccaacattcttgctgcaaaatggttaaattttagaaattcctagcattggaatgtaaagacaatattgcctataatgcctaaatctaccaacaataacaattgcacagtgagaataccctaatttcactcaaagaagattgtaaaaatgcaatatgtagcaatcaatcgaaaaaacactgccaaaatgcaagaaagtgaatcgatacataccttatagtggaagcaaatgcgccaagctaatcatcgctgggttttgttgaggaagttgagcacaccttttgcaaagacgacaggtgagggtgatcaatgaattaatctctacgttgaaatcgagagtcatagtttcctctagcatgaagctcttgactattgggggtggatggtttggaaactctcgagccctaatccttagtagaagttgaatgaaaaatttgatgtcacggtctagattgatttaggttgcttgcctctgggttaggttcaaactcttgaagaatggaaagaaaaacataaagttttgaagcttgaaaattcaaattaggggaaaagtggtaactggaaaccatcaagggcatttttactcgaaggggtaatccacgtgaagaggaatggatgatccatggtcatgtctccagaagcacaaatctcatttaacagttggggactctagttgtcaagcgtgtaaacgtaattaatgctctttggaatcgaggcgcagatcaatgatgaagattctattttttaattttgcaccaaaaagtgaacaaccgtcataataaaagcttttttggaaagtagctcctcaataaatgtacttttccaccactagacggctgccacatagacatactaagattaaagatggaagtaaccttccatgatcgagtaacaccttgaaagtcatataacattacttttatcttccacatgtccacactaatggaatgacgcaagcttccaccatacactacattttggaagcttgaggggtaaatgttatccatgtttcctgcaagcgacatgtggaatcttggtcagtatcaaaggtccaccagtgtgtcccaagtaagataagttgggccaagcctaaattaaataggacctcttaggaacgtgccttagcttcatgatcagatgatcttccgcaagtgatagctcgtatccaaatgaagctacaacactatgataccaaaagggttagacagtgtgttcctggaagacccgtttggtttcctttttcatttctacacacaaataaggaaataaatgcacccaaaatcttgacataagattgtatcaagataaatgggaaactttctaaataaagatcaagcaattaattcacaattaattgcacataattgtaggatacaattttgaccgattcaactatatctaatcttcctagtcagtagatcatctccttcgtgggttggacttttcctagtcagtagatcatctccttcgtgggttggacttcacaagatagcctaagttataattcaatgtaaacttcccaatagaaggaaaaggaaaactaagtgtaattctctgaatactataaatacccaatgactccttcagattaagggttgaattgtctggcaatatttgttctaaaaaacttgagaacttatgctcattgtattcccaaaggcatttttagcttaaagttacataataacattgacttgtggactaaggatcgttaacgctctaaccacttaaaaattatttgtgttgtttttactctttcttttttaattatttatttcttaagttt

SEQ ID NO: 377764 - DNA, 5835 bp, Cannabis indica
gcgatgagcaactcagatctgcaagaagcccaagtgacaagagcccaaaagagagaagtggtaaatgcaagtttcaaccagactaaggaatatctcaaaagatcaagtttgataaaccctgaaaatgagaaggctgaacatggtctatgcaaatccaagaaagagaaagtgcctgagctgccacgacgtgcttcaaaagattagcaggacttgaagtagaccagtgccagaactgaggccaagaactcgagcacgtcgagctgacagtcgaggagtcaatgtgatgaagtagcaggacttagaagaaagacccaatgccagaactgaagccaagaactcgagcacgtcgagctgcagtcgagcagtcatgtgatgaagtagcagaacttgaactagacccagtgccagaactgaagccaagaactcgagcacgtcgagctgcagtcgagcagtcacgtgataaagtagccggtacagataaagattctgcccatggtaacggagttactaatacgtcaaaaactgcagaatcagaagagcaggttggaaatgtggaagcaattattaactgcagcaaaaatcaagggtctcatggttgttccttggcgagtgaaaatcctcgatgtgagcagcagagaaatgttgaaagtggtgatacaaaactaggattccccattgacttgccttttcatgaattgttgacagatccatgcattgcatttgcaataagaactcttactggaataaactttggctgctccgagagctcagaagttcttcctgggtccataactagtagtgagcatttttcggtcaacatggcttcagatatgtttaaagtagaaacagataatatggttggcacaaaaggagggagctccaagacttttccttctggtaacatttccagtcttgaagaacattcagaatctgaaaccagggctgatgagaagttactctctcctattgaatttcctagtgaggaatcttggcaagatccatgcattgaattcgcgataaaaactctgactgatgacattccagaaaactatgaacagaatatccaacagtactttgagcagcaactaagtttaggaggacccggacaaagtgatcacaacacaagcttaatagataaattttgccaagctgaatattctcgtcagccatttcacaatgtcgtcgagaaacccgcgcctgcactcatgcacaaaagaactgcaagcaacagacaaagttcccgccgatctgttcgaaacaaaaactgaaaggaaagacaataagatgtggcatgatgagcacgaggcataaggcaattttcctgaactgacttgaaaagtttgtaaaatagatagaactaccagtactaatagcactactactgagtctgttagttttaacctttccctgttttgtgtcagttttttgttgttgtaaccatgtagatccctgatcagaactggttatgcattgacacttctaggcagtttattttgcaagaatgtttccatgttttcttttttacttcatgcacacacaaaaaaaacgacaataacatagacgtcgtttgatggaagtaatgaaaagacataatatgaggctagtagggtaaaaaggtaaatgaacacataaaaagggcgggaaaatactagctaagtcattataaataagaggtaaaagaagaaattgatttgggttttggttgaagaggtggagaaaaatggagataaagataaagtgcaattgcgaaggagagaagtgtgaagagtgggcaatcgtagaaattcaaggccatgtggaagttcaacctcattttcaacttcccatccataacctcccaatcggccaactctgccgcccttcttctcaggtaaaccatatataattattacaatctattatttttattatatataaatgtcgatgacagatctcaaccattcattaaatccaaaggcagaatttttttatatgaataataaatttttctgctatttcttttctctgaacttcaccctcgatgtgtgattcaatgactacagtgataccttctattgtttatactcaattaagagatacctctttgtgattctcaagaagaggtctcaagtttatgttattaatatttgtaggaagtgtatacatttactgttgggtaccatgaattgacgggaaccaaagtggcgttgaagaagccattgttggtgttgaagaaagtgaagcaatcatcggataatgtagctttggaggtgattggacttattcgccaccgtattttgttcaaaaccagacctaaagccctcatttccagttgagttacttttttgcttttcattatttcacgaaatttcaatttttgactcttttcattttttagctactaaattaaacttattaagctaatctaaccaattatttaatctcagaaccacaaccaactatgaaggagaaggagagagccagggctgcagaggctaagctgcctaactaaataaactagtgacccaaatgagtcttgttctctcttacaactattgttgcttttttcttttttcttttctctgggtcaatatagaaaacatgatcttttgtgagtggtgtgatgatatatgaacatgaacatcccatctatttatgaatgttttcctgattttgtgtattgttgttatattttaagcaaaaaagggtttcaggctcaggaatgtaccaagtgaaaagagaagtaactatggatttcactatagagtaaaaaagtagttccatgatgagaatgtaaacaaaaattgaccgtgttttaatcagaaacaaatcaaattaagaccatgatttatttacactcgagttactgagttacagagctgcatgtgggtatactgttgttttaggcagaagcagggcctgttgcacctgtacgagctctcaacatttcggttctcttgctccttgccatggcttccaccaaccattctacgccttctttaatccccagcctgcaatcattattcataatgagtagatttcatctcgtacaattcaagcaccaagaacatgagaaactagaacatcttagtcttggtaaaggatttcgataaagatgatcttcattataaaatcatgaacacatgtcacattgagaaagattaagtgtgaagttcagtgaattttttattacccgtcgtatgatgaaacagcttcaaacatgtaaaccctttcatccaacttctttaggtctaaatatctagcaagttcctctgaggatacagattcagcaagatcctgcattttgaatgatttatcataaatgtgacagtttacccatgaagcaaaatttcatacacatctaaatggttaaaatgccaaaacatgctcaaaatgccaatttttttaaacagtcacagatgaagcttaatatgccaaaacctaagacaaatttgcagtgaagcttcaaatgtcaaaggttggcatcagttggtcttacctgcttgtttgccaaaattaataaaggagctccttgcaaatcctcatgccgcaaaactttttctggtttaacaatgtgaaggtattattagtatcatattctaaattgtaaaacttttatctggccacatttatagaaagaaagcaaagacagttcaccaactccatgaattataaaacctaataattgatcaaaactcacccagagcagattttgaatcttcaaaacgagatgggcatgcagcatcaattacaaagataacagcatgtgcctcttcataatatttctcccagattgagcgaagaccgggctgttttcgaaaaagcaaacaatattgaatcaggaataataaattttcatccatataccggtaaaaatcttaggggttcaaccacaaacaagatcatatgcaatactacatgcattttgatttcattaataatttgtaaggattattgctgtcttttgtaaatttcagctcaaattactaatatgaccacttccataagcatccaacttaaagttctagaagccagagcctgtcaagctttcatttttcctattcttgatcgattgtttccaaaaaaataagttagctactgtggatagatagataatctctcattgtttagacattggatttaaggttagcagttaaaatttgacatcaagaaaaagttcctaattgtaaggaagtccaaaaattcaactaagtagccaaaatatgaaacgttcaaaaagctgtcagctaccagcaaaacatccaaaaaatagttgaaatttccatcgacgagttttacatacctggcctcccaaatcccagaaaacaagttttgtgcctgagacttctatacgtccaatgttgagtcccacagttggaacaattcggtctggagacaggccttccagatttgaatacactgacttcaacttctctagtaaagtctatcaaataagcaacagaagatagaattggcgtttgtcaaaggaaagatggactataatcaataataggtaaaactgatgtatgtgaaaagttaacagagaagagaaatgttaatatagcagataagtaaatctcattcatataggaaatttcaataaggagtggaagatgcattacagtctttccagccttgtcgattcccagaatgaggacatgaaactctgtcttactgaacatatacttccacagtccataaaacaatgaaaacatctcttgtctatttttatcttccttagtatgtgttcctttccaaccttcaaggcgaaaaggaggacttcacaacatctcactcaagctcacaatttcaaaatctgagaaggaagaatgcaatgttcatcaatcattattggctaaagagtattatgagttaacaagttaagaataagaaaatatctacatgaagatacaattcgcataagtctatctctatctccatttttcagtttaatataatcctcaaatgactgactaaagcagtgaaattgtcaaatcgaaacaccattcttaagtctcaactcaatacttctataaagtcacgaaaacaaagaaaacttctttcaaaagattaaatcaaagccttattagtagctcaatttatgttcttcagtaaaataaaaacgaatcaatctgttcgacctttcatatgctcaaacgtataaatattcaaatcaaacctgagaccaaataattcactagtcaaattggatcaaacaagataattaaaacggagttctctaagtaatagcatggaaataagttgacccagaaaactaaatgatataaaaaaatgaaagacacccaattaactttgaggacttaaaattacaacccagataggaaaattactcagatcaagggaaaaagaaattacacggttcatatccatatacatatataatcatatattagtattttaatcagactaatgttgagtcgtagcaaagatgagagaccaaaataagtaggttaaaattcagattcgtacttgaaaggatgaagaggaggcgctaatgggaccggccggcaaactggagcttcttaagcaaccaaactctctctctctctttgagatggttattgctttccactgagatcgttcctcaacattctgtgtcgaaaatgcccatattacccttggtgcaatttttagatccacgagatggtggttctgtacaattaatgtcgtttataactaaaactatgtgtcgctttgcaaaaaaacacaagcaaatggtgtacaaaacatatatttgttataaatattaataattatgtggattttcaaatcttttatttattaccattaattataattaatattcttctttttcttagtttcttaatatctcac

SEQ ID NO: 377765 - DNA, 6587 bp, Cannabis indica
agatacaaactacacgacatcctcgatgtaaccaaaccctccagctttacaacattaggatgattcaatctccgtaaaattagaatttctctagccataaacttcacactctcaggctccagattgtcaaatctaaccttctttagagcaacaattttacccgtcaacatatctttagctttgtaaacattactgtatgtacctgatccaatcttaaaattcataaaaaaaaaaacagttaatttcaaatcacaaaacaaaaatagaaataaatctgataaaaagattaatgaaaacccatgtcttaaaaacatcatgaaaactccatctcaatagatatggcccattacattcattacacttatctgtcacagcaatgaaactgacagaattgccctgttgttcttaccacataattcatgacaagcgttgagactaaaaaaagaaagaaatcatgacgaaaaacaaagacaaatcaagtaaaatgactatcttacgtttcccctcagctaaaggaattaccatcaaaattgtcatagtttgttatactgttttggcaatgctatgtggaacaattgaaatagaatcatgacttaagttgtctagattttaaagtacaaggcatgagataagtccaaatcaggattaagaactgagcttagcagggttttttaggtcattaacgttgttcagctttctaatttcggaaacaaacaaaaaaacacatacataaacatataattttacaaagaaaagaaacaaaagaaaatcaaacaccttatcaatcttctcaaacgtgtcagccctccttggaatccaaccatcgagagcttccccacatgcgtcggtgagccagactggccagccagctgccacctgctctcctcgaccatgcttgggcagattactcaacctttgattgggcttcgaccttcttcttccctctttgggtggcctctgatctcctcctccatcaccctttttctccttctggctctgggtttcagttgtggtcccctcctcatgagcctcaacaacattgttttcttctaccttccctatcgaaacctcatctactttccttgttgtggatgctacactcgaatccctactctccctcttggactcggacactgttcttgatgatacctctcgcccaaacacacaacccatatcttgaatctaagcctcatctcgcaaactaatcactacaagattgcaaccactttataagcataaacaacttgagaagaagaaaaaatcaatccaatttataagattgacctatatattatctgtatactcataaacccagtaattaaaacaaaacaaaaaagtaataccatgattagagaaactagaggtagctagtaaaagctcgagaaagaaatatgatctgggttttgttagaataagcttaaagtcaaatatttgatctgggttttcttcaaataaagcttagaagtaaaaaagaactgatctgggcaaaaggaaaagactgaaacttgtagaattttaagagaaaaaaagagggttcagaatgaagaaaagttagagttgaaaaaggccagtgatccaacatcatcaagaacaacataaaaacaaaaacgcttatacatagaaatagatagaaagagagaggagttcagagtaaaagtagtgacttactgagattaaatctgagttcgtaattggtaagaatcttctagaaaggaaaaagaaaatagattttgaggtatgtttatatatggaacgattgatggggttgtgagttctatgatgatggccgtcttttctggctccagacaagaggacgaataaaaggagtaccaaagcagatcttccaattcacaagtcaaacccccagaactgaactcctcctgtctctctcctctcctgccttggatttttaatcctaacctcactgccaagttttctctttctttctttcttttttcttttttttttcctggttaaaaaaaaggatatgatttattataatttcaaccaaatttcttctgtcttctttttatcaatggggaggattaatcatatcaagcttaggcaggtgagctttttggacaagtaaaaatggttcctttgtaagaaattcccaggctttgatgtttaaaaaaaatgtcttttttattctagaacgacatgtcgttcatggggccgggagcattgagaacaggtttggtttgatatattaataacttaatcaatgaatttttttgaagaactattctagacatcagccaattttaataaatgcccatactcattaagaataaatacataaaaaaaaaaagttaggtttaagacaaaaatagaaggggttaggtagttgacatcgtatacttgtaatatataaattccatttgttgagttagctgcacaattgataacatttaaaatcatttcatctaatcccaaatagaaaatttaagctgctataatatgtccacatgttgatatttcacgactaaggaagaaattgaggtttaaaaaagaaacattaaatacaacatgataaaaatctaagttgaaaaaagaattccctagaaaactaatatggtaaaagaacaaaatttatagaaccctttgtttgtttttagtaaaaccaaatttaaaatggaaacagaaggaagaaagattatgcaaagaaaagaatatgcagcattacttatagtttatggagaggagtaattatgtcttctgaacaaattttctgcaactgagtcccaagacaactcaaggatacatatttgagagcctaaacttaccaaaacagcgatgtaatgcaccaagaaccaaattatacattaagaaaataagatagtttgctaaaattaaccaaaatttttgagttccaaagctactacaatttcctgaacttatcaatctgaactcttcttcttcttctttttctctttctttgtgctgggtacttctgcttcttcttcttcttcaacatgctttcttttcttcttctttttttcacctgcatcaactttttcaccatcattctgtacctcagcttcctcggctgagtgtttcttcttcttcttcttctcttttttagcttcaccatctgcatgtgcattaccatttccattctctggcacagctgctgaatcctcctcttcggtctgcctcttcttctttttcttcttctcttttttgcctgtaacaggagattcctcagctgcttcctcaatcttcttctttagagattctttcttatcagtttgtccaagaatagaatctgctgcagtgttgtaactctgcacgggaaaataagtgtgaggcttaagataaactgaaacagagccacaaaaaacaaaaaataccaaccgcaaagcatcaaagcaaaatatctagttatcaaaaaaccaaagcaaaatatctaaccttagcagcagtaatcaaaccaccagctcccgccttcctgtccttgtcatagacttctatcttcggtttgcctttagctgatccagcagatcgacccaactcttttccttcaagattcctcaaccgtgcctcaagctatgtatagaaataatatcagtaaacaaataatttccaattgaaaaataaaacaaaacagaaactatgccctagtgtaccttagctcggttctccaatcccattgagttatcttgcccatccccaagagcatcatatctaattgccaatgctgtctttgcagccagtgaccttgaaatttttcccttgagcttaggagctgcctgcccaatcaatgatgcatggtagataagcccatacttgggagttgcatgcttggtctttagtgccctgaacagtgccttctcagcaccaagaatttggactgtgcttccaggttgttttgcaaggtttatcaagctacccccatgggcaatgaggcgagcaccaacaagctctccaacaagagcagtcaagtttggagcgatggtgttcattctgctcttcaaataatcgtaaagttgagctctgtactcagaaagagaaatgacctggtcacaaagttctttgatattaatcaaatcaaggtcactgacttcagttcccatagaaatcatagatgcttccttcatttcagtctcaacctcctcgggcaatatctgttaaattttaagatgccaaagtcacacatcaattaccattagagcaatcattaactttgaacaagataagatgattatcaagaattctacctcagaaaaatcaagctttgcagcattagtacggtcacccatcagcttcacagccttggcataaagaatgttgtcctgcacaatctttgcaagctctggaaaatgccaaccgtaccattctcgaactctcattgcataagtattcagctctttatcaagatcatcaagcaacccaatggcttgaataatcattgtatcaacctagaatgcagataaatagattagttactactcgaagagcctgaatagcttccaaagcataaactaacaaccctacctagccttgacataaaaacaaaattaaaaacataaaaaagcaaaatcaacagagggatcacaattattcttgaaacaaacttaattaggtaactctatcaatataatctctacctcctttttgaaataaggattttttttaaaaaccacatatcaataagcatcgtgatttgttataataaataaaagaacacaccttgtcagcactgaacttcagcttgtatcgagcaagactatgagacaatcccaagctcattggtgccaaatctttagctgataggccagtcagttcagtcaattgacttcgcacacctctcatcaactccataacaacattgttgtggacacagtctacttgctgcaaaacataagacaattcagtgtagatgaaaaaatcaaaatgacttgatatgaatctgatagacctagttttcttaattgtaataaagggtttttagtcataaaagtaattgcggaccagtttttccttaatgatgctcccaagctttgaatctgctacagctaaagtttcaccatcacagtgagcacgcaaaaacttgcgtagacctttactgggcttactgtcaaccagtaaggtcgttgattctaaagcttctgctgtgttttcatacttgttaaaagcaaccagcttgaccacctaatgtcaattaaaaattgagattagaactggtatgtattaagaaagcacaaaaacaaatatcaaatcactaatagcacaagtacaaaaacgataagagcaattccatcatcatctttcagtaatgtatataacgtaaagactcctaaaatgtctttgttcctgcccaagaaagagttacctttctagctgattcaggagtagaaaactccttccacaagtcctgtacaaggaaatgaaaaaaaaaaatgtaaggcaccataaagtttacataacattttttgaaataaaagtaaatcgaacttaaaaaaaaaaaagaactttagatttatttcaagcttaacaagataattacatcaactttggagagcttcccttcatccaacactttcaatagggcgggacccgcctgagtctcatacagaataagcattttctatgctcctcggatacacctgcaaaatacataaaacccagaattaactcaaccccaaaacacatgactttactcatatgtataaacacacaaaaacaaacatggatattcagtgtaccgttttcaaaaatcctactaacgatacttcacgaaatctaaaacccacatatgaactaatcacaaccgcaaagacagacccacaaaaattcctttttgatttgcaagttacgattccatcggaagtcttcaaaacatacaagacatacacacagataaacatatatgcatacatatgtatacccataatcagaaacagagaaagagaggaggaatgctgatgaagttgcaatgaaaccctaaaatacatacctcttgagtgcgtactgcagagtgtggaagggagacgaggagaatagcgaggaggaagaggagcaaagggtctagggtttaaagactgagcgaggtatatatagcgagtttttagagttattggaaagagttatgtttttgacatagacggaagacatctgtcatccctaggggttattagtggaatttcatacattttgttaggggtatatttgttatatcagtagtcaaaaagtagaggagttgctgatgtggcaagctcaaacaagcgggtttatgtttaatgagatgaggctttgcacactgtatctcaaacatattagggtttttggtatagtttcagttcagaatggtagggacgtgcaaatcaattaaaatgtaaattacataagaattgtgtaaatttttattaaatttggcataaaaaaaagagtgaatcttatattttaccattgtacgcattagataatttttaatggatggtcatggtataaattttggtgctaactttagctcaaaatgaattaattaatattatacagtagaacctctatttaataatactctattcaagaataacctctaatttattataaaaaaatcaagtcccgatttgggccagttataa

SEQ ID NO: 377766 - DNA, 2410 bp, Cannabis indica
aataaaaacaaaacatatgtatctaaatatataaacccttacctaatttaattagtatgagacttgagatgtggaggtataatcaaaatacggtatttttctactttctatttataaaatgatgataattatgaaatcagaactttctgtaatttgtatatagaaaaaaatggcatttttctaaattttgatattctctaaattaggggacttaaggtctagtttggagaaattatattgtatactcactttactttacttgttttaattttaacttttattttcatattctaagatatactcacttttatagatgatgcccccattataccttttagtttagtataaattatatgctagacataagtgaagggtgaatgtatattagacaacctactcataaaagtgaatatattttaatgaaatataatatgatggtatttttgattaatgaatataaaaaaaagtatttctcaacttatccctctagtttgtctatacttataggtatgaagaacaaacacaactttatgaatctaattcattgaaattatgtcgactagtaataaaatagtcatttaagtcatcaatagggcaatataaaggaagcctgtaagggagaataaggtcgttgaaatggcaatttacgcaaaaagaaccaattggaaagcaagagtcatgttttgccaacgataattgactttagaagctaggcctgaccctaggctaaggcaggctaggctcgtgcctagcccacccaaacttaaggcccaaaatttatatgtggaggaaaaaatggtgatttcataaagttttagtaaatataggtcataacctaccaattacctctacccattagatacaacaaaaaataaaaacaaagaaaaatttaggcccactttttgttaagaccaaccctgcttagaagcatagtcaatcaatcacctaacattaggtcaagtgaacttaacgaatgagcgcaaaaccctagtgatctctaactctcgtcgaatagcccttgttgcatagccacatttaatttggagagtaagatgtagtgtttttttttcttttagtttcgtggcaagattagaagttcagttactgtactaaacacactatatgtaccacatggggtagcttgagtagtcttcattcgtcttgttgtatttttttataggtcaaattagatatgaaattatttaaaatagttaacgttcaggcttatgaaactattttcaaattattcaccatttgatttactaggtaatgatcaatttgagaaagatgacaagtaatagtaacaactaataacaagagacttttcaaacctagctcctttactgtcctagatctatttttttattgatgttgtagtatttgtaggaattaatgaacaccacacatattacattataaggataggttgaagttgactaccaagtcaacctaaagtaaactcacaccaaaatacaagactaatgtacataatttggttgattaaagtctaaagagtatgatttagtacataaataatcactggatcagtaaaattgtataaaattgaacaaaaatccttaaatctaacaatctcaatagttcattcaaaatcaatttttaacaataaaaaatgttcaatgaatagtacatattaaagtttaggaggcaaaaatcataattagtcttttcataaatctttacaaaaatataaaagaattagatttttgagattttaaaagatcaataaattgtacctcctctttcaacattcttcctccgtgctctatccaccaatctcctcgatactaaacataatgttaataaagttaaaaaagtgtaactaatttcttttattaaacttacattatcactaagaaaatttataactaaaaatataatatataaaaattacaatttatactgatattaaattgtcacacaaagaatagtagtacttatctaggttattgaaattgacctagtcaacaagataaattatagagacttgagattactaattaaaataccaaccccaccgaattaagaatcgacaagtgtcaagattagattggtttttgtagactataaaactctaacctcctccctccttcaatttgtacatttaactcaatatcaaaaccagagtactattattattaagggtaaatgatgttgtgtattaggtacttggttttgttggtgcttattattaatattggtgtatcaagtaataatagtagatgtttgtgccttgctcaagacccttacggagattatggaaccccatacagacccctgacacccggaaaccgtaagactactactcaagctgctaccaacaccaacaccaacaccaatcatcctactttttacaaatctcccccacgcccagccaattaattaattgtat

SEQ ID NO: 377767 - DNA, 7776 bp, Cannabis indica
tgtattttttgtcgatttattcgatttagtttggacggtttatacagatttgacggtttgtaaacaaattattattattttatgtctctaacaataaattaaaataaataaaataataaataacaaatttaaaagaaaaacaaattaaaaattattgttattttatgtttccaacaacaaattattcagattaattgaacggtttagaataatttgtaaactacccaatatattcattgggtgatttggattttttattatattatttcaggttgtattttttatcgatttattcgatttagtttggacggtttattcgaatttgacagtttgtaaattttattgaacacctttagtgcttaatatgctaaaaataaaaggaaattaaaaaaaaaaaatagtctcctcagaaaatttcatattaaattgaataatactaaacaatatatttataaaaactgaattaaggtcttgtttttcaatagcatgtcctttcaatcatgttattgaaaaaagtgaaacttgttctgctataatttttttttttaaaaaaaaaactccttaagtaggacccatccaactaataaagatataaggataagttatgattaattttttttatggaagttatgactaaatttactatcgataattttattattgatggtgtaaacttttgttatgccgaaaataatgataattaaaagaagaaaaaaaaagtaaaagaaagaggtgtatgtaattagttccttaaattattctcacacgctttcctccacacgtgcgtggcaattattgccatcttgttcgcgatggacaaaattcattatcaaaggcaatacaatagaaaacaaaagagtattgctattaggtaccactagtgtctagcaccttctcgacatgtcgcgttgtgattagcaagcgatactttctaaaaactattatattaaattatatagcacccgatacttagttgaaccaataacgaaattaacacataggagggtgctagacaccactagtaccctttagcatttctcaaaagaaaaatatttaaaaaaaattaaaaaaaaaaagcaaataaagatatacaaaatctgacacgtgacctatccgtacatctaaaaactgtataatattgttgtattatttgagataataagcttgaggtaaagtgggatagtgcatgttatgttacatttgtggcaacaaaagatattattattatttgctaagacagaaacctcaattatctggaattaaacaaaataaaaaatataaaagaacctcaattatcttctgtttaggacccacattagtaaaactcaatctaatcacaaaaataattggtttgattaataaagccacgttaacatgataaatatttagaaacaaaggagataattatatattaaaatatttgatcaacaatttgagttattcttttgttaaatctacaatattgagcactcaaatctttctaattaaaactaaaaagaaaatattggtaagaataaaatcataatttatttattaggccatctccaatgctaaaatttaaatttggtgttaaattaatactaaaaaattactatcctaacactattttctttttcaattccaactataacactaaaaattatactaaaaatatattctttattattaaattattttatcaatataataagaatattttaatacatatatttatttattttattcttaaaactattatttaattatttaaaattaaaaaataataaaaaaaaaagctttgtcgtggtctacagtgcccgctattaatagtggaacactatagatccccatgaaaataagttgaaaaatagagttcggttggagtgaaaagtggagaaaattacactatatatagcattatagtgttgggttggagatgccgttagagtatttttatgggtaaatactattttggaccttgtattttacaaaagttattagttggaccttctgttttgttaaatgacaaaatggaccctgtaaattccaaattggtacaaataggacactgaattgatttttactttttagtcaaaataaaatttaataataatctgatctaaaagtgttatgacaaaattgtttacattttttgtatctgttaatattagaaattgtcttcaatttggttatattaaaaaaattgtcaaaaattaagctcaaagttttatttttatcattttagaaaatacaaagtctattgtgtcacataacaaaacatggggtctaatcagtaacttttactaaatacaggctctaaagtaatatttaccctatttttatttaagcacaatttgatatttaataccatactgatataacacgttgtaaataattagcgcttttttatattatttattaaattaaattgtatggaatatgatattaatttgtacaaataatcacatgacacttcttgtagtacttgataattagcgtcgattcaagttaatgggatgatgagaccaaattccaataatgttatggatgattgcatcgacttgagttgtaaacctcagttttgaacagtgtttaaagcaataatacaattctttgagaagccattacaatttacagcccaaacaacaaagagaagcaataaataaggagggattattaggcatatcaaacattttaatttttattgccaaactatttgatgatattgattgatgatttatttaattttccaaaagatgttttatgaacatatttattagagattaatacccttttccaccaccatcatcaaggttggctatggtgtatggctgtacaagtaagtaagtatatcattattatatggggaccaagacccatacaaattaggaaaggctgtagttttgtttgtgtcagcccttttaagccataaaaatataaatggttatcaacaacaatcataaatcacattctatagaccatagcactcaaaattcttcattatttagattttttatggaaaactttgcttgcagatcacacagatgaaaagggggatgacccatgaaacagtggtcttgcattaggaccctgctgttgaaagttcaacatccaagataatgatattgtttttgttaatgataagataaaaatctcattctaacttggaaaggtgtggcatgtaataagacagggtaataactttcacaacactgttgcagagcattggtaagtgatacttaagaagacctcgctttaacagtacatactacctaacttcactaccaattgaaagccagctctcaatttgagtatttaagatttgtaaataaatttgaaaaaggtgatttttattggcatctatggtgttgaacaccaatgttgctctccaataattctttaaatttaacaaaaccccctacgtgttgatgtcaaattcactaactagtgagctagaaaacccaccataattgatatacagagttttttttattcaaaattaattgatatattgagttacggccttatttcctaaaaaaaaaggtgaacacacaaacacagtacattacattcaaacctcatttagtaagctgtattgtactgtgttacattatttaatacaatacgatatttggtattgacttatattaatagattgtgtaaagtttatattttcaataaactctacccaacattgactacaagtcaagtccgggtccgtgtcttggtcccaattccggtcccggttcgaatttcaagtctgagtccagtccaatttgtgcccaatctgtgtctagtctgacgagtccagattgagtccgagtccgattttgggtctgggtctaaagtccgagtccgagttcgagttcaagtttggatctgggtttagagtccgagccccaagtccaggtcccatcccgagtccgggtctaggtccgagtctaaggtttgggtctcgtctcgagtctggggtcaaggttcaaggtctggtgcccgaatccaggtcagagattgggattaacattttatcctttgtaaagattataatacaaactaatacgaactatttgttatgtattaaataatacaacttacattgtattacaaaatttagtcgtaataattaatacaatacattattttatccaaacataatattatttattatttaatacaatacaattcttatatgacgtaccaaatgaggtcataaccgctcaacaactgtgacctttgatatcatgaagttgctgtattgagaaccaattagtcccatctaatttgagaggaacgttttgctatacgaccgactaagtacacatcttgacatgatataaaaatacagagggttactccagcaaatagcataaagttacattattatttgtaattcacaattgcatcaattatgtataacgttacacgtctatgtatgtaccatagcattaatataaatacacatatttgtaagtattagacactgtactacaagaaagaagggatcataagaccgttatgtattgaagcttaatcaagttctacaagactggcaagtttttaactatttggtctttgcataattaacaaggagatacagagctttgattaaaacacgtcaatcaagatactctgcaaaatcatgataatattgttttgcttttattccacagcaagagatgtacattgtataaagaaccaaaataaagggatcaagccatgccaaaaattcctagtgaggctttcctcatttctctgaattctatggcacaatatgtaatacaacctcactaaataatagaaaaacttacaagaacttgatatttaaagatttaactagtaaccattctgttttaattcagaattcttctgtttagctgattcacgctctagacagcgcctttccctctgtgcaacagaaacaaaaaaaatatatatataagcttttgagggtagcaaggggttaaatcaactaatcaggtttagcgagatacaaaattaatacaataatcccaatgaacattgcaccgcacaagtcgcctctaatctagtgggtgagtttcagagtcctcttgctatgagaaaatatatgattcttgttgctgaaacaaaactctcttgattgacatttaatcaacatgtggttcataaacctctcaaatctatctaatctggttttaacaaaggaggtggtattcatatttcatgatgagcctgctctaatacttctcagatattttcaagacaaacacactaaagcgtccatgtagcagctaattgaaggttcagataatttaaagtttaacatcaccagtttttaaaaaaatgatttgataatgatcggcctagtggttactctatgtttacaagcaaaaataattaaaattacatacccaaattttcactaaattggtataaaattaaagaaaaataactagtcataacaaaacattttggaacatttctcaaacacattcactaaaagttaataagcagttgagattgatcatgctttggaatctgcatgcatgcaattcatgctgtgattattattggaagaatctatttaccctttaatactttgtaccccacacaacgatttagaacaataatcttcaaggaagaaagcataaaatttgcaataggaaattataacccaataataaattaaattaaaaaagaaaagaaagtgtgactacccttctttcccaatatggaagaaagcaaacaaagtcatagacggattcaatggaagacactagtacagcattgactccagtgaacaccaagagtgcagtcataggtcgtgttctatgcggcatcttccttcaatactaagctgtcaactctgtatgtatgagtgtacattaaaatgaaaaacaaaaaggtaaatattgcaacatgtaacaagaaaaccttatagcctaacacaatccacaattagtctgaacatgagttgccaggtctaatagttagaaatgagagaaaatcagtaggtgttgtattaatttaaggcaaaacttagttctcaagagtgtttcatcttgtttctacctttatgggggcggtttcctttcatatataagatatagcaaatcacgctagcaattataactacaatatgatcactagcattgcagaacctcaaataacttgaaaacgtaaaataatagttcttaaaacattggagacaatacattttcagcaacccaatataaacaagtctacaagaaagtcaatagtaaaatgttctaatacacatgtcatcaaggctttttaagtttgatatatgtaattcaaactcgtggggaaaaaaaagttatataatcagcacttcaagcaaacaactatcaaaatatatagaggaaatacttctagttgatatctattgaactataagcgacatttgcatcaatgtaaatattcatttcagtttgaaatctcctaggaatgacaaagatcactgcaatagcctcatcacagatttatttcaaaatttctatcgcactcaatgagagaaatcaaccttttctccatctagatcactctaagtctctaatttcttaacagcatcaaatcaaatacataattataacagcataatactatattgtttcaatttaatttgaaacctgtcataaatcataagtacacatatgataaaattgtacttacacattccaaaagcggagaaaaaatagacatcaagaggttgacaaaagaaagctaaatcaaactcaatatttaaaagaacattatcagttggttaaagttcacaacacacacacactcctatttctcaccgctaatcaccttccacgttaagaactttcaattaaaaagaaaaaacttggatgcaaccttaatatactatgatagtcaatgtgaagtgtaaaatagcaaatgaccacaatcatgtgtgtgtgtgctgagtgttttagaactactattgatgattataaagagatacatcaaactccttcagcttgcatagtcaaaaccataaggctaatcataattataacaaaaataatctcttagtataaccttagtacattatacaatgttcaactgaaatgagacactaagataagttcaaatagatgaaacccaaaaactatggaatgcttaactcagaagcactacccagaaaaaacgacaagagaaaattagaataaataacaaactcaagcaaacagttgagttgataactcaccaggaataaaatggaggcacctcctggattgacagatgaagagtttgatagtggtggaagcagaagagaccactctggaatttagggtttttataaatatgagagaaaacacaatcccaaaaaagtaaacaaacactcaagcttctcacggtttcaaacccagaacaaactcactcaacctataaagtttacacatttctcggtttaaaaaccaagaaatcacactgatctttaagacccaaaaccacaaaataaaacccagaagctaaaaacctctctattctcacggcgaaaactcaaaacccagaaaccaagaactaaggaaatgttatattggcaatgtgggacaatacaacttgcataaatctgtgggctaaacaaggtatcacatttgttattggaataattacacagacactatttttgtaagaaattataattttacatttaaatatttttttttatatttttacgattttttcataaaaagaacacgaaaacaacaagaaaattacataaaaataacagaaaaatatcatccaaataacatcaaaataacatcaaaaaataacatataaataaca

SEQ ID NO: 377768 - DNA, 915 bp, Cannabis indica
aaatcatgagtgcaagacaagaaaccaagctctaattacagttaatacaattcaacaatgaataaaacgctttaattcaagtcccttgagttaaaaatcaactaaaacagcaagattattatgtttaagcaaaaacaaaaacgatgagttcccaattttcatatgaaaaagctcagtaaggaattttatcaaacacctaaagaacttcatcacaacaaaagcaaaaacagtaataaaaagtactgattattgattaatggtaccttaagaagttcatttgattcaagattctccacaaaagaagtggcaacactagcagtaacaccggatttccccaccgactgagatttcagcttcttccctaagctgtgagcgtaagacgaaagctccttcttttccttaattgtaagactcggtagcttcatcccatgagtcctcacacgcaaagagctcaaacccactttagattcttccgctaaattcaatttatcgctcttatcttcactctcttccttctcctcaacatcattgtaatcttcaatttcaagctcttcggcttcttcttcttcttcatcatcatcatcaatgtcatcttcatcttcttctacagaaatggatagagacccacttgaggaatagacgggaggaggagaaagccgaggagagagaaaagaatgggaaactgttgtggtgctctcatgggggcgaggtgagagtcctccaatggagtatttgggtaagttcttagagaacgaaactgtggaaactagaataaggggtttgagaaaacaagccgacggtggcgatggagttttccggtgaagaattcggtggagaagataagacgctacacctgaaactgccgccataattcagtttactgtgaaatgtacttcctttttcgataaaaagatt

SEQ ID NO: 377769 - DNA, 1957 bp, Cannabis indica
caaaatgaaatagtcattccacccaaataggtggaattagtagaaagtccattctaaaaaattgttttcttttccatttattacttccaatcaaacgaaagttcattatcttcttaacttgaaatgaaagacatacgttaataatgacatttattctaaagaaagaaaacttggcattaagaaaatgggcatacatatgtttcaaattttagtttcttataaatttttctaaactagattaatctcaaacaaggcttaaaatataaagttgaaacaaaatatataagtagaagatcacaaacttaaaggtcttaaattgttgtagctaggtatgtaaaaaccatagattacagaagaagaatgatctagcaagataaggaaacaatccttcacgagcatatatataatagcattatcacaccacaacaaaagttataaatattgtctatatagttctacatatgcatgatcctctaaacaacacacacacacatttatatatatcttattaatatatttataatattaacatatgaacaagatggaggggtcacagcagcactcgtcaataaggcaacaacaacacaaagctgcaagactgagatatcacccccaaaaaaacaaaacagatctatgtaagagaatattatatataaataatttaatctaataataataatgataagagtgatatgaataaaagtataattagtaattaattaccatccttcaaggaatcctggttctcttcttggtggtggagcagcatattgtggaggagccattacaggagggccttgatagtaacctaaaaacagtaccagccaattgataattgtttttaaaaagaaataaaaatcaaatcaaagacaaattaacctaagctcaagttgaatatttgtgatttgttttaaaatattttccaggaaaaggtaaaagaaagattactactaaattaattaactaaaaagtaattaatacaggtatacccagaagagacatgatgaggtaccttgagcagggtagggataagcatattttggatcattcatgatgatttaatttgttctgatctgaaccaagtaagagatatcaaaactgaagagtttgtaaagtattacaaatgagagaaagggcttaatttaggggaagactgaagaggagtaagtgatgagtggacaaaatactattattgtgtttgagttgagttggtgtggaaggactttataccaaaaacaaaatagtttctttcctttattttttttaatagtctaaaccctatgatgtctacctcaagtcttttacataattaataaatagactctgctttttatgttcgcgttttaataaagttattctttcattttcattctctatttagttcctttacactacactgttttttttctgggttcactttttaggttttgacacgtcttgccgtttttgaatttattctctctataaattcatatgaacacttctccaacttggtttcatttttttggaaaaaattctataatagaccccttaaatgggacacactcttgaaatctcatttttccaattttgttgttttgtgattggttggaagcagttattagagggaccaggtttactgggtctaagcacaggtgattaatgacttctctgaaatatggttgcaaatttgcaatggtgtgccccgtttgttaaatattgaaattttttacaaaacacttcttaacaaaatatgttctcatgtatttttttttatttgaaataattgtttagataatttttttttaattgtcatgtatgttatatttatttaagaatttaaaaaaatttaaaaaaattaaaaaaattaaacacgcccaaaataaattattttatacgcatgcatcattattttattttatacgcatgtgaaataaattgtttgaatattattcttgtaaattattttaaatttctc

SEQ ID NO: 377770 - DNA, 8413 bp, Cannabis indica
atgcaaacagaaaatgcagcgtttcattgacaaactacctcaagcaattctttcacacttctagggtccaatcccactgactgcaagctttgaataaagaggtcctgcagagagcaagagaaacattcatggtcaggcactcatatcttttaaagaaatcagatctttattgtgataactcattccttaacaaaaaaagggtgaaatacaacctttgatcttgtatgaacagcaggatctgtacttcgagaaataagtcttgcaaggggaagcatctcagcggcctcagctcgggaacttcaatcctcattctccacctccccatcgaagatatgacgctgcctagatgcccagccattgcccttttaaacaatccatctctcaccctgtcagcaagatttcgatctcgggtgccaggcagcacatattcaccatgaagttcataacggctattgctttgctccaacacagtttctcaacagtaatctaagcaataaaaacaggcttgtcagagagagagagagagaaaataaaagtaatttacaatgtaaattttgcataagcagctaaaaaacaatcagaaaggagaggaaatcagctattcattgtcataattattaaatttgtcacaggagttggaatgttggataaaagttagcttagaaaagagtgttccataaaggaattctagatcagttcaattaacaaacaagaacatatttaaggtactcacaacatccccactccatctagcagccacatctaaggcttcacctagcacaccgctgaattttggacgaagtacagatagcagtccatgacctcttcttttctgaagattaagttgaatttctgcctgaaagcaaaaaaaaagagactaatattaatagacaatgcaaggtcgaacataaatgaaccaatcgttaatacataagtaaagtcgcatatgacaatcaaatcacatcataatcagagagagatggaaaccatactatcttactcctttctgtgattcttgaacacatatttacttcttaaggaatctctctaaattccatgactgctataatgggagtcatccacacccaatttaatataacacacacactcaccctcagagatatagaagtttcagtatacatttacaccattctttcagtcactaaataataacaatctaaatgagcaaacctaagttggaagagaaatggaagccataaagtaacaaaatcaagaagtgctgtgactgcttacagcctaccttttgtattgtcccccgcagtgaggccaactccagctcgtcaagcggcaaatgacgcacctgaaaccagcgaacatgatgggtgaaaatcataataaaacttacatatctgcggcttcttttggagcttttcaggtcgccaaataaaactcaattttcagaagttaataaatttacctccaagctagcagagtggaaaggttgaaaacaaatgttagctttcagctgtcccttttgaagggaaaacgacagcaactttccattttgcgaattatcgtcaatgttagggcttaatggcctcacaaacatcagtgcaagactttcatctggcctacctgtggcatccaactgcagtcaccaaaattttgttagttatagcatgttcgcatttttatgtagtaatcaaatataatttaagaagagctgctttagctaccttgacacaatcacgtgaaacgcttaagaatccattcaattgaggtcccaacatcagttgattcaatttgagacctgagatcagaacttcaccagcaagacagcctatttcccttcattactattcacttgttgcgtgttattttcaagactcaaatcttgctcactagatttcaagacctttccctgaaacttgacccttcccgttgctttcaaatgcaacggctttggagaatcagaaagataagctgagaccaagctgaagaactcaaaactacgcatacgcaaatccaactcaatcccctcaacagtaaatggcacagaagtctttgcactaaaatcgtttgtgtttaacccgtattcatcacaataagatgtttgaactttggttgtcaaatcaaaagcaacagatgaagagttaatagttattgaatcatgtgaaattatcatatctccccgagcctcactaaatgacccttcagcctttggtgcagtccatctaatatcaaatttcctatacatgaaaaaaaaacagcataaacaatactgaaaaaaccaaaaaaataaataaataaaagaacttctaaaacacctaaaacaacataacaggttacacagatttcttgttaatgtcttacaaaaattataattaaccatttatatatactacaattcaagaaaacactgaagtttattgattatatgtaggaaatgagaaaacaaataagagaccaaagaggcttacggtttcagcaaagaacccgagagttttgtctctccatttaaatcccctaatttgagtggaatcagttgaagataaccaggcatatatcgatccataattttatcaaagcacatacttccagaaaaattcacatccattgcagtatcatcctcctcaccctgaaaatcaagtattcaacgccaagattgattttcaaaactacttaagcagaagtccaaagattaaatttaaaaggcagaaagaaaaatcatatcatattccaatatttaacagccaattagataaatttcactattgctaggagaaatgattcccacccacccacaaatattaagtctttatgaactgactgaaaattaaaaagataacaatagcaagacataatatcacgaaaccacagatatctaaatacagcaaatttttaagaagcataccattgcgagatcattaaccttacagccaaaatgattaaagaaaattgagaagtaaatttgtgaaaggagaacatcaaagcacattatgaagaagcatttatgctgtcatttgagttaagagtaaccgtatatgtaaagacgatccagcaacagagaactcgtgctaatagcagagcattcggtgagatcaacaacaagaaagacaggctgtctcgtatgaaaataatatacctctgggcaaatccatgcattccccgcacctcgaatttcaccaccatccacaagactagctcgaattccatacaagtcagccatctagagcaaaaaatagcttcacaataatataaccaggtatgcataaattatgacttactattcaaaactcaattagttagcattaacaaacttacacaattgtcagtattgaaagtgaagttggctgataaatacgaaaagggaatgcgatcaaatgctgccactgcaccagcctccttactttttaggacagcttcagatgcacaggatggaggaaactcagaagctaaatgagacatctttcgagaaaccattccacttcctacaaatactggagcatctagtggaccttgacaattaaatacagcagtcactgaaccagccagctgcaatcaatagagaaaagtatgaacgaaagtatactgatattctctgcctagccctcccttttcaaaggcaatgtctaccacattactgaagtatgtttccttcatccagcatgctccaccattagtgaggttactaagattttttttttcgttttttgttcatcaagctttcaagcatctttttcagtcgctgcttaatctcacaacatcaagcaacatttcatcaaatcattgttgattttgatctgtggtttatatcaattattgctataagcctataaccattattgcttctccatgaaagaattactaacaaccacagtaaagataatttttccattttaattataaaaagtagtatgaagatcaaaaagctcaagatgcacataccggaaacaagagaggtttcatcttgaaagtattcatcaaagcatttacttcgacacagggaacctacgaataacagtttcataaatattatgagtttaccgaagcactaaaaacagaataagaataacaggaaaggacaagaaggaacctatgaataagagttttatatatattttgaggttgctcaaacataacgaggaatatcacactctcattaaaagaggaggtctactattagaaaatctgacgataacttttgttgaaaaaaatatgtatgtagacaggaattaagatagactgaggacatatttatttgcaactgttttcccattcattctcttgttgctaaggatttttttcaaacagcctaggtactaactattaaacatccagaccaaattccaaaaataaaatgttgtgagaaaaattctatttaattatattgttgttgcaataagagagaggggacagaaaaccaaggctgcatcagcaggcctgagttagctcctaaaatctcattgataatcaccgagatataggaatcctttctaatattgtttaataaaaatgaattgagaaatggcaactctgttccgtggtcaaaggcagacttcaggaaagacaacaataggtcagttgggcagagtttgacaaaaatcaatttcctacttttgctaaacaccatggaatgacaattcaatctttgtaaataagatatatacaagtataaataaataaatgtgtactttaaacaagattcttgggagtaaagaaacctttataaacttcttgtaatgattgatattcatcattcaacgtaagagacatttgcataaaacactaaccaagtatttacaaaaaattatcatccaccttttagctcattaaaattatgcaaccaaacaagaagtaagctaagaagatacctgacacataacatgaaactctccctcgtcgggatgaattccaaaatctcccgaggcctctaaaggaactgcaccaaaagacccatgtgcattgtgtaggaatattcgttggccacggaaacataagcttgctgaaacatcctgtacaagaggcatgcacaataaaacaaaagaactgtttcaaaaaaaaaatctatatttttcttttttattaagctaaaaaatacaaatatagcctaacattttgaaaaaaggtgacgaactctaattaggcatcatttatttcctcaaccatcaatgaaaatgaaagtagaacatacagaaaaacaagatggagcgtcaagtatttgaaaagctaagcctgttacatcaagttgcccatggagatttggaaatgtttctcccgtagacatgcacacatgaacctgaaagaaaaaaatctcaagataagccaaattttataagaaagagataactagcggcaactgtaaacagtactgggtttcccactatcaagtaataaaacaaataacaaaacaatatatatgactttacaccttgccatcaaatcaagatagataacaaaaatataaatgagaacaaaaagggaacccagaaagcatctgtgatagttaaaagttcaatgcagctaataaagcatcaaatacaaatatgagagtagtggttcagggttcagcggtataaagtctgagatgcatccaatgtaatcatgacaacgtcaagtaaaactgaaattaaaagcatagaaaagtacctcgcctgtggctctacctttggaccactcgattggaatttctaaaattctctcaaaaagctgcagaaaaacaaggcatttaaacattcttatagccaaaagtccaaaagaaaagtttgacagtatcaacaatttatcaatttaacatgttgtataccttaccggagcaaataagttagcaattttcaagttggcgtgccatttctgttcaacaatgtcaacaaaaacatctgcagacaaccaaccaccatcttcccacatcatatctgacaaatctgatctccacatcatacagttcccactcaattgtacatgaacttggccgtagtgattttgaaacttcacatgtccactgacattctccatttccctatacaatataatgatttgttatttagaagttagaatcagtaaacgataatgatataaggatttccatcatcactatattgtgggtttcgtatccaccagtaccattatcaaaggcgtgagctttattataataaggcaagctcatcattataaataaataaacatgatcatagaaatcacaactaaattagaccaacacatcaatcttggaaacaaaatctttggtcaaaatgcaaactactgaaaatatattaacagtaagtcactcagaaacataacagaaacagctcgcaccttggttccatgtcaccatatgcaagtagcattagcgttccacttttgaaataaacagaatctagcgtaactgggagcattttctcaatgcttgcatcatgcactgtatctaccccatcaacaagttctgcaacgatatcttcaactctaggacccatagttgatgttagcttttgaatgggaccagtgactaagcaagataacaactccttcatatttctagaaaaattgggaaaactcgatatcaaggattggggccagattaaaattggacgatcaacttcaagttgtatggaagatgaggttagtgatgaaagattatcttggctctcaaatatctcatcattggtactctcattgactacatcacctcctacatcctcacttttcatacaagaatcactattattagatcgagcaagacttgtgatagaagtactggcattagtatcaacctcatttttcactgtaaaattgtcaaaattcgtaacattatcacctccaaacgaatttgaagactcactagacttttgatgcagtccctgaaaatatgcagcagccgatattgcacttcgcccgagaattcttcttttggcagtcaaggtagatactgaggtatcacttccattagctttcttcttgaatttctgttttttagggccctgtatcactttggaccagaatttaagcccggaacctggaacttttacaccaaaagatttctccaaatctgcatgcttcatgtcatactcaacacctgtgtccaggcaatgatgacctctcaaatgcatcttctcatccatgcataaaaaagagtctaaacttgtaaatgctattaattgactgccactttccttcataacatcacctccatattgactagattccttgtcagaaacaatataacccatttctgcagcttttttggctgattcatccctttcactttcccagcgagaaccagcttcctctctagcaatcctcctggtttttgtacggtaatcgattccttcttcagttgacaaacgtctctttgaatcatcttccattgaaggtattcctagccaactaaaatctttcttctgtgagaccaataaagttggatgagacaacactgcatcaaccacaatctttccccttctcaaactagcaaaaggacggattcgaattttcatcgtgggtacctccccacaagaaaattcttcattatgagtccctactgagcacgactctaatgtaatgctcaaaggtgaaatacttcgtaccttaccaaaatcaagatctcgttgtatgtaatcactaagtgatgaacaaacagacggtaaaagtttagcttcaataaaccctttggcttttgccttcccataccatactaataagcacactccagagatcacagctacaagaacagaacacctaacaaaaagtaatccctcattccgcaaatgggacagagaactcaccaaagccttgcttcgagtaagacgctcttcaacacattttactttggtttcatatctagagcttagagtactctttaacaactccacattgtgtccacaaaaatgtgaaaacctaatcacttgagttatccaatgattctgcttggcacatacacacctgcgatatcgccttctacccaacaactttccatccaagtaaccaaaacctcccacttttccaccatatgaagaagatccatgaagcggagccccaagaaaagggcaatggagtctcaaactcatggtctgttgcacctacataatcgctacacaattcggactcatatgttggaaatggggaccaagaagcccctccaagtcccctgacaaatcacagcattacaaaaggagcacccactccaacctaatcaagaaacaataccatgttccattaaacatcatccatacaaatgtaaagcatttgaaacacaacaccacaaaatcaagaatattaaaaacaaaaaaaaaaacaaccaagcattgttattactatcattattttggtttttaaagaaaaaaaaaaagtcatttcttagttttttttaacactatttagaattgctttaatttactttataatacaccgacacgatttttattatattgtgccgatactttcttctcggttccttctt

SEQ ID NO: 377771 - DNA, 1994 bp, Cannabis indica
agaaaaaaatattgacgacggtgcattatgcgtagttgtttagacaagtaggaatgaagaaaatgacactaccatacatggagggaagcagttagttagaatagaaataggaacagtctcgtttggtacagtggtcaatatcgtggccacttcttatgtgtgccaatagagatattgttttgcatattttcatctattttattttactgtttgacaacacacacaatgcaaacaagaaacaaaagcattatattcctttggttttcaagtcttattaccttcgaaagttggaaaggaaaagagaaaagagaaaaagagaaaaagttgaaaatggcatggtagtactatgctgttctattccaaacatgctctttatttctgccttttcgtctacttttcccctctttatccatgtgactgagaatctaatagtaaaagagactagttaacagcatattgtgtccttcattaatttaactaaacaactaaattaaatttcttacatctttgaacatagctagttaccctaaaaaaaccatagagttagccaaacatgacttgagaggtactatcctttctaaaccaaattctaagaacaacacaatttatgagatataaaaaaaaatgaagatttcccaattcagaacagccacaattcagtcccatatgtgcaaaaaagaaagaaaagaaaatcttcatcttcattgggaagttcttatcagttcttctttccattctctgtttaccttctgaataaagtcttccactcttttcctcaactcatcatcatgatgatcttgatcatgatcatcatgattaccatcatcgagatgatcatgaaacttttcttcagcaccgagttctttctgcagatttgagacatgttggcaaaccacctctaatacatccctctcctccatgccgagaccattgtgttttacagcctcatcgtcatgtgtgactgttttggggatggagaccactgaaagaggaggtgcatggtcactttgcttttggtcatgagcagagttaactggttttgaccccaacaggatgatcactatgatcaaattgcaaaaacagaaggcaaatagagagcttgaagcagtttgactgatcaaatccaatgttacatccaacatgatgtatttgaaaattgagaaatatcacagagaaaagggaattggagattgtggttatgaataataatgcatatagatataggtacagagtgttggcatatttggtaacgttaaagggtatttaaaggcctcatgtattataatatttaaagtgtagggaggaagcttttggtgggtttaaaatgatgatgtttataaaatattaaggaaaaccagacaaaataaccggggaaaaaagaaggaaaaaaaaaaaaaattaaccaagtgtgttgtgaaagtttttggcagaagaagtgggaagtttcttaataattgtatggttggcggggtactttttgtttatatattgtaaagttcgttgtaccatacgagaactcacatgggccctcccttgttttgtgtcttccaatggactcaaactcacctaccaaagcaaaaatttactaactcctttcacttttacttcatcgtgatctttttctgcctcaattttcatacatgtcagtgacgacaattttattttgttttgttttttcaaaatattgatgatgtgtgtttgtagatttacaattgttttaagtagagactagagatattagataagatcaattaaatatcaaatgaaaaaataaaaataaataaaagattgtgttcgaaataaagtagatttgtttagtgacaagaagattatcattgaccttacaaatcacacactcttggcactatctttttcatcaaactgtaagaatagtttagtaataattttttaattaatattttatttttagaattagaaaagtgaaatacttttaaaattatgttctataaaaatatttttatttttcaattttt

SEQ ID NO: 377772 - DNA, 9950 bp, Cannabis indica
aggcagcattagtacaattaagtaattagagtaattagagagagagagagagaaagaattcagaaagataaaactcacataacagcagtttgaaaagaaaagaaaaaagcacaaatatcaagacatgagggtacctcaacaattcactttccagcttccttgcccggccaatgaagtcttcaacaacttttgagaagaacttctctctttctcgggcattttaagattttcagacaaactgtgatgcacgcataaaattattagtatgaacagatagtaataaaaccaaaacatcaatattatcgattttacgtgaactaaggataaatcatacatgtttttactgtctgcagatgatggtgcttcactttcagagcaagaaactgcactgcatgcatctcctaatgataatcttgcagcaaagtaagctacactctcatactgtgaagtagcaactgacgagagaactactgctggaggagggtgaagcagttgctgcatgagttgtgttgtcaggacaagccttctctttggtttaaggattggcagtacatcttcaacaatctcagtttcatattcaacctgtttagtaagacatgatacaataagagaaattccagtaaatgacttgagccatcaaatgaaacataacaaataaaactaatcttgtgtggtaaaaagaaagaaaccttctcgggaagtcgatttgtcgctcgggcccattctacttctgccatgctggaaaaaaagttggaacttgttaaaattgcagcataaaaggatacataatcttcccagtagacagacaacacaccaggcaatgaacgtgttctaagataagcaattcctactcacatttattcagacatagtgacaccatgcaatagaatgtgttctattctataataagcttctccttacatttattcacacagtgacaccatgcaatggaatgtgttctactcctatataataagccacttctgcttacatttattcacacacagtgacaccatgcaatggaatgtgttctacttctatacaataagtaaaggtaaactaacaaaatttgatacaaacagatagaggagcattttagatcaatttaaaccatttaaccagcttcgtccaaatcacctgatagtttgaagcctttgtggaaccttcatcaactctttatgccaaggtaaaagttcagaagttgcacttttacgtttctttggtctcacaataaccaaaccttgatcgccagaatgaggcattacatggggggagaaatcatcattggttgtagctgtggaagtagaaacttgtgaaacattaccatgtttaccaccatcagcagtcacgttaccttgctccactgagtcccgagcatgctgatcatcagccagctttccagctacaaatgactgctccatagacttcatagcaacacttctctgcatatcatacactggcagcatttgcccacctttgttaaaggttccgtactgatcaaaccaagatggagccatctggggacttatctgagggtgctcacctctaacagaaagtgcattactattatttgggaaattgtgtgaaatattgcgaccaaatgcaaccatgtcctgagaagatgcatttgaacctcgtgtctccccaagcttggaggaaaaacttagcagcttttgatctccagaaggaactgacgtgtcattagatgaagaatctctttctgtacttttatatccataaggtgactcctgccctcccccaggacctacctgctgtggatccactccaaaatctggacctttcaatctctttgtgctcctatcacttgagtcaatatccgtactcttcatagcctgcacctgatgcagtagggaataattttgatgcaaactagtattcggtcttaatgaacggccaaaagcttcaatatctctttgggtggcagcatggcttgcatgagatgcatcagaggaactattcacaatagactcatttccctgtaacacgccaagtgtcttttgtgcactgtcaaccttatcaggtggagcttgtccaaatttttctctgtctggttgttccttctcagcaaagctttgagaatttgctgaaattaccccaaccccagacaagccatttcttccttccatatcttgctcattcagctttgatggcccagaaaacattgctactggactgctattagattgaaggtgagatttaaacaaaccctgagcaaccttggaagattgtgctaccgaaggttgttggcgaggcacactggtccatacattttgcaacattttagaataggcaccttgctggacagaaggctgagctggtgccgcatccgattcagggatctgttgggccaggtccctattatgagtttggctggtctgggatgtctctgtagaaggaagattatttcttggagtaccagctgacatatcggacactgatggtggaatagattgactcacttgagctctctcagaagagtcatctaactgtttggaagcagagtatagcctattaaatggtatattaacagattggtttgccattatttgtccacctggggcatgcatttgctgattttcaatatttcttgaataaggaaaccctgaaggaaaagccatagagtaatttccctggacattagagaaagaggcctcattgccaatatgtccagaaacaccagaaatatttccggtcccttgagaagggtcactagaagagggcaagggaacaacaggggtcctggaagtcatctgaacatggcccttttctccactatcatgagtgccatgaactgagccaaaaactgtttgcaatgggctctgtgaagatatatggtccttactggacaggcgttgagatggtggggccaattgcaaaccaaaattttgtgaattagatgaatgattccgctgaatgtgaccaattgatccatctgaattttctgcttcaagcacttcagaagacacattgcgttcagagctgggccgtgtagcaccatggtcccttggatgatccaccttgtgaagaagctcaagcatatgttgactgcaaggaagaagcaaaataataaaacctacattgtacttgactcaaaatccaaacagcatgtcagagttcagaaagatgaaagcttagtaaataaaaaaaaataaaaaataaaaataatccttgaaagttagactgaacaacaattgggcctttttaaaacacagtatccacgagtcttcaggacaggaaaataatcttaagaaatacacaaggccaaataaagtcaggcattaataaatatctatgacagcatacatcgagaaaactaatttcaccactggattatgaagtgctccatgttagttgaaaatctaaaacgaagctagaaaatgagaaaagtaaaacttcatatctgcaataccttgattgtggaacatttggtggagcatagttaccaatgaatctgtcaaaaggagcagatgtatttggtacaaagccaggaaacaaattttttgacggtgttgcatctaagcctttcaagtcaccctgaccaccaggtaaaggtccctatgtaggaaaaaaaataacaaatttgctcaaaagaaaatcccagaggggaaaaatatacatacatttgttaatatcccattttaagtcagctaacgttaaaaagcaaaaagttacatatttgacagtagatcattatgtaataaggaaaaacaaataattacctccatttccaaggaacttctatcagtgacaaacttagattgcccagaactgccttggtcataaccttttaaccctcgtgaaacctgttgaggtaaagactgtggatgtgtcaagtgttttactccataagaaggttcattgtcaacatcaacatcccccattggatgatactgaaatttgcgagtgcctggtggcttgcgaccagcagcattacaagacgatttttgtttgcccccaggaaaattacgtgaatcaacagtatcagaccatacattttctttagaaccacccacagaagtatgatgggatacattagagcgaaaatcatcagcagaactatctttattggtagagttgtctacgtcatgcatttcaactacgcccctatccagaccattattccccgatgactctaaaatttgaagtgtcttacccacattatgttgatttttccccaaaacttcacttcccttggagttcacagaagaatcaacaactttccagaaatcaagtttgttactgttaggaagctgttgcttgttttcatggtttggcctcatggagctagaagttggtactgcaatattattcaaactggattcctccttccctacacgtgggcttccaatggcagattttgcagcttcaagctccgcgttagaatttagggtcgaatcagtccttctcacaccagcaggatgactcatttcatcttgcatgctcctcttatgatcaccactttgaacccgttgcaaggagttcttattctcatgaattctaaaattatcacctccatccactggcataggatcaatgaagttccaaccatttggcctattgtattgttgggtatcattattctgcaactgtgtgctttgttgacgagcccaagaacctgaattgctatttgcattcgactctacacctgacagttgactagcatttgcataaacttgactgctctccacaggttgtttttgtagaggttcacgaactgaccactgatttccttgttcagagaactttggtataaagcgatgagaagaatcggcctgcaacgtgtcagcctgtacctgttgagttttgaatcctggttgcggaaattgtggatgattaaaagaattaacacttgaagaaggtctatttgcatcaactggaggaggtctagaatttggcgcaacagcaggctggaagctattatcaccccaaactccttgtgttttgccaccatcattgacacttgatggctgctgattccctgtagaaggttctgggttttgaaggctgggaccacaccattcctcctgtatccctgcgtcaccactagaagtttccgcaacagcagactgcataagagcactccaactcccactttgtacagaaggttgtccacttaaataatctgtactatccagcacattcaaacctcccattcccacattattattcttgccaaaggcctcccatatattgtcatcagagccaaacaaaattttttcttctgtaggatccaaggtagccacattctgtgaagaggtaacctgggtaaatgatttctcctgtgattgttctgaagattcattcacctcttgcctccctgggaattcgtgcacagatggacttctttgctggggattaacttgctgcaagttttccaaattaataccactgcttaaaccttgaccggcagcagacccaaacatattttttccttggaagtcctgtctagttccatcttgcatgctcacctgatctggaaatgcaacaaatgaatgaccaggaagggaattattgttcgcggacatctgttgcatcgaagctttatccattggtaaatgagaatagggaccaggtgtaccgcttgtgctagaaattggaaccccatacaaagattgttccacttgttgaggtaccatatccatcaagcgtagtgcctggccttgttcaggagaaaacatatgtccactggatgacccttgcataacaggggatgccccacgctgcagccagttcgcattacctggtacaacttcaggctgctgccacaaattgttagatgcctcattgatgggaacaccattgatcagagacggtgaatagttaccagcattctgttttacaatggaagaaacctgatttgtaaatccctgctgtcttggctctacttgctgaagttgttgctgtctctgtaattcttgaagttgttgaaacatcatatgtctttgtaatagctgcatgtcactattccctggctgctgccttggtaaagattgcatggcgttgagatgctggccactcatttgttgttgaccaccaaaaaaatcaaaacccactagagattcagaagattccaacctcattgaattttttttattatgctcaggaccatttccttgttgtggcatagataagcccctcattaaattatgtcgattagtatctgtatccattcccaaaaagtttgcctcattttgccttgtttggaaaacctgattaccatgtacatagccattaagagctggctgctggttttgtgatgggactcgaccaaactctggcatgaggtttgattgtgtaaaatttaaaccatgagccatatgtgaagattgactcccatggcctctctccgaatctgttaggaaaagccacagcaacagttaatacaagcgtatatcaaactactacaaactcataaaacatttgtattaaaatggagacaaataaagaacaataaaaatttgagataaattcatttgaacctggttgctgaacattgtaattctttacactagagataaaaggaccattaatctgtctctggccaccaccaacccacaaattattatttagtccctgccagttcccgtcaatggcctggggatgatgttggccctgcgacaggttctcttggccaaaaaaattgtggaccctgtcaccctcttcgttgccaggcatagataatcaagcccacaattgtcaacagctgagcttttgtatgacaggcctaaggaaaatatgaatttaacattaaaaatgttgacctacttaaagctagttttagattttacatgtgtacaaaggtatactctaaggttttctcaaacacattcagaccaacctaagaccagtcattaatgctccactttagttacaatccactgaatttgtcctgcatacaaccatccaacgtattaattttggcttaagcataaacctgaaaagtttgcagtcaaaagatacattattaaaacgctaggtatcaataattcaaatgtttcttgctttcctcaaagaaagaaaaaaggtagttgctgaagagattatgatgagctatcatgtctacttatgctgtcattcaaattattatacataaaagatatgatacagtgaaagctgtaccctatactttgcatcacagcctaaaccttctaataggagtcaacacattagctgttgtttcatgcatctcaaataggcttttgatttaagttgtaaattaattgcagagaacatttacctatcagagagcagaaaatctaatctcagcctccaactagcttcctcaaaaaatggtcagacgtatcagatattataccaacctatcacatcaaatttaaatatcaatgttatttcatccctgttcccatatcaataaaggaggaggagaaggaaagaggaagaaaaaaaacagaactttcaatttccatgtaattttgacactaaagttttaacaaataacttcaaactcaaagctaaactcttcatttccatgtcatcatcaaacacaaaaagttactagagttttttcttcatgtaatcctttgcataaacaaaaccaagtcaaataacttttacaaacaattcaagacaagtggagatcaacttccttgactaatgtataaataatccttataatcaacacatgcataaaacaacagtttagcttcccagtagttcacgctctctcacaagtacacatagaacttctcgaaaaactaacataaatccacacagcttccacaacatatttgaacatacatacggcttgataaactttattgcttccaacatatagcataacactataataagataaccgcctttttctttgataagagacgagatatagatccctcgtgacaactaaacactatatctattatcagctagtaaccattaaaatcctaagttctgtcaaacagaaaataatcgaatttgtctagaaatgtacaatgggctctcactgaggctaaaaaattacttgcagataaaaaaggttagcagatataactaacgccaacaaacgaaatcactgaaaacatggaggcgaatcacatcatcacatttaaagttagtaactagcagaaatctgatataataacattctgccgaggaatgtaaactcagggctggagtgaggtttcgaaagtgacccatttcacatttcaaacaaactaagaagaagcaaagtaaaatcggggtagcgagttgctgataagagaaaaagaaagacagtgaggagaaagcttaagcctctgctgaagctttttagctcagaaaagaaaaaaaaaagacacaaaaaataatttcagctctttattccattccctcctttcctggcaaccaaacatagcctacaatcgcaaaattccttgaaaatctggcatcaacttcaaaaatgcgccaggatcgaagcagaaccccggcaattcaaactctacaagcagccacgaagctgccgaaatactgaagcagcaaaaccctagcacggatttgcttttgcaataaattagggttttaaaaaagaatggaggttgcggaactcacagtaacgttgagaggcgtccattgaagctcgaagctgatccttcgacactctctgatagcagagctttagggtttgaatcggtgcagaaagaagaaaaaaaaattgggcttctttgtgcaagagagagaaagagaagagagagagataagtgatcgaaatagtgagaaaatttcaacgaactgagaaacaaaaccgaggttcggacctaaccttaggtttgaattaccaagcttttggttcggatccgaagctgagtggaggtgggtacatggggtcttttgggtgctctctcggtcttttggggggatggaaggcgttttctcagtgcgtttagagagggagagcagggaagagcaagcatgtgggggagttgttgagggtagacggagatttagatgctcctgccaattatgcattgacacgtggcattatggtgatggagcccacctctgttttggatatttcttttttaagtccctttttaacttattaaaataaaatgcttaaattaattaaacaaaacaaacatatcagttctaactagtgttctagtatatactctcatcaaaggtgttgaacttttcatctttttatgataaatttcacagattaagtttttgttgtataaattataaaattaatgaagtaaacaatttctcacaaaatatcaacacattaaataaattaatttattgttatcaataaaaaattattaaatatatttaaggaacttttttttatatttaaatgtatagaaagtgaaaaaaaatactacatattcattattattataaaatttagggtgattctacaatgcacctccttaaaagggatgtattgatgcacccttaacttatttcggcatctaaaaaaaaatttagtctaattttttttttcatattcatgtacgttatagctatttaagatatcctacaaaattttgaaaaattcagaataatttataatatagaaaacaatgttcaaacagtcgattttacacgcgtgcaacacactgtttgaacatagttttcggcgtgttaaactttttcaaatttcttaaaatgttgcaggatgtcttaaataactataacgtacatgaccataaaaaaaattgactaaaaaattatctcggatgctaaaatagataggggtacatcaatatatccattttaagatagtgcattgtagaattttcctaaaatttatagatgtccaaattaccaaattaattatcaccaataatgtttggttgtattttcctttattatattgatttagtttctcattcttttaatcatatttttgtataaataggggttcaccccattggaataaacaaatgagaaattctcattcaatttctctttctctcttcatcttc

SEQ ID NO: 377773 - DNA, 1680 bp, Cannabis indica
aaaataagagttttttcatttatctctgttaagctaaactcaaagaaaattatcatttcacttctatatcattatagaagctatagattttatatcgatgattagcgctcctacttaattgtactaccatacttgtaagatgtatgcttactatcatgtttgaaaaactcatagttcgcctttggagaattcagtatagaagaaataaataggttaatgaaaaagttaaattgaatgacatctgattatttgattggagtataagcagttattttctgctaacaaacttaagaactttaatgatataaggagcattcaaaatttccacgatgataagtggtgcaaactgttgacagttatggtcaaaatcaattgtgatgttgggcttattaggtctttaaagactggggttggtgctgttattcaagatgattcaagtttagtcattgctactgaaacctagacttggcctgattgtttcgctcctgttattcctgaagcttcgagcattttccctagtatgcaacttgcaattcgtcttaggtattcttttgtggttttggaatctaattgtaatactgctatcacttctattctcaaccatatagttgatcgttcttatttagggtgtattgttagaggtatccttgcttattgtaatcactcttatgttattttttttcatgtattgtcctaggattattaagagtattgcacacttattggcaaagctaactttttctatgtctgatcattatgtttggtaacctagctatccagattgtatatctgctgtttagtagacatactactattgattaataaattctccttccactttttttcctcttgaaatttttcccaagaaagtgtattgttagagatatactgagtttactcttgaagtattgtaaaaccattttttttaaaaaaaaaaaaaagaagctacaagttggaataataataaaaagaaaaactcacatttttccaatttcacatcaccaactattcactcaactttataataatacactagacacaaccaatcaaaaaagattagaattcaatttcacataatacatttcattgttttcttcaaaaactaaaaataaaaatggaattcattattataggaaaaacaacaatttcaatcttttagtaatgtatgtaatatgtataggggtaagtagaaatgacaaaattaaagtaatgcttaggcagtcggcaaaaaagaacaagtcatcttcttctattctagctcaagttaaaccaaagaaacctcaacacaaaacacaacatcataatcctctttctctctcactctatagctccctcactctatcttctctggtaagaaaaaaaccatgtcttacgtacctccacacttgaggaacttgatcagctcaaccaccaccaccacaaccaccacctccaaatccaatacctcaccaacactcaccctcgctactgattgcactaatctctcctacacctccaattccaattcctactccaatggcttccgccgctcctcctccactctttctcccttgcctgaccctgtttttcctctctggaatccctcccagcgagtcctcaccatgagccccgaccaggttattttcttcattcgccgctttctcactttctcattgcaatcttctttttttttttttcttt

SEQ ID NO: 377774 - DNA, 5220 bp, Cannabis indica
agtggtagaatagtaccctgccacggtacagacccgggttcgattcccggctggtgcatctgagctgtgacgattttcaaacgctatacgagatagttgggtctatctctctcttctaattccataggatgaaacgctgcgtttctgagctcttcttttgttttttaattttatttattttgaaaaagaaaatattattaattataatgaattagttttttttttttttttaaacttttcaagcaagaatattattagttagttcagtatatgtgagttagactttttgacaaagtataaaatcggtatatgcgttcgagagatatgagtacgatttgatacggaaaaatatgtacttagacatgacacaacacgatatgaaaactataaacttaggcacgacacaacacaacaagtccgaaagcacgacatgtaagcacgaatagattaactcaaaagtatgatacattaaaatgtcgaataatttaataataaaatatttatcaattaaaatgatagtaatattcaaattataagaattataattattttttatatgattgtgtgtaactattattggaaaaaaaaatataaaagtaactaaaactataaaatagatacattttcgtatttagctcattaattataataaaaatacaaagatatagagtacaaatttgagcctataaaagaaaaaacgttggtatatttaaaaaaaacgagccaactcgaataaagtacgacatgaatccgagtacgacacgaaattactgtacttgcagactgtaccgagcctatcttataaaattattgcatgacacggcacgcctcatacttttttatgatagggtacagttcgactcataattttttatggtccaacacaacacaatccgtatttttaaaattactaaaaatatgaaccaaataagcacaccacacatgtatttacaactattaataattattcatgttaaattttaattgaaaaaaaaaagtataatataaaagttaataaaagttaattgtttctatgtaatgtgaatgccatatatttgaaaaggttaaaaataagtaataacagttcaaattttccattaaataataataataaaaaaaagataaatccaaaaaaagccatacaaccatgtaaatttcactaattgttaaactttgttacaatttgattaacaacgcatcatgtgctttttatataacttcttatttattatttttggcacatttatctttattattgaacataaacagtcttaagtattacatcaaataaaattcaatctaatatggtttcttaagaaagtttagtagaagtaaaaggtaacaaaaaatctaattctgcttatgaagaaattccagacatggaacgtaaatcctcaacaatggagtcgattaaagcatgagagcccttggtagctgcaaacatcaagtgtttagtagcctcagctctgtcgaaatagaatgtgcccgaaaccaacttctctttcggttgtagagccaaccagatcactgtatctgcaccttcctcacttgttctaagctttccagaaaatctgcaacaagaacagagataaaattcatgtatgaattgtgtgcacacgagtgtgaaaagaaaaatgaaaagtgaataagttagttacgattttgagaagtcgggtaagctcttggtaactcctggtgtttctgcccaacccggatgcattgagtagaatccaatctctttgtttttgtacatttcagcccatttctctgttaatgctacctaataaaaagaaaatggtattagaaaagaaataagtatgattacattaaagaaaactataatgattgttatgtaggttacaggttggactcgaatgagtaaaactacattcatggccaaagaaagagtttgtttttcaaaatgtcataaccaaaattcacatggtcagtttgtctatgttcccatacaaaacaccagcacaagattctttactactctcttgacttttcggttgagaagacaataacagtttcatcttcacaccctctttacatcatgagaagtttaattgttgacacaatatgcatactgtataggaacacaaactattgagagatctggctttatccttaactcgaaacacattcctcctataattatctactgatcgaaatttccatttgttataaccaaaataaatacttcaagcacaactaaatagctaaagagtaccaaactgaaattctatgtttagttcatcaaacctgaacacgcttgtttcgagcatactgctccacgccattaaagtttccatcactaaactgcaagagcaaaatttaatggaagatgttattagtatcgtcgtgttcaaatcaatttagtaaaacagaatggttcatgaggaaagttacttgtagatcttttgtcaaaggtgcagtgtacattccaccagaagcaacagtaataacccgtgcatcaggaaccgctttctctagagatggcagcagcagttcagtcatggcataagtacctaatacattcacggcaaagttcatctcgtgcctgcgaaatttgaaaggatcagattttcaaaagtgaaaaaaattgtaaccaataaaggaatctctacacacccttctgaggtaataactcggttattttcaagcacaccagcattgttgacctaaaagccatagattttatccgagttagatttcgctttcttgttagaattctatgattattgatcaaacataatgtgagttaagtgaaagtaaattaccaatacatgaagtggttcattcttcaaagcaaatcttgatgcaaatgacttgatatcactaatagaggaaagatcacaaaccttaacatcaaataacaattgttggggtcattttagttagttaccaattaaaaaaaagctttgattagtaattataagaaaaaattgcagcataagtactcaaaagtaaccgacataaaccgaattattttaagtaaccaatattaataaaatgtaattttcgttcatttttatcagtgcagattttgttagtgtcttagaacacacataaagctcaacttctaaatcacaagatacatgtagtatctatcttctttcaataaattttaaaactaagccatgttacaagtttaagactctaatagagtatgtacttacaaaactggacgaaagttacagttttactaacattaaggtacgcttacaaactaaaaatttcgaatagttaagtcactatttacctttgttataataaaagctcttataaggaacatatacaatcaatttaaattaaagaaagaatgaaaaaaagttacctctaaatgaacatttttgtttcctgttgaagacttaatatgagataaagcagcttctcccctctctttatttcgacaaaccaaatacacagttgccccactaataacaaaaattgtcaaaagaaagaaagtaaagatccttgctttaatactataatttgagttcaaatactgttttggataattaaggaaaataaccgtgaagcaaggccttgtgcagtggcaaaaccaatcccagaattagctcctgtaactatgcagtttttgccatctattctaatttggatatcctctgccttgaaattctttgaatgttcactacaaattgagtcaaaactccattaaacaaaataacaaatcataacccaaatacaaattagacatttttacaagcatataaagagcataattgaaaacattaagtagagttggattggaaagaggcttacatgaaaccagatttggtgaagttgagatacccatataacccaaatgcggttgatctccatgtctgaagaagaaaattgaagaaatgaataagtgggcatcataaataatactgaaaatttaagaaaaaagatgattactttgagaaggaacattgtgatgatgggttgttgttgttgttgttggtttggaataaagattaaaattttgtcatctgatctgaagagaattcatggaagttcgtgccatgttctccaaggtccaaggaggtggatcacagtgtaggagctccttgaggctgattttgcgccacgtgtaagactcaaatactttaatctacataaaagtcaaatataactaataagattttctttatttaaataagatatatatatatatatatatatattcaacattatcttgaaataattatagatggaaaaatgatatatataatgaatgatattttataatgaatgcaatggatgtgttataattattattatttttaatttatgttcaactttctaaattaatgttttaaatataagttttgacacataattcatgataatttgttaatatattttattttgtagggctatatggactcaaagaggaaactttctcagtaaaataacctaacttattctcaaaataatgttaagtgtttcaaaaatttaaaatgcttttggttttcgcatcgagcttatattgccatatatatttttttagagagaaataaaaagatggctcctgctctgattctgtgattaagtatgtgcatgaggggaaaaaaacaaaatataggatcaaaaagctaaaataaattattttaaccttataaaaataaaactaattatttaacttatttcacattcatgtcatgtcaaggtactgcataaaaaaaaactcaaaatttgatctaatttatcataattaattagtcaacgtgttggttaatcgtatcttgaaccatgtaaaaaaaaaacattagcttataaaattgggtaaataccattttggaccctctgttttacaaaagttaccaattggaccctgtattttctaaaatagtacaaataggaccctaaattgattttttgtcaaaataaagtttaattataatccgatctaaaagtgctatgacaaaactgtttacattttttgtatctgttcgtatttaagcattgtcttcaagttggttgtattaaaaaaaaaagttgtcaaaaattaagctcagggtcctatttttactagtttagaaaatacacggtccattttatcatttaacaaaacacagggtccaatctgtaacttttgcaaaacacagggtccaaaatagtatttaccctataaaatttactattgaaccatgaaaaagattcaacagaagacaagacaaaaataaatccattatatgttttacgtca

SEQ ID NO: 377775 - DNA, 9477 bp, Cannabis indica
attaagtttactctttgaggtatacatttgtccgatttagctgtaaatggatacttccatctttcttttcaaaaaaaaagtttattatacaagatttccttctcgggctctctcgaaatccacaaagagaagattcattagtcaatactggaaaaaggtagaaaaatatggggttgcgtacctttgccggagagagagggaccaacatcaaccaattgagatgaatgtgaggatatgaaaccaccaattcatgaatagattcctcataatgaatttttagctttatcagcagcacctgtttcagtctccaaacagaatcattttaatcgtgaaaaaagaaaaattgttgtagttatgataaatatatatatatatatatatatatatatatttagttgagagtgataggagtgccatgaatatcaactctattttagaattaagaacgaaaagctgagcgtagattgtagcggagtgagaactgagattacctcagtaatatggtaggtttttctttcttttttttgtgtgaaatgttgtacataatagtggcaatcctactaagaatactttcacaagagaaaatacaattctaaacagctgatagtgagccgaccactaccaccgccgccattatcaagggaggatgaagtatatatacattagcagtattttacttaagtcgtagttaaagtgcattgtaatcagagctctaaataattgtttatcgtactatcgtactaaactgacttttttttttttaacttctcaaaatagaggtcatgcagtagaatcatgttgtatcgtgccataaaaaatataaattagtacattaccgtgttaaaaattttatataatagtttacgaactgcaagcccagtagtctcgcatcctactcaaatttgtatcattcaagttggcctatttttcttaaattgaccagcttactttcttatacggataaagttcgtactctatattttttttattacaattaatgaactaattactataaatatgtgtattatataattttaattactctataattacacaatcatataaaaaaataattataattattatttaaatattactattattttaattgataaattaatattatcattgttattattactaaattatcaaatttttaatgtgtcgtgcttttaaattaatttattcgtgcttacgtgttatattttcaggctcatcgtgtagtgcttaagcccatattttccgtgtggtgtcgtgctaattcacgataccgtgccatttcgtgcctaaacccatattttttcgtaacgcgtcgtaccaaaacacatctttttgtgtcgttcgtgctcgtgtcgtgtccaaaaatccgacccgtatttactgcactaattgtaatatacaattttctccgttaaaattaacagtgaaaaatatgatgtgttaaaaccagctaatagcctaattccggtgctttttatataatcgggaggtgttactcagtttatatgtagggaggagatgtaaggctaaataaaatcctcttcaaccgtttcataaacaaaaggagaaaagtaaatgacagttccaagatgagggtaactaacacgagctaagatgtcacaacaagatggtgatatcttcgcgtctacctatacatgatgcgcataagcagtattgcagtaagcccccacaggggtcccttgtcctcaattgtaccagttgcagattcaacagatattatgaagaaatgcagtgacgcactaatcaaaattctacctaaaatgacatctctatgctctgtggtgtggtccgtctctttttaccagactgaatgctttattccaagaccgttgcacgtcaatataagacccttgtaacggttgagatactcctgcaggtgcaaccaacaaatgaaaagattagaagaccatcctcaagtgtatcggcatatgaagaggctttcagctcaggaattgagactcttacaattatgttgtaatcatagacatactgcatttcattcttgtcatattctaacctcttcacaggatcactcaaaactgtttcacaagttaaaaacaagacatgttagttcatataatattcctatgaattcaaacacgatgctttgtattgtttcagtttaatattctctggtattaagacccttctccagaaggaatttgaaaaaaataaaaataaaaactcaacttcttgcagaacttcacagcctgggaatactaaaatgacagaaccattcaacaaagcagatgaaaactgagtacaatgattatggcacctcattcatcttgcataatccaaacatatgaaatacattatttgtgtatcagatagatacatgcagttctgcaaattgaaaaacatatcctcataactaagctgatcactctatattatcatttaattttgatatgatgagccaagtagcttaaagagcatgctcttcaattgtggttactgctctctcaagaagcctactacatgtctttagaacctctcttatgagtcttatccacaaaatagggtacatcattcacaaatataagctctcaatgtaactgcactccttgccttaaaccagttaaatttcagagaatatgtgaaatgatttgctcagcccatttccaaatgagccagagcattgccttttatatatgagaaatgttgttacaaaagacaataagagcaatggctctattacaggtggcatgacccaaaaatcaaggttgattacaatagggaatatactaacagaattgggaaatggctaatgattactccctaaaatttggaccacaaagacacgtatgacacctgtcctaaaccaggtgaataatcctctgctgctctgaactatgatcaacaccatggaccctgcagtaggatgatgacaacgctatttctcaacacctcccctcaaatgaaacgaaagggtgaaggcttcaccccgagtttgtccacaagaaaagagaatctagaatttgatagtcctttggtgaatagatcagccagggatgtgcctcacttcaagttgtttttgtagtaccttgtcacgaacataattaaatattaatctcaatatgttttgttctgacatggaacactggattggatccaagtgcactggcacttatgttgtcacaccatgtgatagagggcaatagaagagggaatttaagttctttgagtagagattctattcatgaaatttcagctgcaactgggccaaagccctatattcagactccgtgcttgatgacaacaacttgctttttggatgaccaagacactaatgtctcacccaaataaacacaatagcctgcaactgatcgtctatcatcaggacatgatgcccaatctgcatcagaaaaaccagtcacgctgagtttgttgttgcagctgatgtgcagtcccagtgttttagttccctttaaatacctcagcgcactcttttcacaacactccaattgactgatgttggactttgcaagaactgacttagcttatttacagagtaggctatgtcaagtcttgtgtggcaaaggtattgaagagatccaataatgcttctgtaaattgaaggatcttgcataggctcatcctcacttatagacatcggtttaccaacaatgatgggtggggaacatggcttgaggttattcaagttgactttcttcaatatatcctcaatatactttgtttgtgtcaggtataggcctgtgatatctctgaacacttcaggaagaagtgtagagatccaagacctttcagagcaaacagcttgtcaagtttgcagatgaattcagccaccaacttagagtcacttcctgttacaactatgtcatcaacatagataagaacaagtataacaaccttctcagttttgtagaaatacagggaagtatcagcctttgaattttgaaaattccactcaatgagtgtgtttttgagtttgtcaaaccaagctctaagagcttgtttcagtccataaagagacttgttcagtttgcaaacccaatcttctttccctttttccacaaaatcttgtggttgaaccatgaagacctcctcttccaaggtgtcatttaagaaggcattgttaatatctaattgtcttatgtcccaacctcttgaaacaactatggtaagaacaatccttacagttgaggctttaattacagggctgaaagtctcaccataatattcctggtctctgatgaaatccttttgcaactaatctcgcttttaacttttcaatggtcccatctgctctcaatttgattctgaatatccacttgttgccaaatagattttgataggcagcagtaagtacaagaatccaggtacgatttttctggagagcaattacttatgtatccattgcacccttccaacctgggtgtgcttgttcaacagattctggttcagcaaaggatgatgatgctttggatgaattgaggtaggtttttagtttgaatatgcctgctttcccacaagtaaccataggatgtgtgggttgtaaagcagttgctagtattggttgtggctccagatctggttcagaacctgatgtagcaatgactgtttcaagctcatgctcagtggcagtttcgatgataaagtcatgagtaggtccaaactcaaactgatcatcaaaatggccatattcctcccctgtctaacctgaaacatgactgttgttagcaaaataagagccaacaaaaggtgagtgaacctgtggagaccttggtgatgcttcagaggatgttgtagcagtaggatcaacagaaccaaattgagagaaatcagtagtctcaaatgagggaacaggaagactagaccatgatgagctatgaattataataggttgaggagtttgatagttgttgagaaaaccttttttaaaagggaactcaagctcattaaaaacaatattcctggatatgttgacacgacctgtgtgagtaggccatttgtagcctttgtgggagttgttgtatcctaaattaacatatttcagtgagtgaaactgaaacttgtgtgtttggtatgggcgtatacatagaaaacatgcaacaccaaatgtcttgaggaaggcataatctggtttttgattgtaaagaacttcatcaagtgatttatggcctaagatgggagtaggtagtctattaatgagatagacagcaatgtcaaatgcatcactccaatatttgagtggcatttgagcttgagcaagaaaagtgaggcccatttcaacaatgtgcctgtgtttgcgctctgctcgaccattttgagctgaatcatgagagcatggatgttgaaactcaatgccatgttgatgaaccaaggcagtaaagggttggtattcaccaccccaatcagttctgaggcttttaaatttcttttcaaacttgttttccaccaaatttttaaattgtatgaaagcattaagagcttcagatttagtttccagaggatataaccaagcaaatctgctacgatcatctagaaaatgtatgtaatatttgtggtttataatggatgcaatggcggttggcccccataaatcagtgtgcacaagttcaagcacatatttggcacagttggaagactgtttatgaggcagagcatgcaattttctatattgacaggcatcacgaaatgtttgcatttcatttttaaatcttcttacattgcttgatactaaaacaagatttaaaatcctaggtgatggatgacctaaacgcctgtgccacatatctaacttagacacagaattttcatcagcttcaagctggtttacattggaattagcagaaagataagcagactttggttggttttattagtggattttggttgagttgaacctgtgagaggtggatgatgtaggggtgtttctagcctgtataatccatctttaagcacttatcaaagcaccaccttctagttgccttaacattagaatgaaattcaattagtacattattgtcattagtgagtttggaaaaactaattaaatttttagcaatttgaggaacaagtagcatttctttcaacagtaaatgcttctcatcattggtgtctaaaacaccactaccaatgagagatatgctatgtttggttccatcacccactgtaacaaattccttaccaccatagggttgtttctagtttagagcagcaccatcagaggtgatgtggttgttggctccagtgtcagcaaaccacacatcactctctagaacttcagtactggcaatgaaggcattatgattgatctgagatgacttgattcctccacttgtctggagtggatctgaccccatgaaattttcatcaaatctattatagcaaactgcagcaaaattaccatatttgccacagacttggcaagttggtcgagtagtattggtgcgtcctcttccacgaaacctccgaggactgccacgagtgcctgaaaaacgacctccattgcaagaatactgattatgattgttgtgattgtttgagccacaactacatcctgttgtgttggatccagagttgtttttggcagcaacgttggcttgaggattggcaggatcgttaggtttgttgttgatggtgagtgtctgcaacctttcgattttactgtcaaaactcaaaaggatgtcttgcaactcttgccaagttgtacttggtctagcttcgatttgaaccacaatcgagagatactctgcatccaggcctgatagaacatttgctacaaggtgcgcctctagatacgggtcacctacaagagaaagaatgtcaaatcaatttttcttttgccgtagatatttccccattggtgttgaacctttacgtacagtctggatcaaggaccttgtgtcatccatctttgatttggagtacgctccatatagactttccaaagctctccagagaccggctgcagaagttgatcccataacctcagtggcaataccttcggtcatggagctgtaaagccaacccatgggtagttgatcgttaatgatccaatgttcatactcagggttagtttccatctctccttcgtatttagcttcaccagtaactggaacaaattctagtgggcacattagtgccattaagatattcatgcaacctgtgtccacgaacaatggtggacaccatagtcttccatagagtgaaattgtttctgtccagttttagagagaatggttggtttagggtcgtaggttgctgggaaaacgtgtttgggagctgagattgggatgcaccatttttgttggtgctaacagtagagggggtctaagatcctccttcgacatgttgttgttcttgtggagtagccattgacagatgtcaataattggctctcacaccaagttaaatttcagagaatatgtgtagaaatgatttgctcagcccattttcaaatgagcaagagcattgccttttatatatgagaaatgttgttacaaaagatgataagagcaacggctctgttacaggtggcatgacccaaaaatcaaggttgattacaaaagggaatatactaacagaattgggaaatggctaatgattactccctaaagtttggaccacaaagacacgtatgacacctgtcctaaaccaggtgaataatcctctgttgctctgaacaatgtcaacaccatgaacctgcagtaggatgatgacaactctatttctcaacattacaatatttgaagagcaagaaactaaaaaaattgctatgtaggtatctaggacggactcaaacttcagagatctggggaaagcaaaacatgccatattgtttgatgttacccctcctggattttaagctctcaatattgagtgagaattgattaggtggctttgaaatgatagtactaaatctacaaatgttgaagaagatcctttaatacaaataaagagctcaagtatttagtgcaaatgaaaatgaccaagacacaaagaagcattctcctcataaatgataagcacgaactataaaggatctaaacgaaatagaggattaggaaaatcaacaatagtgtaaagcctctctggatctcaaaaggccactgaatgaatgaatatcacatgagagaaaatagttccaataattcagtgccatcatcgttatgcaacgtactgaaactaagtatcaaagcacctacaaaatttctacagatgctgttcccagtaaacatgcagcttctttcaaaaactacgtcactgttattaatactttgcttcttcctttatcctacctagtagcagctacaacaatataaaaatgaagcatgtaatgacataataaaccttaacaaccggtgtagaccagcaaacacatgatgaagaataaacataatcaaccttgataagcctcgtttatttcctgaaatctgaaagtggaacagtcctggtctctctgcttatccgggtgccatttctgcacaatactcgagcacaaaaataaaaaatgtttttttttaaaaaaaaggcaaccaacccattaaagtgggtaaaatttaggagaaagaaaatgacaaaccagggcaaggcgtatgtagtttgatcgaatcgcatcgtccgtagcatcataacccacttccaatatcttgtaataatcctttatacccattcacattcccaaaataacagttaattctttccgtgttatcttcaaataacataacattactcaattcactaggaaaagaaaaaggaactcggtgggtgaagattctgaaccttgggtttggacatagacgagaagaaatcgaaattaaggtaagaatcttggtcgaagtcggatttttcggtgttgggtagattgttgtcgttgtcgttgtcgttgttggtggcggcgtcgtcccgcatcatcatcttctttatcttcactcgagatttctggttaagggaagttgtaaacagataaacaagaggcgagtttttaggagtgatttagatgggtgagactcggccaccaggttcggttggataaattgtttttacatgaggatgcgttttaaaagtggagtgtaattagatttgtgtcgaacataattacataatttggcactgtctaattgaaaataattgagggttccaattacactcttcaattctcatagcctccatgagaatggaatgtaattacactgtgtaattactaaaaattttttatattaaacattagttattaaaaaatattagtttctcatgtaattactaactattttgccaaacaagatattaagaattcatatgtaattatcacctcatattcaaatacaccttgcattttaaaatatagggtaattactaaactgtgtaattaccaccctagtaattaccgtacctagtaattacacggttacttctaaacacacccatagtgtaattactaaactgtgtaattactaccctagtaattaccctacctagtaattacac

SEQ ID NO: 377776 - DNA, 2851 bp, Cannabis indica
ctcttccccaatcagctaacactacaaaacacttggttatttttgctgcaaatggtaaatcgtgatacagtagccatacgtcttcaactaacttcctacacataggctcggagccaggcattttcgaatttgaagctggaagtcgatggttgttaaagttgtataacaggggcaaggagaatcggacaatggtttgaggtagaaacttcaagattggtgagctttgcattatgaaacttatctagccttggagtgacaagagctcgatcaagcttgatctcaacccaattttcagtaccttttcctctctcccaagtgaacttgtaaccttccatctccatgtcaatgagatcacagctagccaacacattttggaaaccttcaatgagccaatttggatacggtcttccccctttttatcactttggcaagttacattgttcatgtctcctatgagacaccacggaagattgattgtagttgcaagatcactggtgagcttccaagtgagcttccgtttagaccgatttggttccccatagagtcctatgagacgaaattgaggccattcggaggtagatataatcatatcaatatagtttgtgctgaaagtttttacttccacctcctccttatttctccaaagaacagcaagcccaccactatgtccctgacttcccccagtgaaagaacccttaaaaccaataacaattttcaatttatccaccttttctttttgacaaagtgtttcacaaaaaaaataaagttgggtttcttttggataataatatcctttaggaattgaacggtccacgtggttccaagcccacggcaattccagcttaaaatactcataatccttgacgggtccgtgattcggagccctccccattcgagtttttttgcccaatgttatcaataggatccatgttacccacttcttcctcatttgatacaaggcccacttcagtttcaacacacatggcaacaatctggcccaattcattttcagtcctttttttagactctacaataagcattcctttttttggaagtggctgattgttagccaattcatcaatcacgtgctgtagtgagttattaagttgactattcccaccatcaatgttagtgtagaggctattagtaatttctaaagagtctgaatcactataaatttgtaattgtgaggctattgtgagatatggaatgagtaaatagaattttagttcaattgaagtttgacactaactcaaagagtgcattttagataatagtcctcttctagaagaagggttggtagcctctcttataactcttatcatctctgaatgtccattgttggaagaaaagtgtaagaaggagaaaggagaatattgacaagattgctcacattctctctatttcaattgctgaagaacaagtccaactactttctggataaatccaaccaatttccatcaggtatatcttctctcaaattgaatgacagactcttatacaagattatcccattagtctttaagataaatcctttattttaatgcaattgcaacacactgtgaagccttgccattttagattatgaagaatttcaatgtgcaaggacctacttttacttccctaactcaaacacagtccacattgttttgtttgtacatttgctatagattccttgaagtttttctaagctccagataagatttattaaaattccttggagaatattttagctacaaattctaaagtttaccatttgatttgatgaaaacactttcaagtcattttagcttctttatataatagtctgcacataaattgcctgctcagcttagatggatgtcaatacacatttaagtacagaattaagtatagctatagtgctatagaaaaaaagagcttgctgataatagcattagagatggagattctctttctcattgctttatgaaaaacagaaaacatcacagttagttttgttttgtttcagaagaaaccatgatgcaacacacaactacaagaagagaagtcttaaacattttaatgtaatatttttcatgtattattaataagagaaaagaaggattaaattttgacagcaacagcataacttctatacaagaatgagtacttcaccgatcgaaatactgttgcctccaatccaaacggacgtatagagaacgatcaccagcaaaactgatgaaaagatgattacttagacattcttaatgacacccttgcttggtaattgtgatgataaaataactgtagctctgtttaaattaaaccttaagcttttcgtgcagtctatgcaatagagttgaaaagtaatgatgatgggaaaaggaatgtgttatgttttttgtactaaattttgcaataggttttcctatataaaagtaactttgctattttatacttacaaacttgaagacttgactaccagacaacataataattttacttacaattccaattcttcctcataatcggtatgaaaaggctacctgaggtttgctttagaactcagtcagtccacttcggcagtggctctactgtttatgtttatgataatctcaatttcactaaagttcggacaatatgtaaagttaggaaacacaacaaataacaacaaggtgtgattttggtattctagaacaaaaatttaatgatcaacgactatcatataacatttgcaatataataaatccataatcaaaatttaagattaacagtagtacgactaccaaaaaaaagagaccccaaaactaaattcaagttctttcataaaaaaaaaaataagttgctaaaaatacatgattgattaagcctcaactctctcaggtgcctc

SEQ ID NO: 377777 - DNA, 3311 bp, Cannabis indica
ttttttttttttttggttataaaaataatatgtatgctctagtatattaaatgctgagttttaaacatacaaatattcccaggcattgctgtgctggcccctataccatcaaggcaatgcataggatctctaaaaacagaaaaaaataaattttcaaaagcaatgatttagtatgcagacgtaataagctttgactttaacatacaacttgaatgttcaaaagatcctcctatgttgttattactataatttaagtaactcctatgtcctttcattgaattttccacagcatttctgggtttctcaatcaaaatcccattttgcttaatcatcagaaatatagtgtttaatggaatgatcagaggttaagctttccacattgaaaagcactgattgcctccaataaacattaaattgtatagagaaaagaagaataagaagaagaaaaaagacacagcaagacaaatcatgcagcatatgaccgtgaatccaatatctgaaatactcaaaatgtaaactagaattacaagattgtgagataggatcatgttactgaagataagctttcatttcaaatcttacatcaccaagaactggctcaaatctcctacacacctaagtaaatcagggaaaacggaggttcatctaatcaaaacggggttcactggatacagccttcttatttgaattgaactatcctcataaataaattaaatcacttacaaacaaaacccaaaccccctttagcgattgatgaaccacatattgtccattacatcaaccttcattgcctcacccccacaacccctaaaaaaacaaaaacattaaatttaagcataagaatataacaaccaaatcccaattttgttttgcagacagcaaatcccacttaaaattctcatcatgtaattaaatataaagctatattcgccaagagaggggaatatgacactcaactaagaggaaagcaaaacctaagaatgcaagattgggtcttgtgggaaaacaaacctttcaacttagataatgaacaatgcaacaaagtcaagcataataaggatataccaaaaccaataattatataaatactcatatcgagcctccaaaaaccaaaagtaaaatactcaataataatttatttattttaagaaaaaaaattacccagaaagaagagaccaaaaacacagatacccagttgagatttccaagcgaaatgtccccagaaaccaccaattgacacaattaaaactggggttcgctccaaattagaagaaaaaaacaaaagggtttatagattaaaatctcgaaaaagaaacaaaagtaaaaacaaaacgaaacccggaccgcaaacccccaaaaaacctcaaagcctattaccttgttacctggatatcgatacatacatatattcactcattcattcattcaaggtcctcttcttctttgtataagagctcgccattaatggtgtttctttctttgtctctatgcttggaaaaaaaaaaaaaaaatacaattctacaattccgcgtaggccaagacccccaaattattctcctctccaaattataaatggatggaaaatatttttttttatttttatttttcccattttaagtggaatttttatttattgatttttattatttatttatttatttattttgctgtggggaggcgtggaccaatgcctctacccgcacgcaatgtttgaaattcgattttttttaataagaaggtaactcggaatgattttttgccacgtgtatagtaatatttctttttcacatttatttattttgttttaactttccccctcttttcatcctttatgacttttttaaaaaaagaaatttactttgatggaacctttttttcttttttttttaggtaattcaaaaaaattacattaataataggttaattatacaaagttcattataaggaaataatgtttaaagaacatccaccaatctagacttaccaagtgttttacaatgatcaagaggaaaaaaaaattaccgctacttcaactaagggtccaataaggcacaagctatcaagcctcccacaaatgcgaagcaaagtaatctaaatttctttccacatgaacaagtgacaaatcaacctttctaatgctattaaccaaaactccagaataacaattcccttgttcaacctaggaaaaaagacattaacataaggacaaattatgatcgtagttgccaataggggatggcaaaatgagttttgacatggcagacaaacacgaacacgatatgaattttacgggttagggtcgagaaaattagatgtgggtcgaaaacaagtcgacacgacttgacacgaaatataaacgcattaaacacgacacgacccgcttaacacgaatttaatccttttaacataatttttaaaatataataaaataaaaattattaataataatataattatatacaaatatatatttagtaattcaaagttaagttaaaattttaaatttaattttttttaacatgaaaatgaaaatattttaaaatttttaatttttattatatatataacaaactatttatacataaataaatgtatataagttttttaatagaatctaaatctatcgtttttctctataatttaacttcaataatagcgaaatggatcacagtaggtcgacaagcacacgatacgatttttttacgagtcgagttagggttgagaaaattagacacaagtcaaaaaatgggtcgacacgcttgacacgaaatataaaagtgggtcacataagatatgacacgaacactacacgatgatacgttttgccacccctagttgccaacactaacgaatcataaaataataaggtgttgatgcgatttttcatcaacttaatctaagaagataattatttagagaacaaattcaagaattgaagagatgaaaataataaatgaacatcaaatatttttacttggttttgtagttaaatctacatagtccgcgagtcaatattatttatgagttttggttgtgtttacaatttggcagagtttctagatcagaattgcctcatctttccctttgactgaaccattatttataagaatagaatggtggttactcaatcctatctttatagcaagtgtcacgacctgagtcctaggtcgtggcaaatatgtaatatccataatttggttggtcaaaggccacactttgacccttgtatgaagataatgtttataaatgatcctttaattatatcacaaaatacttattaaaaaataatggattaactcctatatcgataa

SEQ ID NO: 377778 - DNA, 4250 bp, Cannabis indica
cgaaagttttaaaaattttaaaaaaaaaaaaaacttgaatgtttggctcaccaacatccaacttcctgtattgaaatgttagtacagaactgatacagcagtatcagcacaccaagaaacagagacttagcttcaataacaattggcaattgctaagcatatcggaactacgaaactaattcaacaagaagtgatgatcggggatgaattctagggttctttgtatcctacactccattaagaaatcctcttgaaatttatgtcctttaatttatggttttgccaccatagcacacagaaaagtgcacaaaatcttacctctaataatactaccaaatcccttggtaatttcattttccaactccataatcgctgagttttttttttttcatacatttatattatctttaatttcataactgaacttctgcacatcttcaacatttaaaaatgaagaatttcatgtaaacttggtgatttatatctaaattctatccttttttttattttagggttacagtaccaatgcagaggccagtgaggcttgttctaagattggtattatgaaaagctgaaagtttgaaaaactctgtaagtctgaaacttgtagagtgtgccattaaatttctatagcaaagaataatgtgtttttatatatttaatttaatgatgcagaagaaacaggactaccaatgtcacttagtaacagagaaaaagaaagattatctttaatgagaatttcttaccaatttttgaatagaagtattgaggtaatgttgtttggtaatgccctgtagaaactggggaacttggttcttgaaaaccctgcatattaagtaaaaagaacctccctcgtcaaaggatagtatataatcattatatatagacacacacatacagagagagagaaagaaaattgaatggaaacaaatcttttaaaataaagtaaaagagcatgatccgaggagagtttgctgcactttagaagctttatcttttaccaggtacatttttcgttttggctgagactataagacaaagtgaaggtattctaaatgaagagaaatttctttgaggctaaagttcattaattaaatagctaaatgatgatattaaaacaattcatccttctatttataaactaaggtgatcataagtaatttaggaaaaacttcatgaatgaaagaaaaaggaataaccctgtacacaaattataatcaattctgtagaaattcaaggacatatatattgggaaagtagtagtctcaacaattctcccaattactttgatataatatcttttttttctgaaatcatacgtaagtaggccaacattagctttggagcatgacaacattaaatgaggggaaaaggactatgttgaagcagaactgcataccatgaattcccagcggcatttgaaataatatcatagattatcaacggatgaattccagctttcgaaccaagtgacattgcctccatagaagcaacaagatgaataccctcaagcagttcattgaccagattaattttactaccacagtcaaaatagatacaaaaagaaggtaagagagtatagcctaaaattaaatcaaattacacgaaccatgagttcctgaaaacaacttcaaatcttgtaataaaatttgacatattaaaaaaattgattgttataataaatcacaatacaatttttcattttccattcaagtgatataacagaagtacagatcaaggactgagaaggtaccaaaagaatacattttactgttaggcttgttcatgataataagaactttgtaaaactaacgagaatacaaaccttccagcaccaacttcaccctcaaaagtgtaaagtttttcacacattgctgcaaacaaaagacagaacctcaacagacaatcatacagcaatatcaagaaaattgagtttaagaattgtccaaaaaaagaacaaaagagagaattgtacactgacaattttaatttagaacaaccgaattacctgacagaaaaggctgtgcccttgcagttgcatcggaccttcctgaagatgtaatctaaataaaaaatatataatagcactgatgttaagcatagaagagattagattagacgtcccccaccagacaaattttagtttagggtataatattaagcaaggatgagaatgtagtgtcaccattattttcccatttagttcttcagacactcccttcacaatatatgcatccacaaaataagctgcctcatttttatctgtgagattgtggaagaatctgaatttcaggtcagttagaaagaaatttactattctttaaagaattatctaagtgctttttctaagcaaatgtatggagaaaaatatcatattttctaaagggaatgtctataaatacaatcactactgtctacataaccaataatatcaacttgaaaattgcctgtaaaacacttctcaagtctcttgatgtctgatggcaataaggttgatgactgaagaataaacaccgcatccttctgcaatcctgtgtatccataaacttttcacatttttcatattgacatagaaaatgagaaatacaaatggaaatttttatatacaaatgcatataacattgattgaattgaataaaataagaccttctaaagcaccattgttagcaaggatcacatcgtcaatttgatccgcattagaaataaacacaactaaagcaacagcatctgcaagcaaggaagaaaaaaagaagataagtccatctatcatgctttcaagtttagtcaaggttcgagaatcaatcctacaacataaactgtaattgaaacaaaacactacatatccaaatatcacatactctacatgactataacagttacacgtctatttagtgattaaaatttacaactccttactaaacagttataacattgtacattacccaattgtttcgatttatcttgaaaagttgcacttaggaagagtttgacctcaactaagctagcctcaatttgaaccctctcacacactcaaccaatcaatcactcgagctagcctcatcatctggctaactccaataataaacccacactagcaccctcaccaacctaacaacttgatctagactctcaaaagtggctaaccacaccagtttactttgtagacttgctcaaccaaccacttcactccactctcatacactcataaccaattgtcattttgatcaaaacgggaaaatgtaaacagaatcaaactaagcatgtgcatctagaaaccacgcacagccaaaaaaaaacattcaaacttaaacattttcgtagcaattcaattattagcgttgcatgatcctaatattgctataagtgtatataatatatataaatatatacatacctttccctgtgtcgagtggagtggcacatctaagtccacctagcgtcaaaaactcatttagcaaaggctcattagtctgcacacagatgcaccaaacaatcttaagcatgatcaattgaatttaaatacaaattatacagttgactcttccgatcaataaaaaaacctcaaaacgcttgaacttgatatccagcttgaagaagcttggtagccatttcgaagctaaactcattgagaccgacgaagccaacaacaccgagagacgacgccattgtagacacacagagagagttcttcttcctcttctgtaagagttcgatcacagaattgaatccgatccaatctgagcttggttgaagtaatttatatcggacaagtatagtagagtagagtagaccaaataaaaaaatggattaagaaagaaagaaagtcagagtagacagaggaaagagagcgtttgggatgcacgctctctggtttcgtatcgtaattcgtaactgttgttgttatgattagttttcaactctcaattttcataagtgtgtgaatttgtaccatttatttctgacaaacaaggaaacttcaaagattgccagtaccaattcataattatcctattaaaaattaaaatcacctttattagttttccctcttgatttttatttttttcacctaataaagaaaatactaatgaaaatgcatggataagtgcacaataaattgaaagatacagatttatgtaaaaaaaaattcaatattaaaagataagattggaatatcaaaagataaaattaagaaagataatgaagattcttttgtttagggtcattgtgttagaatttttttttattatttt

SEQ ID NO: 377779 - DNA, 1177 bp, Cannabis indica
atcaacatgttgcacattataacttcacactattcttgcttaattttttatatgttttaccaacatttagagtttaatctttatttcttaaatctttacacaacatatattttgctgcaatcattcatttcaagtgaagttgtttccaattttctaaatgcatgttccatgaaggctataatttgaacttgtaattgagtagtggccagcttttataagtggattcattttgtttaccactatacatgtattggggaatgttaagtatgtcaatgaattatatccacaattagtgatttttgttgaatgatatttccgctgaaaatcatatcaaactagaaccaaaacaacaataaaactatgtcacacgatgaaatgttgaggtactttagcaaagccataggcaaaattaatgggtaatatttttttaatttttttcaccactacataagtacaagcatttattcataaaattcacgccttatgttgaaaaaaaagaaaattaagttaaaattctgacactcaaaatgtgtttggatccggtagagtgttatccgagaaaactaatgtggcatttgagatgcttcattaaatcaaaaaatacatcaattgagatgaagtgtggatggaactattggatgctataatgattagtgtattaacactatgaaatggagttatatttcaactttaattaatgtttagaatttgttatttttagggttcaattcgtgtttgttaatgttattaatgggactaataatcaggtcaaagtctttcttgataagggtttgagggcaagggtgtcccctgtcaccctaatagtgtctttcttatttgtgtaaaaaaagattgtaaagacggttggtgggggcagaaaatgatatgaagttgactgaattttcatgtgattggagtccaagagtcacccacttgctcttcgttgttgatagtgtggtcttttgcattagattgttgggatttaaactcatagatttagtaatttaactactttttttttctcaaaacgggggctgagcagtgggcgcttaaggcggccgcctcactcgtctcaccttaaggccggtcttggtcttttgtaattcttttagggaaatttgattttctatacttaaaaatgttcattttttttttaaagcaatatattttacactac

SEQ ID NO: 377780 - DNA, 919 bp, Cannabis indica
aaaattactaattagccaatatataaaactaatttgttaatcctaaaaccgaaagctgaattaagggaggcccatggaaaattaaaccgaccaagtgttactaatgtcgataaagagaggattaaattaaaccaaataacgtatctacggaaagtgacaaacaaccatgaaattaaactgattataaaaaaaagagaaagagaaaagccccactccactggtacttaccagtcttatggtgcacctacaagtcgcagatctcgaaaccactccttcttcccacttcccaaagtaggttccacgtgtcagaagttataacgcttaatttaaggtgggtcccaagacaccgaccttctgagtttgggtcccacaagttctatcctttcacgttctacctgtacgtggaatgattccattgggtaaaggcaatcagcaaacagcaaacagtatgtgttgtcccactcgctcctttacctcttttgactgcttattatttccctatttgggttacttaatgaatacgcaccataactcccatcactgggcccaattggcctcatgacctgtcaatataatgaagccagtaccgacttaatatgggtaatatcattttgaagtctatgttttatcgaaggttttttactttgttagaaaaacagattatatatttttttaaatttgtacaaaaattaattttttataaaataaaatttaaaaataacttgatttagagatattataataaaattgattatataaaattattaaaaattgaactcaatgtcttatttttataattttaaaaaatatgagatttattttatcatttaacaaaacagatagttcaattgataattttagcaaaacacagagtctaaaataatatttacccataatttctctattattatcattgtta

SEQ ID NO: 377781 - DNA, 1984 bp, Cannabis indica
aaaaaaaaatagttgttataggaagtgaaatataggagatttagccacaaatacttctatttgataaatttacaatatcaattcaacacataaatctaatttatttgttctacttctcttcttcatttcaacaatttattaattctttaatgttatatttactatatacccaaaaattaaaatatatctcaaatttatttaatgtctcactacttaaatttaaaataatatattttataaacatatatctttttttaatgagaattcaattttactaaccaataatttcaactatcaaataaaatataaattagttaaaatacacttcaaattgaatcaacgatcagaaaataaaataacaaccttaacaaagtcacatgctacttaattagcagatcatttaaacaaaaaagataataacatttttcaaagaatcaaacaagcttttacaaacaaagaaatcatattcaaagagctttgtaaagcttgtactacacatagacaatttaatttcacattaactcgttgccacttcctttcttttaaccaaatgagaacttctttaatctgtaaggcctctactaggatcagttctaccacaccatgaaccagttgtgtccgattctcaactagcttgccatttgattctcaggccactaaaccaaggtcatagcttaagcctctatagagtcatgtctacattaaccttgatattattgacttgtggtgcagtcagggcttgtgctaagtaataatgggtccaaaaaacttttttgtgtgtattttatctaaagtaaagtgtgagtattattagctctctttttataaaattttttaaaaaaatgtcattttttttcaatgcaaaaaatatactatattaaaattttgagttttggatttggtgagccctaagcacgagcctaacttgccttagcctagtggaatctaatgcttactctcatcacctgtctgacaagcaaaccataatgtatgatgtcggactttctagcattaaatgttacttaaaacaaattaattattttttgtggaacataaaaaacaatcataaataaatgaataacagaaaatttaaattcgtatgttttaggataaagtattaaaaatgttggactttcattaaacatcacaaaaaaaatctaaatataataaactatttttgtaaaactattattcttagattccctctctactttctatctactcggcttatgcaaatgcgacatttattatatatttttaaatgcacatttatttgcgagtcatgggaataaaatataaactaaagtgacttgtatttgcatgggtgatgaatgtggctaggttaatttttttaatgaaataaatccaaaattcaagtttacctaattaaaaaaatataaatattaaaaattcagatggagtagttaataccacttttggttgacagaaagaggaaatgagactagtcttctttgatctccaatataatataatgaattaattgctatagagaatttgtgatgttgaatttgaatacacgacacactaatatagaataatgaagttgatcataatcttagttaaattgcaatataaacttcacaattttatattagtttttcacaacaactttatattggtttctcttttttaatcattttatgtttaaatgttggaacatattttttgtgaattattgaaacatttggaaaagtgagtccttagaggagtagtctcacgtttgatattatgtattagtgtatatatatatatatatatagtataaatacaaacaattggggaggatcccaaagaaagggtactatttttgtggaagagggaagagacacacgaaggcttgcttgaacaacataaatgtgcgtcgcttcgctaccatttgaccgaactgagttggcgtgcaacttaatttttggagaaaatttatttattaaattattatgtttatttttaattaattaaaata

SEQ ID NO: 377782 - DNA, 5200 bp, Cannabis indica
aacggttgcccaacttcttaactaaattccacttttttttttaataaaatctcatcaagcataaaatttatccaattaccaaaattctattacaccaaaaaaaaaaaaaaaaaattaaggtgacaatacattaactttttagaataattataaggctattaactatcaactactgcatcatgttctttgatttattttttttcttaaaaattctccaaactattcacaatttggtggagttgattatggtatcggtctcgtctgttaaatattagatccaatctagtggtttctctttgagaccgattattccaactcaggatatccgttacgggaattccttgtctccttacttgtttatcttatgtgcaaatggattgtctgctcttattaatgactatgtacgaaggaggtaggcttaaggttgtaaggttgcttggggtgtgcttgctatctctcatatgttctttacggatgacagttacttgtattgtgagacactagagaatgaggccaatagggtgatgttgttgcttcatagttttgaagtagtttcaggtcagaaggtaaatctagacaagtctttcgttttctttaacaagaatactgatgtttgtatgaaggtccgtgtgtgctctatcttaggtgggatggtaagtttttatctagagctggtaaatggatttcgttgaagacggtggtgcaatctctccccaactatgctatgagcgtttatcttttgcctaaaaaggtgtgtgacaagatggaataattaatgtgttgtctttggtggaagaatttgggtaaaacagtagtggcattcactggatgagttgggaccgaatgtgtgtcctaaaggttcatgggggactttagtttaagaagcttcatgattttaacattgcgttgcttgggaaatagggttggcatcttcattcttgtcaagattctttagttagttgtgtgctccaagcttgttattattctcatgggtcctacctggggctggagtcgggaagcaatccgaattttaaagagaacttatttgtggtttcggatcactctactttggcaaacaaaaggtctctagtcttatgaagattggagagtcgtcttgggatgaagaggttcttaaagatatttttgtagagagggatgtaaagcttattttgagcattcctttgttcccctcaatgtctgatgatatttggcaatggaatggttagagttctggtgtatatttggtcaagagtacgtaattcagcttctttaagagctcaaaggtgagttagttggaattggaaaggtcttttggaaagagttgtgggatatgagaatgtctcctaatgttaaggatttgatttggagggctgcttccaattgtcttcctgcccgtgtccaattagccgtaaaacatgttcctcttccctcattattctgtccaaggtgcttgcgagttggagagtctatttctcattgtcttgtggggtgcttgtttgtttttgcttgctgacggatggcgggtattttggtgttagagattggtgacaactcttttgggggatggcttcatgatagatttcagtattggggttctaggatgaaacatagagtttttatgcttttctgggcgttgtggtatgtgcgcaatgccaatgtgtggaagggtaagaataagactgttaaagaggtggcttcgttggctaaggataactttgatcaatggagttatgctcaagataaaatttttggtttctctttgttttctttaccaaacggcgaagggcatgagcattggatttcactagttggcaatacgatcaaaatcaatgttgatccaactatcttagcaatcagaataagtatgtgtatggatgggtggcgcagaactcttctggtcagattattatggctcggacagtaaattggatggggatggttgattctgttattgcttaagctatcaaggttaagaaggtgttgagttggttaaaagaaataggacggcatgatgtggtggtggaatcggacagtttagttacgatccaagataaagagtaacacgacctctcttgtaaatgaccatatattcacctctctcaaaccaagtacacactcgatcaatttcatcgcaacaacatgcttaattgcaaaccttaaccaatgtgtcaactgtcaaggacaaaaaatatgcttagaagaaaacaaccctttgaagatctcaccttattcagaagcacaattagagacttcagtatttgacaataagccaccctcataattttttttgtcgtgaacaaactgagcaaatccatgcatgctcctactcaaaatcaccggtttgactgtaaatgcattctaagatatgtgaaaggaaccattggtctaggattaatgttcacactagcaaagacattgagagttgaagcctattgtgactctagttgggcaggttccttaattgatctaatatccataactgggtatgtagtctacattaggggtaacttgatatcttggagcttaaagaagcaaaaatctatatctagatccagtactaaatttgaatactgagcagttgaaatgtgctactgaacttgtttgcctgcattccttatgtttttagataagagtataaatttagaacacaataatgatatagtgtaacaaaacgggagccaaacaatcagccatcaatcttgtatttcatgcaagatcagaacacatagattttggatgtgcattttattagagaacaaaattaaaaacaaactgctggaaataggagcaaacatcatatatatactcacaaaagcactctcaatagctcaacataggttcttaagacacaagatttggaggatgacacagctgcaaatgattagttggcaaatgttcaaatggtttatgatttgtcaaatggttggaagtgtcaatcgcaaggataggttgttaggattatatacgatccagaatattcatcctgcttgtataaattgtattctttagctcattattccttggaacaaaaaaattaatatagcagagaatatacagcaaatttattaccaataaattatgtaagcgtactactaactatatattatgcaagttttaagttgatcatctagagtttttttatgtttctcatcaagtggagattaaatacaaattaaattattgcagggacttaataaaagtgtctgcttcacacttttgtttataatttgaccaatcattgttcaactatatttatatttaaaaattactcaataaaataaaaacgcaaatggtgcaactcttcccctatcctgtattttatttccatttaattattagagtcattttcataatctagcaggtttcattttctcattcatcaaacttttctaacttgtgtacatatagattagagtgaagcctcactttgtgagaaaacaatctctgctagccactaaccaatctttcctttcaagggggagagaaaaatccaatcatgctttcttcttcttcaaaaggatgacttgtctgaaagaagccattcttttgctcccatcaaatcagggagcacaattgcgccagatttcctccattcttcggcatcagttgtcttaaatcgatccaacaataatgcatgcattcctacactctttgctggcacataatctttgcgcatactgtcaccgatatgcagtacttgttctggaggaagatttccagccctctcaagggcaatttcgtaaattcttggatccggtttctcaacgccttcgagaccagaaaatacaccaaagtcccagtcagatccctgcacgagcattacacgttcagtatcatagaaaaacatagagagaagggtaatctaatcagatgcaacaaagcctgagaaatgaaaagttccgaaacagaagtttaaataaataaacgttgaaataagaataagccattgtgtttcatcaaactatatattccctacagcgttacttaaacaaacacacatgaacatgtatttgtagttacatgcctatcaagatgaagtgaaatcacacccacatctataaatatacaactatactcgctcttcttttttgagataaacaactatactaactcttgtaagtggaaaaaataataaaaaatttggagatcactgctcacctcattcaggcccaatgctggaagaatcacttctttataccggtattctgcattgctaataatgccaacctgaagaccctgctcacggacccatcttaaaaatggttgggagtctggaaagatggtgtaaggggcggaagaaccaaatgaagcatatatgcgtctaaacaccttttcaaatgtctcttcatcgtagtcataaccggcctaacagaaaaaataagaatgacagtactgtaaattggggacacacaggacacagaaaatacctgccttccacctttttgaagttattatagaggaatgtcactacattataaaatgacaaacagactggaaataagctatgcccaagaagttactcgcttaaccaagtcttaccctgataaatgagtctcttacacaagttttccaccacacaatgttgggcattttggcagcatatccaaaacatggatacttttgagccatgtctttatatgcatgtttgaagccctcatgtacccgtttatagtcagggcaaggcagaccaacagatttggctgccatgcaatagtagtctcctaactctcccttgtaagccatcaatgtaccagttacatccaccgtaatacatcgtaattttgacaaaattgacattatagaattactgtaataagttttctataagtatgataattgatgagactatctaactcttgttatgaagaaatggtcaaatcataaagtgacacactttaattctaacaacctccttcaacagctccaatgatatctgcatttgaacaatgaaattttagcaattgctcaactaagtgctcaaataaggtttactatagtaaaatgattttctatcccttgcttccctaagcttcccattgcattttaagtcagaatatgtacaaaatgggattctgtgatgaacattgaaatgccatatacatcactcccaacctgcttttatttacaaaacaatctaccaacttggtataaccactgaaccgcatacctctgatagttttgttcttaaaaatgaaatgga

SEQ ID NO: 377783 - DNA, 7561 bp, Cannabis indica
gtaacacagtccgtacaacgctcggttcgtaagaatttccagacttagaagtagggaaaggactcattttcctctttcgtctttcattttctttcttctttttctctctacccaaacaaaacaactctcttgaagcaatggaaaaaccaacaacttcaaaaaacacggtctgtttttttttttttttcgtattttttcattggttttttttggatcttgggattttttttcagttggggtctctgttttttttacctatttttcagtaaagtttcttgctttattcattttccaaggaaaatgtcttctgggtatttgttaactttttctgggcacactgatttcttgatctttcatgtttttttggggtttaactaattattattttgatttttttttttgaagatattcatggaaattatgtttgtcaaaaatgtggatggccatatccaaagccacaaccaagttccaaacacagaagagcacacaagaagatctgtggaactattgaaggttacaacaaggttgttgatatggaaggaagtgttcattcaactatttctgatgatgtagaagatcacaacaaaacccctagtgagaatcttaatcttaatcttaatctttatccttatccattcccttttattattaatataatttggttttgttttttagtgcttttctgttttattgttaggctagatttagtagatctttgttattcttattactattattagagaattaatcaattataaaataacaagaaacaattgtacttgttttattatgattatatattgattaatttaatgtgttgatttggatgctttttaagctccatttgagaagggtaatggaagaacaaggtcattaaacaacaaaacagaagatgatgtgtattctgatgctgcaaccgaattttcagaaggaggactttattatgctgcagtgactcaagatcaaggtggtgctgctgcgaaatcggatactaatgtggaaaagatgatccaatcctctgatgataccatagttgttgctggtaagatttcaatctttttgacactaattgtcaattgatttgtttggttgaaaatttcaatatcttaagatggttcattgtcattgtttctcatatgaaaatggttgttaagggttctcaattagtgttggaattttcgaactttggatcattggataaacctttgttagtttttttttatgaagatctttataatgtttgagactatgccaatgcatattcttttcgcttgttgtataaaatttcaatatcttaagatggtgtcaatgttattaatcatttattgtcattgcttcaaatgatggaaatgaaagaattagtctcacatatgaaaatggttgttaagggttcaatagttctcaattagtgtagaatttttttgaactttgttcgttttctatgaatatattaaagtcttaaacctttttctttcgggttgtaatgatttaaactgcagagagcgttaaacctctggacggtattgctagttcggtgatggattcttctacagattcccagaatgaagattcagttcttagtgttaatagaaatgtttcggttgatgacttgcatactgtgaagtcagaaacacagaaagatgttgcggtagagattgaaaaggttgatggctctttatcgttgtctgaaaaggggaccaatgtggaggtggagaaagacaattatttagatagcagtgctgtgcaatttacgatctcccctactaatgtagatgccgaaacaactggggtcatgtccaagtcgggtgaaactgttatgagtttagaacctgtcccaattatccccgatgagggtcttgttcgggtggaaggaaagcttactgatgtttctactgaagttgaacatgttaatgcttctgatgatactaccaaaactacagtggatagtgcagaaggagtagattacacgtattttggtgatttaatcgagaagggagaagttgatgataatttacttgttctttctgttccagatgaaatacatgtagttgataattctgaactactgcttgaggattttaaagatcacaaagctttgaagacaggtcttgatttggagaatagccaaagtgaagatagtgtggcttttgtttcggacagacatgttttggaagatagtgtggaactggatcacagtcgaagcgtgccaatggttaaagatgtgccagctgaagaggaagttaatatgtccgaggtcacgggcaaagtcactgaaagccaaagattagatgaaaaaggaaccccatcagatttcgtgatgcctcctatggataaaaccttttcggtctcttctgttgaagattcagttattgcttcgggcaatgaaggaatagttcaaacatcccacttacctggtgtgaatggtcatgaaaaggattccactcatggcgaaggaggtagagaggatgatgatgatactacgagccatgtaactgctgctgatgctggctatgaaaaaatcgaatttggaaaggatgatttggctggagatgctggtgatcctgttactactccacatgtgatcgatgaaactgtagttgccagcagcaatggtgttgcaaaagaaagtttctcggggcacacagtagttaatcctgaatctgctgaaaaggttcccgagcttcaaattaactcggaaaacaacttacagaaaggggattatgagaagcttgagaccgaggactatgtaggtggagttgacaacagtgaggctcctactaaggaaagttgctcggtgcatgctgtagcttttcccgaaactgctaacaagtcctttgatggtagtgataataatggtttcgagaatgatggaattcagaagtctgttgaagatggagttaaaagcaaggaagaacctgtagaagaacacctatcggtgcagccaaaagcattggtagtcgggtctgtagatgagtcttcagtcgttgtacctgcagcagattcgagtagtgctcgtactacagacagtgtggatgtcatagtggcttcggatacacttcaagagacgactgaagataaactcgatggatttgagaatgttaaggaaccaacaacaactcattctgccttggatgtgaagtcatccatcaatagttcaaccgaaattgatgatagctctacgagagcatttgatgccacatcagggcatggttctgaatctttccaagaaggaattgacaaacaactcctggctggatctgttactgatttatcagctgattcaatcagccaaactgacagtttggagggaaactggggatctgtttcgggtaatttatctctcttcgaaataattttgtttgattaatatttccatgagtgagtgtgtattttctaatgtttgatgcttgtgacagtactttccatacaatcagatgcacaagctgttattgataccgaaacattaccatcaaccgaatcccaagcgataattggagagaaaacagactcaaaacctgtttcttctgaaggacaacatcaagacaaatcagagatgtttgagccaccatctttcatgacattggttgaacctgtgagcgtcgggaatggccaaaaagcagctactgcagccgaaatccagacaggacagaactcacagcaagccgggtggtttccttcgatcactcaagtagtaaatgaatcgccagggagaaagaaaaacgaagagatcattgccaaggtaacaaactggagcacaggtaaacaacaacacactcctttgaaaaacctcttgggcgaggcctcgattgagacaagagcaaagtcaccaaaccgaaaagagaatgtagcaacaacaacaacaacaacagtaaactctattctggcacccgaatcacccctaggccatgctggtgctgatagagagatcggtaaagaatggaactcgcctgcaaggtatcccaccgagatcaaaagagaaaagaggaagagtagaccatattgggcacagtttgtatgctgctcgtcctcggttcattagattctttaaccgccgttgatgttgaagtttgtgctggtaaattttcatgtcatgatgcaaaaatctagtcttaggagggtacataaaaatgttaaatttctctctataattcttattgttgttatgtttgtttgtttgtatatggtgtgtgtgacattttagtcaaatggggttagtattaggtggtttggttatggctttggctttggatttggattattattgtgtgagacattattagcttagaattactgtgtaatcatttctctttgatatgtaagatttttataaactggctatgaattttaatttcttatttctctcaattcttaaccaaagaatctttattaggaatattatgattggttttttctagaattaaatcttatgttacaaattagaaattttttggtcaacattgctattttaattactcttatttgggaaataataaacttataaatcttctcaagttctatggcttgttcttttatgctatgtttggtcggaaggagagagaataggatggatgaaaaatataaaagagagagaggtgagtaataattgaaaaatggatgatgaagtgatgaaaaaatagataattattaatttataaaattattattggtatatttgtaatttataataattgaagaaggggatttttagtgtttctaacaatggaaggattctaaattggaggtttgtgtagattttaaaagaggaaattacaattttatgaagtttttttttttactttttatgtaaaaatataacttctttttttcaaaaaaagttatgaaaaaattgaagataatgttaaaagtacgaaaaaatcaagtaaaaataatcaggtatttttatagtaattaggattttccatatttttttttttatttttttctaaaattttcccttaaaattttttttttttgaaaaattatatttttgtaaacttatactttacaaatcataaaaatgaaaattctcctaagagtatttataccaaaaacccttaatttttttgttgcatatttttcaaatagtgaatcccatcttaaataaatatgattagccaaaaaaaaacacttctacttaaagcaactatggaagaacaatcctatttataacacacaatactatataggatctgaattaaacataatgtagaagaagtctaagtaaaaaaccacctgaaaatcagtgttcaaaaaatggatagcaatagaaaatgaagcagaaaaattaaaaatatcaaccaaagaaaactcattacaacctcatatagaattacacaagtcaaaaacaaaatgaaaagcctaatgaagtcaactactaatactactgcaaacatttggagcatctatagattttatattattaggtcaataagtaatgcaaacatgaacctaaagtaattacatggctccaccttgttcttgtcctcctccttccttgctcggctctcggttaacgctttctgctgtgcctcttgctcttcctcttgctgcgtctatcatcagaatcagaatctgatgccgagtcagaatcagaagactcggaagatgagttgtacctgctgcgtctccccctcttttgtttcttcttcttcctccttctccttctcctctcctcttcagaatcagaggatgaactataatcggtagtactactctcgtctgaagaagaatcagaacctgtccctgatggtgactcgctatcagtctcgaaaacagaagcctcactatcactacccgaatcagaatggtgcttccttttgcttttttttagattttattttgcttttcacttttcacttttgctttcactttctcctcttcttcctcctctttaatatcggggttatccaaatcatctggaaccgaaaccttcatcttcaattttggattcttcagctgctgagttcgagatggcctcgagatataaactcgttcgttcttacactcgtacgtccaatgcccgggttgaaaacacttttggcattgtgaagccgcaccaccaacagtagccacattagtcttgagatcctttcgctcgcccaatcttacagccttctcggtactcatcaagtacatctgtctcttggcttctctcttttcctgccatctacttggcccttcttctttctgaccataagcattgacattcctagctgctgctgcagctgctcgttcggcctgagcccgactaagacctttcgcagctgtcattgcagcagccttgattctatcagctgcaacctgagctttctcctctttcttactagacatctttatagatcaaacacaatttaaccaagaacatacaaaactgaaaaacaatggcgaaaattttcaagctcccctacaatcgaaatcaaaaattttcaagttcttctctataataaacctgcattataacagttaaatagtgtttgttatatatcaattgaaaagaaagggaatcaaaatcatacatcccaaatcatgaaaccctacaatttaataatttctctaattcaaataaaggtaagacgaaccaaaaaaaatatcaagctctctaacaatgatgaaaaatttgaagattgttttgtaaagatggacttgtgaaaatttttattagcaaaacaaccttacaaaaaaaaattattagcaaaataaccatgtacagtcacttgtgcgatatggtcgttttccaactatagattaagtgtgcgaccatcatggtcgcctagagtaaattgagtgtgattattttgcaaatttgactatttcacattcttagtttgtcaaatttcccaaatttgaagctgcctactatcaaaatcgaaaattttcaagttcttctctataataaccctaaaatttaataattaaaatctcaagctccataccaatggctaaaattttcaagctccctacttatcaagatcgaaaattttcaagttatctctataaaaatcctgcattataatttacaacagttagataatcttacagctcaaatcataaaaccctaaagtttaataatttctctaatattcaaactagaagtaagataaacaacaacccaattgttcaataacttcaaatctatgctcaaaacataccaaacctaaaaaaaaccctaataatggcaacgagaggagtaaaaggaaccattaattcaaagattgaagctttaaatctaatcaacatagaaccctaaacagccaaatgtaaaaacaacgaagtagtcgtgaatcaattcaaatcgggcaatcaatgagatctacaaggaaagacaatagagaaaaggttagagaactcaccaatggcggcttgagagaagagaagaagagagcgcaagtggctcttctgtctctgactccgattgaatttgggttcttatggatccaaacgggtcgggtctcccatattttcaagcggatcaaagcccgttgggcccaataattaataggataattacaaattattattattttttaaatttttatatttttataatcaaagattttttttt

SEQ ID NO: 377784 - DNA, 5985 bp, Cannabis indica
attaggcttgtgaaggtatagtatgctttagacttgatgtgtattaccttgagattgacaagatatgaagttaagtacatattcatttgcacacgacattaggtgatttgcattgttacttttactcaccccaaatctcttcttcttttcttaaaaaaaatgcctaatccgtttctcaaatcttaaagctattttctaccccaaaaaagaaggaaaaaaaactttaatgttctatatattaatcattgcaaaatctttgacttacatacccaaccgaatctacttgaagaattacatcaccacgtttttagttagggttgggaggatcatttagctggatatgagctgtattagaattgctggtggcatttatatttaagtaacaacacacaacactaatcatgcttttatttggatgtgtttcaccacttttttgttcattttttaattcaatattcatatgcagcctacaaaatgatcgtttttcttctcctaaactattctttatatatgtgcattttagtacattgatatataaaatgatattgctttttaaaaatatatacggacataggatatttagataattaaacttgtagttttatctcaaaattaattagcaatgagtaaaataatttattttattttaggattgattgcaattaaattaatcaaatttatagtttttttaatcaaattttatagtttgttgcacttaaatatttaaactttattttaacaaaaaaaactatcaaaattacattatttattatatgagtaccaatttttttggcaactaatctacttaaattgtatcattttttgaaagaaaaaggtcccaagatactccatcatggataagccaaaaaaactcaataacaaggagaggagacacaaacctctattcattcattgattgcatcatgcaaaataataaattgaagacaaataggatgatcgggccaccaaaccttattaacaatagtcgataaagtatacttagctaaagtgtgatccgtcaaataaactgttctaggacattgccacatgttcgccttttagacagtttgtaagacgaaccaaaatcatttaaaatcaaccctaaagaaaaatccaacaaaacatgattattaaattttgatactacactaagacaatcggtctcaaaaataaccttaatgaaaccaaggacaagatattggttgccagcacatctgagagccaaagcttcaaccatttttggtggatagcctccttccaagaactaataggttgatgccaagacctcacattttttaattttggcaaccatccccaagttgtaacaatttgaggataagttcaaagttgtgtcagtgttaaccttaacaaaacctaacagaggcggcacataatgggtaatcatctcctgatgaggcatgtgagaaactggtagaccgccagtcgatgccctctcttcctccaaactgggtaaatctttttcgtgttggtagtccaacaaaaaattgtgagcccaattaatcaccaactcgggagaaagaatcttctggttatgtacccactttctctgaaaccaacatctccaaagaataaccaaaatatgctcaatttgctttgtagggagagaatcaataaattggtgaaaacctctaaaaatctgtgcacactgcgaggggatcgctaatcttgaaaccactcaacttttgacaaggagtaagggaagaacaaccctacaaggcatcatgagttgttttcgattgatcatcacaaaaaggcctaaatcatcatttaaaagaccatggctaatgagattactttttgtaaggatccaattcaaggatattttccaagcaaaagatttaatctttggaggaatgttaagctcccaaagtttcttcaaccaaccagagaaacatgtagaggaagaggacctatccaaactctccagatgaagagccaactaacaaccacttttaacattataaaggcccgaagagtcatggccccaaactaattatcttgagtaggggaaatgggccacaggatggaaagaatggcagcaacttcatcaggaaaaaaagactcacaaaccaaaggcatattccaacatccagaaggggaacaaagactagccacaacactatcaatgtcaagagtcggagaggaaagaataagagaacttgatgaagaaggcacccaagcatccttataaatactaatcatacatccatctctaaccctccaaatagcacatgaatcaaaaagctcctttccctattaaatattctcccagacataagatcatctcttagatttgtggatggcaccaaatgatttatttttatgatacaagcctttcagcaccctagctgcaagagaattaggatgattatagagctgccaagcttgtttagctaataaagcttgattaaaaagatggatgctcctaaaacccatgccaccatcatttttgtgccaacataatgtttctcaagtacaccaatacattttctatttaacattgttcccaccatcattcacatcccaccaaaattgggcacacatcctatgaatttctcttactagacgcatatgaagcttaaatatattcatagtgtaggtgggactagattggattaccgccttaataaagatttctcatccaaccataaagaaggatttcgacttccatccattgagcttgttccaaattctgtcacgaatcgaatcaaataaagttgatttattataacctgcaaaacactgaaggcccaagtatttcttgtggcactccaccccccccccaacacccagggcaatcatgcatgttattcctctcaacatgatcaatattggagatgtaacaaaccgcaattttcgaaaaattcacgcttcacctcaaagcctcaccatataccaagctaaaagagttttaaagtgctagcaagcaaacacattagctttgaaaaaaatagactgtcatcaacaaacaacaaatgagaaatgaaaggaccagaagtctcacaagagaaactgaacaaaccattagcacaataacgcttgactaaagcagtcaaacccttgacacaaaggaggaacaaatacggagacatgggatcacacttacgtaaaccctttccaggctgttggcagtgagaacttgttaactaattggttggccggtaaatcaaactctacttcaagcttagaactaagaggaagaaaaagatgaaatataaatttaagtctctatctcaaagtagagagaaaataaaaactttctgttactctcaatattatggttataagggtgattttccaaccccctcttccatctaaggaaggggtatttataaactttaatggtctggaatacatggtgatcccaagggataaaggggcatccacgagctggaggttgtaggtggaatcctcatgccatgtacctttgtctggtgttaggtggtcccgggttgtagggtagtggttgcagtgtgcccttaatcaggttaccaggctacgcagaaatgatgctcccacttcttgtaacctcttctttcagaattggtagaaggtgcggtcgtgcattcctcgtgtgcataccttgtccttgtgaccatacctttgttgcttcaccctcctctttcttggggaaaattacactcaattttgccaagccacagtcaagcaacattcatgacctcgagaaggccatggccgattgggaaggtcatggccaagtgacattccatgaagcatggtcaagtgacattccatgaggcatggacaagtgacattcaaggaggcatggccgagtgactttgggaagaccatggacgagtgaccttgggaaggacatgatcgagtgacctttggaaagtcatggtcgagtgatattaaaggaagcattgtcgagtgacttcgggatggtcatagccgagtgaccttgggaaggtcatggccgagtgacattccacgaggcatggccgagagatattcaatgaggcatggctgagtgacattcaaggaggcatgaccgagtgacttccggaaggccatggccgggtgacttcgagaaggccatggtcgggtgatttcgagaaggccatggccgagtgaccatgggaaaatcatggtcgagtgactttcatccttccatctttcataccttggtcagctaaccttaaaaattacaagtgataatttttgggcttaacacttgacccctagtttacaagaattcttttaagtgttcttgtggactagttattctagtgtcttttaactgaattgtaagtttttcccttggcacgcgctttgggaaaaaaattggtttaattaagaagcctcctttttttttgacttttctatacaatttcctccttaactttatggtgatcttcaaggattccttctaagagatccttagttcgaatctaactttggcctttctctcttgtccttttcttccttcttaatttcctaagacaagaaagaaagtggcttccatcatggcgaagggactttaaggccaccatggccgagtgctcttgaatggtcatggttgagtgtcttcaagtcatgtatggttgagtgaccttcgggagatatggtccacggcttctttgtcgagtgggtcttgctctccttgcacccttttcacattttaagcataactcccttattattaatcgatttagatgactaaagttgctatggaaagttgagaaaaagatctataaagctgagatatccttggctttgtgacatttcattgtcttggccgagtgacttccttgaagtcttgtaccccttttgtattttgagcataactccatcaatactaatttgatttggattattcaaattgctatgaaaagctgagaaagagatctacaaagatgagatgtcattggccaagtgacatttcattatcttggctgagtgacattttggaaaccttggcaaagtaacttcctttaagccttgtactccttccgtattttgagtataactccatcaacactaatccaatttggatgattcaagttgctatggaaagctgagaaagagatatacaaggttgaaatgtacttggttgagagacatttcattgtcttggccgaatgatgttttggaaaccttggctagtgacttccttgaagccttgtactcctatatttgagcataaatccatcaatagtaatctgatttggatgattcaagttgctatggaaatatgagaaagatctacaaagctgagatatcattggtcgagtgattttgagtcactcaagactgagtgacttgggaagctaaacttggctgagtgacccttagggttgctctatggccgatatggacctttaatgttgtcctttgttgagtgacccttagtgttgctctttagctgggagaccattgatgctatccttggtcgagtgacccttagggttactctttgaccgagagacctttgatattgtcctttgccaagtgattgttagtctttcttttcttttatgacctcgtaaggtccctactatggtaagtaggtttttgcttgagggagtattactctttaagcggtctcatcctcttattatttgttcatcattttatacggatgtaagggagcttatttacttgactgtgctacaacctcttgaatgatttgtgcatgtttgtttatacttgacgcctccctctcgttttagcattaggggtaggggtgggcatcatccaatccaatccaattgaaccgaaccgatccaatccaatccaattacaaaaagttggatatccaattacaattggattggattggatgctaaaagttggattctaattggattggatcggttattggatgtcaatctcaaaatccaattaaaaaccgatccaatccaattacatttatatatattaaaaaattatttatataataaaaatattgaaaaatataataaatatttattatatttt

SEQ ID NO: 377785 - DNA, 2468 bp, Cannabis indica
taaaaattttaattagcttaaatattaatataacaaatggtattattatatataattatggttcaaaaatcaatggttcaaaaaccaaataaccttatagaaagaccaaaaccattaacttttaccatttacaactctaaaaagagtgaatcaatattcttattaaattcaatataattaatgattaacattattaatttacaacattaaaaccaagacaaagagaatctaacactacctattacctaactacacgacaaacataccggtcaaaccagtcaccacgtgacaaaagtaacgactcattcacctactatagccggtcaaattgtaatctcttaacggtcatattttttcacaaaaggtaccaatgtttcctcttttcatatataaatctcttaaaaactcaatctttaacaaaaaaaacactataattccaaactcaaattcttaagaaaaatcaaattagcaatcatgcattgggtggttgtactttccttattactactctcctccgccatggtacaatcctacaatgcacccgctccttctccaacaacaaagccgccactgccaccgccttcttcgccgttatcaccgcaatcttctcccgctcattccccaacaccattttcatcatcaccaccaccatcaaaatctccggctcattctccgacgaaatctcctactccggtgacttctccggcgaagtctccgatcaatgctccttccgtggtgccaaaagcttcgcctttggttagcccgactatctctccggcaagtccatctccggtagctgcggcggctcctccgccaatggcttcttcgccgtctttggctccggttagttcgccggagttgagcccggtcggtgctgctccggcggcggaagggccggtgattgccgctacgccggaaacatcggcttcgattccttcgagttcggcagattctccttcgatgtttccgtctagtggtagcccctccgattccgacgccggagagtctttcgccggaaactgctcaaggtccggctggtgatgggtcgggttcgaactctgtgtatggagttcatgtcgttttgagcgggcttggtatttgggccgctttggcactgtaagcccaatacgattagtgggccttgttttagattattatcaatttttagtgttttatttagaaaaatatttaggttattatttttcatatgagtttgcacttgctgtacgatttgtaacaattttgttggaagggaaaagactcatttatttctattatctaatattctttttatttatttatttttggccttgttagagtagaaaaactaaaaataaaataattttggaattttttatttatattttctcctaacttgttattaaattttgataccagaactaagaagtagaggttacaatgctttctttctaccatgtgttgagagtttgagaccaatggaatacaatactagaatacttttataagtaaaatttgtttttgtgaaaatatttatgttatattaaatatacttcttcctttttaaaatattataatttaaatttaaactctaagtatttcttttatctcttattttttttttaaaaaaataaagcgctttataaataaatataaaaattagatcttatagtcattacaaaagatagaagatagttctatcataccgataatattattggcaaaagctcacttattcatattatgagctgtgaaattacaagttctaaaaataaaagtatagagatgtttacaaggacacacatagttatcaatcccctaacattttgttacccttttagagtcttgataactggtttcaaaatcattctccaccaacacaaaaggatgatgctgcgaaacgacaatctctatggctagcagacaagctgcaacttctccaatgagagaatcagagaagttaagcatacttgtagccacccacaaaagcatattcttatgatctctctttatggccacattgcacatggtattgcatccaacttttgatatcagagctgatttttgacctaatcaattggtggcgacaaccaagtgggagacttaataatcttcgaggcagtaagtaaataggatccataatttgcataacaaatatagatagagtcaatagaatatttaatattacccagaacgttcttgtgtactttgtcattgtgcgctctccaacttatatccaccacaattgaagcatagataaacaactttttaatatcccaccattttatatttcagattctataaaaaattaatccagtcccaaatatgatttcttgaattcaacaccagcataatcccctaaggggaagatcgccaaagatgataggcaaaattgcaatagagaaagaaatattccatcgtctcctcttcctccctacaaagggggcaagagacctcctcaatatgcattctcttcgcgagagaggcac

SEQ ID NO: 377786 - DNA, 3315 bp, Cannabis indica
tcatcattcttctggcatccttcacaccagtaaccagaaccaatagcttctgtgactttcttgttacaggttttgcaagcacgataccacattgtctgatcaggtttgatgaagctaatatatgctctgatgctgaaataaacaggctacaaagagacaaatccatgtcattatttaataacattaaccaactcctaagctaaataattacatgttttgcagtaaagaataaatgataacagtataataccttgtcatcgcctaatgatgggttttcagttatatgagacagcgagactctgtcactgtacatagatcttgctccattcctagctgaagggctcataccactgccaacaggccaatgaggcctctttaccttcagaatcaaacctgaaaacaaatcaaggatattaatcagtaaatacaagaagccataaagatataacaataacttacgcaacagtaacctaccatgatttcaaattcttggcttctggtatatctggatttaccattagcatgcttctgcttaatgttgacagagacaaacctgcaagagaagtcaaatgacactaagcacagacacctctaacctgcattaattactgaatgactgccaaaatggaaagtcttcaatcgtgaaacacctaaaagtaccttgaaaatctccaactttgagagacttaatagcaaccacaggagattgatcagcaatatccaacaattgctggcccacagttgttgcaagctcattccacaatgaaacaacaactgtctttttactgcattcaattaagcagtgtaaggcatcttggcagaaatagaattaaatatattgttagcaacaataatagacagtcaggaaggagtattgagggttacctctcatcagcaattgttatatcacgctttggaatagtttcgttgttactctttcttctgatgctcattgttggagacacactttgaacaacacctacaacatctgaacatgcaacagcagtaacatgttagataaatcattaatggaaatcatgaattcaaaagcaacgtcaagaagggacttcttaccaacaagctccttcccgctaacataaggacccaacatgtcaatggggacaaagttaaattttgtttcaggaacaaatgctgcttcactgcttacttcctccacttcagaattctcattcaaagtcatctcataatcattttgcactgtcttaaactgcttgttagcaactttaagagtttccctttgaaatataataaaccttccctaaattcaaacttatcataaaacttccttgcagcttcattaaacatagttgcttgaatttggttccctgcaaaatttagcataagattcaaaatcaagcactggaccagttacacaattttgggcatatagcaaaacaaaaaagattgcttacttcttcatctgtcaactccacattaaacacacacccttcacctctagcatttttatatgtacgcatgttacccttgtttgtaacccggaccttaattgtccaactgccttgataaggattcaaagaaacaaggggatgaactctgcgtgtcatggccatccgtccagctggagccatactgaaatatacaataaaataaaaatcataagcacacgccacaacaagattttccacatagcattacacgttttaaaccaaaagaaaaatgtgacatggtgaagtactcgggggaaagaagggaaaaaacaaactcactttccatgctgctcatgaacgatttgagcagctgatttagaaatgatttcctgcttaggcttcaagaaaacaccagcatccgctcttttcacctcactcttgatctcatcctcttgtttaggtttcaagagaatgccaactccttcactcttgatctcttccttgatctctacttcaagtggaggagaaactgtctcacacttggtaacaattacatacctgagttgaaaaacccacacagcccagattaaaacaagaacaaaacaccaaattaagaactttcgaaaagggatctggaatttgcttacttttctgatttgcttggaatgtcattgagagaataatcaaggatacgaataagacccagattctgaatgtctcctgagataacctgaggagtaatatgtgatggtagaattcctttcagcttcttttttccatcactggcagtaaacctacaagaatggatccaagtcagacgtaatctattagttttggtttgttagcaagaaatcccaaacaaaacccatttgagcggaccaaccaaaaggtaacccagataattacttacaataaaaagaaaacccaaataagaaaaagatccatagcctgtactaattatgaagacccatctgtaaattaaaagaaatggaattaaaataagaaacggtgaaactcacatgtatcggttacccttggcattgagatcgaggacttggacaacgatgtccggcatctctgaggaggtgtcgggcgaagggttggcgagtatagttgaaatcgcatctggggtgggtgctttcacggccattgtttgtagtttgagtgtctctctcgctctatctctctggaagaagaagaagagtgaagaatttgagagtggagagaaagagaagagaagggttttgtatagggtggggagtgggggattgaataggcgggaattttgatttcctcaaaatgaagcctttttttcccgcaatctctcttttctaccttaacaatgaacatgtttgtttattaatttgataactttggcgccaaactgtgaaatgttaaaatggtttcgctctcttttatttttgttttgttttgtgtaccgccaattgtaaatgcactccgtggttggtctgcaattacatttatgcccttcctcggttttcgattttccttcgtgcggatttctacatgagtaattacacaatggaaatttatttctgaatacccatttctatcggttttttgttatcttcttgtagcaattaaattattttctaatatcactttctaaaactcaatataataaattaatgaaattcataataattaagagaagttatatcattctacttaaaaaaaaaataattgatatatgctcaaatctttaccccttaccaaagggtgatgtaaaaaatgtgtaatatttaataaaaaaaataattttatgatatatttgaattaatcattagcttgagttctaatatacaattataaaatttagtgttgaattaatctttttatcaaaaatataaaaaaaaaataataatgataattttacaattaattt

SEQ ID NO: 377787 - DNA, 6684 bp, Cannabis indica
gagagagagaaagagagaaattagcaacataaatgatgtttaccatgattaaatccagcatgatatgctctagggaacgtaactatgaactctccaggttttttgcactgccttgtacacagggacgtcatgatccaatagaatattaggaggaataaagttgttttccccaataaaacatcaaaagccccatcctccccatcagcagaaaggatgtcatgagtatacacatgttccctaacaaccttttcaaactgcaaagcagcatgacctggaatgccataccaagtttttgaagcaccgcagtgatgataattaatactgcagtaagagtgagaaaattaatagagtggggagaatttgaataacacaaaattagcatgaaagttttatggcttcactgcctctcaagaataacatatacctgtatagataatgatcctcgacatgccaagcaaacatgctaaatagcattccaatatagagcataggatcagttactccctgtgaaaaaaaaataaacattagtaatttaagaaagcacatcatatatagatgatgaaaagattgtagataagttagtattgttacaggaattgctctttctagaagacgcaatactgactttgatagccttgacagtctctgaaacaaaataaaaaagaattgaaattgataagtttataaacatgcaaagcgatacataaaaaaatgtgaataaattaatctatacaaataaacaccaaaaaacacccttagatctagacaattttgtgttgagtaattataatttaccaaaaacttggaaaaatagtgcctataacataagaacctgaactaaataagggaagaccaaagacaaaaacatatctacaaagaaatagaatgagattcgataacaccatacagcttctttctgtccttgcattgaacagaaaacgtatttttaaattatattcatctaaatgctataatgagatacaaatctgtagtcattatctcctctcattcttcacatcacaaaacatttatttattattaacataactcatatagagaaaagagaacgcatctcaaacagcagaatcattcaaaagaaatcattataatgattacattacggcagaacaagtgcagctagttttaactttgttgctttgcaattatcctcaaaaaaataattatccttcaactaaccaatataaatacgtacatacatatccaagtaaagattacggacagaaatcaaaatacagatcacaaacaagaataaaaaggagcattaagtagaattaacaccttcaagttccatttgctattcccaagctgatcactgggagaagctgagaaagcgctaccatcaacatcacaagcatactccaccgtttcggtctttccacaagcaatctcatgccaaaattccttttccagatatgaggcaggaagactaccagagctataatatcgtctagaaaaaaccttgtttgccattttctcaaaatcacggaatgtataatttctgaaaacatgcatccatattcaaaaaatgagaaaaaactaaaataaatcaaatcaagtatcatccttctatttagtatacacacttaccttccgctcatgaaaaatgtaactttatcatcagtgtcccactcagctagacggagaggttgcactcgggttgtgaacttaaatcccggttgctccttcatcaatacaaccccagctggaacagaagcagtcacaggtgaaacaatcttgatcatacctgaaattatcaagcaaaaaaaatcatagaacttacatgttagtattcattttgaatagacagctgcaacttaaggtttatgtattggaaccaataataataacaaaatgggacatgatgtgtgcgtgtatgtatgtgtgtgcgaaaaataaaacgggaaacaaaaaatgaataaaataaaaattaaaagaaaaaggtgttaacaatacactatttttctttttaaatcaggatagagaaaggacagttccaagcttcgtaacaagctacaacagtagactgtcagaaagtgaatcaaacctgaagtacagatatgaacacttcctcttagcctaactttagaaatgtagctctttttataaagataaagaaattatggtctagacagcacaaagagaatacatattgcaagctaaccaggaatgatgaagcctaatttcttgtaataaaggttaaattaataatataaggtgtggccacattcatcataaaatactcaaaactccactactgctatattataaataagctaacttgatcaaaaacaatgtaaataatatctcaatgaccaactgatatgtgatggtgcctcaggacaatgtggaaaactaggatcttaacttcattattgctgtgctagtttagatagcatttgctttttctggtcataaaacaatgaagatgcaatgcattttacattttacatctgtcaaattaaaataatgtaatttaagaaaaatgtattagacaaacaaactgcaaaaataacaagagacacttcaaataataataccatatccagaagcttctggagcgatcttctgcaaataaatcagagggtcctcaaactcctcttttgttggataatatataggacactcaggaatttttttcagtccattccagatcacttgtgtcaaacttatccaccttccgcttcgaaatacatccttccacttaaaggaccatttgatccagaaaaaacatctgcattgccatgtaatctaacaccgcaagatgctgaagatcttaatgcatctcctccacttcgagccattgtactgctgatagtttctgccttcatacgctgaagccttttgcgcttcagaaactccaacccatttctgacctcctttgataaacaaacccttccctccacctgtcaaacaagtttacatgggacaatcagtacataaagataaaaacatgaaacattatacacatgcaaatctaacattgagtataaatagacaaataagaaatgatattacaaaacccttacctatttcaaaatattacttaattcaaaaaattaataataataaatcaagaaaccaatgacatgaatagacccatctccatgccaattgaaaaaaaaagagcgtaagaaggcttctataaaaataaacagattgcagttatatctaagcgcttccttttccgcttgaagaccttagatccttaggctgtctttgtacgggaataattttcaccttctactttataacatgaattacgaaggccacgcacaattacaaatgtccatggtgaaagaagataatctaccataaacaaccacagcaccaccaacacaaatcaaatcaataccaaagctccctagagcaaacgggacccaaaaaaaatttataattgcggggtaaaataatttacaacagaaagtgtcggttttatccaattttcaataaagcatagagaaataaatcttcagcttaaaaaataaacatataataatcataaaaataagggaaaaaattaatcaagctcagccgtattcaacaaaaacatgcagtcaaacttaaaaggagtcttcgtcaaaattattactactcaaattccgaggctacaatagcctggatttattaaagcgaagatcaggaaataaaattagttactttgtttggatccttttcacatataatcaaatattaaacttatccaaataaattcaaatatttcctaaacagaaccaattgcaggcctaaacctataaacattttataaaatgcatatttcagaagttcctcccgatagtaatcacggattcccagaatgaaatcgacgaaataataagacgataatatattagacctatcaaaatagagaacaaccggatatgtacgcatacacaagtatatgtgtgcgctcccgcataatattaggaattaaaatgtattaaaaaataaacaaaagcaatgtatatgaaccaagaccatgaaactaaatcctgatgaaaacaaagacgaaaagaaaattaagaaacaaatagttataaaaacagaaaaggatgaaagacctaccatctcattccgaagtcgccttcctgacgactccgtctttgctaactttgccggaaaatagagcgaggaaaaaaaataaacgaaaaagaacaaggtagaagaaaccgaatccgaatccagaacaccaaaccctagatcacgatcccaaccacgagcgagactccaacggagactaggctccccacattctcacaaaacgccgaaaccaccaaagaaaggactcagcctcagagatccggagctttctcccacaaaccctacagaaccaacgagaaacacgggagccaaccgaatatatggagccagcacttctccggcagagccagatgcgcttcgccggtgatagagcagtttgccgggggaaggaagaggttttccggcaaggagatgagagaggaaaaaaataaaaataaaaaaggagggagagaacagtagaaagggaaggagagagaatgaaggcttagaaaaccgaaaaagggtatatgagaggataatttatagttttatagttaatttaatatatttctattaaatgtatttttaaattttaactgctttttccactttttgtgtcaaagaaattaatttattaattgtttaatcgaaatagaaggtatgtaaaaagaagtggttgttgttaggtggttcaaccaaacgattgccggccaaaaccgcgtttctctctttcctatcgcgtttcgctggttttggaagtttacccgttactaaatgactaacttaccctgaggagaattgaaaaatccttttgtcttacgcaagggtattatagtccattaattataacgatgtttcctaagagttccgtttccactttcctgttttggggtcagagaaaaaataagagaaggtgtcaggaaaagatggaattattcacgtgcgttaaatcgcatcattttgcatctgcgagtgtcgaatcgcaccgtccacgtggaggccttcttggatcaaaacggtctacagaaagcaaagaacccgatccgaaaatcagcctccgcgtctatattcgtaattgaaactgatgacttgcacaggattattcctacctactcacagttagttacgcctattcactggaatgacgatattaaaccttaaatcgttacaccttttacataatgtgcaagggcagtatcgcctttcaataaatttccatatgcgaggcactactaaaaactaaaaagtcacttcctacaatgtaagcgaaccaactactctcgtgagtcgtggtaaagtccaaacgacaagtaggagtagaaggagaaaacacgtggcgacgtatcaatgagctacgagtacacgtggctgtggatgaagctgcggcgtctgggaagttgtgtgttactgtgggtggtgccagagtcgaaatagctggcggttacagcaggtattaccctcccatatgaccggctccagccttttcccttttctccaatctccacttcatttcacgaacctctaatagtactaatataattacatttttaaaaaacaaatttttctgaaaaaatcaccgtggttcccggtatccagtaagctagcttcggcttcttatccctctaataaatgctataatgtattaaagtttctctctcttaatcttattggttagtttcagccctttgcttttgttacgcggaggttggcctaatcattagttttctacagtcagcgaagacgaagctatagaattttttttttaagaaaataacatttctattgtttagacatctgtacgtaaggagtcgttggcggcttggctggtgcagaccgagtcaacgattcacactagtcttcagcttagaagctcggctggcttactttagccggcttagtttttcttcggtcgtttacttttcttgaacgaaaatattttggccgaatttcttgacaagaaatgaccaaaagatgccttttctgaaaaaaattaaaaatgagtgtttctttcttttcttttcttttcttttttccctcgaagtaacttcggcaataaatgatcctatcccatcacggaatttactcaatcaaactgtaccatacgaagcctagcctacccacgcgcgtacgataattgtatgcactcgctggcttttggtttggaatttggacaatttgttagggtgatgagggtacttttggaatttcactggggttcctgagagaaaaagtagagtttgagggttttgttcgggagacgaagtgaagggagagcaagattgtcttctggaaagttctccaattgacgaaaatgccttaagctatagaaaatcacgtaaatgccttttgccgttttgatgagcgtatgtaacatttcgtagtacaaggcatatctttctttggaccaggaaataaatttggtattattttttactttctgcggttggttgttattttctaaaagtaatggtgtcatttggtaatacttttttaatctgttttctgttttttaaaattaaaaaagtaaaaatatttctcaaaaatatgttttataaatttgatgagagtatgtaacatgttcgtagtacaaagcatatctttctttggaccaggaaataaacttggtattattttttactttttgtg

SEQ ID NO: 377788 - DNA, 8865 bp, Cannabis indica
ttttttcttttttttttctgaaagtgtggtagacatgaatgtaatataaatttcacataattaaacacacatacttattttttttagtacaattaaaacacatacaaatttctgtttttttaatagatttgaataactcacttaacaaaacaacttaaggcttcaaaccaaagttgttgttggtgattttcatttcccaaaaaacagtaaacgacagtcatcatggttgtcccaaaacagtcgcaaccactcaaaaataataaaataataaaaataaataatattatggatctaattctaaacctccatggatggatctcctctataactaaaactcactccttttctctttaccaaccacggctgtcacaccttccttcgccgccgcttatcaccatttccaggttctgacctctttccattccattttttttctctttttcatttttacaaacacatgcactgcatagctattagcttcacacatctacggtagtcgactcgactcatgtactgattcattgcttcaaacaatttcgtatgattgattctctgtttgttatatatagggagtgagaaagatgagttttactgtccatgctccgtcttttgagggtttgcgatgtactgatatcaatctaacggtttctaaaccttgtgtgagggttgataatggcactttgtctaatcacgaggcaagaaaggtggtggtgatgtcaagtaatttaattcctaagagaaacttgcaacaaggttctttcaagaaaagttggatgaaccacctgttcagaagttgaagttcgtaagaacattgttgattgacaactatgatagctatacctataatatttaccaggagttgtctgtggttaatgggggtaagcttttttgttctttgcaaggggtgttcttcaaatcattatataacattgtttatttacatttggtttgtaaatgtccagtgcccccggtggttgtgcgaaatgatgaatggactataaaagatctgtaccattacttgtacaaagaaagggcatttgataatgttgttatttcacctgggccgggttctccagcttgttcatctgatataggttgggatgatttttaagttttgtaatggtagtttgaattgttgtttctgtagttttcaatatcaggacatttcccaacataataatattacagctcaggggaacacttctcttttactcgatcttctcttggttgaatatatcacatcctttcttagtccttggcagtggaattctatttgttgtttttgtgttggttgtgatctaatattttctgttttgtttataacgttaacttttatgatatttcaggaatatgtcttcaactgctgcttgagtgctgggatatccctattttaggtgtttgtcttggacaccaggcaagtttcattttccatctttacaattgtatatgttatataattagtccctgaaagataagctaatatggaaatttgaactatcactcatgcatgtaagctcaacgtgatatttatactcataattaccaagtctaacctatgatgtgattgtcatttcctcatggatcaacaggccttaggtttggttcatggtgctaaagttgtgcatgcatctgaacccatccatgggcgcttaaggtataactgaattcattttgaatggatttttggattggcttgctctaaagttatagccatcattggtcaggaacatatttttgtattcccctaaatagcagggcacaatttttgtctttaatgttatctagtctttttttgttcagtgaaattgagcataatgggtgcagactgtttcatgacgttccttctggccaaaactcgggatttaaggtgaggtgatgatctttttttgttgataagatgtggttgctagccatttatggtgaggtgataatcttttttgttgataggatgtggttgctagcctcaagtagcagtaattcaaagcgttcatatttattagtgctaatttttgtcttgtaagtttgttgtccagagagagctattgtcttgagatgttaattttagaaaatctacattttggtggttcccacgtcacatgattaaaatgaaaatgtaaatatcatcagcttctggtttacttgaaaattgcattcaaatacttgttaatctttcattattttaattatttactgaggtattttatgctgtttattatggtggagctgattcttttttttttttggaggaaatttgttaatcctttggccagttgcaattgtatctttgaaaccgaaagaaaagttaaaatactatattctaagtctgacatgaatcttgatgcaagtaacttaaaatgttattattccacttagtcaggtctgatctcactgctgtttccttaatcactttgcaggtggttcgatatcattctcttgttattgatgctaactcgctgccaaatgaactcattcctattgcgtggacaacttccaccgatgcactttctcttctagggacgcatgatcttgatattatgcctgattcttctgaagattcttgcccatcaagaagtcaatttagcttgtctgatagagtaggaggaaaggttctcatgggcatcaggcattctactaggcctcattacggtttacaggtgtgctgcatgacatttcaacttactttaatggctctgttctggttatctagaatattaactcatatttggccctcagtttcacccagaaagcgttgcaacatgttacgggaggcaaattttcaagaattttagagagattacagagacttattggcagagattgaagccgacatttgccaatcaaagggtttttcagtatgctggtaaactgaattttttgaaagatttatcttcttttaatactacttattggctgtagtaaaatagttattcagattaagaaactatttaacatagatgaaaggtatgtgcaaccttcactttagaatctgaagccagattgttaggaaccaagtaacttcccacacaactcagagtacactaccatcacgcaacacatgtatggtggtatttgagacacctcccctctcccaagagcaacaactcctgatccaaattcatacaatttatacacctttcaaactctcctacactgtatatatatgtatatattccatgcttctagaaaatcttatacactaccccaaaaccacctatactgttttcttacaaaatacttttagaaaatctttcatgctccctaatgcttaatttagtcctatttcacccttcattgggtgcctatctccatccagcatcgtgtttggttttcgtgctcttataaataggttacctcatacttttcctattaaaatcaactggcttttagtttacttgttcattataaatagatatataaattctatacctctcatttggtatttctttataagaactcctattatgtaatattttctgagtagtaaaccttttttagcacacatgcaggtgccaaatgctaatcagttaatgaaagaagcttctgggagcttacaagtaacacacaacggaaacgatcaactatctaaagaagcttttaaaaatggtcaattagtgcatgatgctgtaaataagagctctttgggcatgtctaatacgttagatctttcacatccaaacattggcaccaaatacctgaagttgaagtggaagaaatttgatgggttggctagtaaagttggtggagcaagtaacatattttattcattgtttggacatcataaagctgagaacaccttttggctggatagttcctcaacagaaaaggttttctttctcattctaatgaacttttaagtgatatgtatgcttttatatgtccatgtgcatgccattttaaatttttgatctcatttttaataattaaattaagttaagaaacagaaatttgttaaaagcagaatgaattcacagctttttgtaaattttcattgctcttaaattgcaggggtttcaatcataacaggatatgtgtatctattattttcacttagtcagattaaatagtatttgcatagtcaaatatagaagtgcgaaagtagaatggtcaagctagaatttggagcaattcttgtttatgagaagttaacttgtaaatgtaatataaattttcacatttgaactgcatgacatttgagattgacttttgttaaaaacgctgagatgtagtgggtcaaatagttttatttatttataatcattattaaaaatttaacttctagagttctttctcatactattcatatagtcatactcccttcaaaaaattgactatggtctctgaatgttcaggaaagagcacgcttctcattcatgggaggtaaaggtggatcactttggaagcatgtcacatatagattaactgatgaaaggttaacttgtcttccagatcatttctgtctttaatttctttcatctaattgttgtgttgttgtgtataatgaaatttttatgattctatatcatttttcagggatttaactctgagaggtggaggttatatgacaattgaagatgctgagggctctaccacgaaaacatttttggaagaaggttttcttgatttcttaaagagggtatcttatgaatattttctctcatctgatttctactatttgttcacaccaccataagttttaagcaagatgaacttctatgtctgtagtatctaatttaagtactttgtttcttgatctttgctctaggagctcctgttatttcgttatgataaaaaagattatgaaggactgccatttgactttcttggtggatatattggttacatcgggtatgcagttaagtcttttagttgtgattattgaactaaaactattatcttccttgtatcactatcatgaactctgattattggtttggagctttctttaactactaaatttttttcctttttctcgtttggagctgcataattggtcaggaattctgttcccctgatgccgtctctttttcccttctcttaatttctctaaactcgttgaatgatgtttcatccgtagtactagtatttccatatgtcacctactactctatacctgttcaagcaaggaaaatcatttctttagctgttaatagaagaacttcagtgttacattgactacttatataatatatatatatatatatatatatatatattttaatcacaacaaaaaaagcatgtcatttattttttgtttttatttatttctggaaatgaatccattagcttagtcttcttcattaccactgaagatgctgattctctttctagctcattaaccaaaaggagtcatgaaccagtaattttgaaacttaaaatagtggaacttgtaatactcatcagtttcttatttatctttttaaaatagttgtcctcctgctgaaccttaatcggaggtaggaaactctggaaaattttgaggtaggtcctcgcgagaaattgaaccccaacctcatgaacaaacccattggtttgtaatactcatcatatatcttatatttctcttaaatgctgttatttttcttttaatgcaggtataaccttaaagttgaatgtggtgtagtttcaaatcgtcacaaatctagaactccagatgcttgttttttctttgcggataatctcctggctatcgatcattgcaatggtgatgtttacataatgtctctacatgaaggaggctcagcttcatcatggttggaggataccaagcagaagcttctcacaatagaaactcctattaaaagagacacagacgaacagactttaaaaactccaagatcagtttcatctgagggcggttttctttgtgataaatcccgagaggactatgtgaaagatattgagaagtgtatggaatacataagaaatggagaaagctacgaattgtgcctaacaaatcaactcagaaagaaaattggagacattgatgcactaggactttaccttcacctcagagagaaaaatccagcaccatatgctgcttggcttaatttttcaagggaaaacctatccatttgctgttcttccccagagaggttcctaagactggataagagtggcatattggaagcaaagcccattaagggtaccatagctcgtggcacaacgcaggaagaagatgaacgcctaaaacggcagttgcaattcaggtaacacgaataccaaatgtatttagcttgttgtccctatttctctgttacatacctgcattagagaaaatactaatgttgatagtaagtacccttttacttcactcaggaaaattgtctattttctctgtcaacagtgaaaaggatcaggccgaaaacttgatgatgttgatcttctaagaaacgaccttgggcgagtctgcgatcctggttctgtttatgttccccatcttatggaagtggaatcctactcaactgtccacaccatggtaagcactatccgagggaagaagcgatcagatgtaactgcagttgattgtgtgagagcagcatttccaggtggttcaatgacaggtgcgccaaagttgagatcaatggagcttcttgattccatcgaaagtagctctcgaggaatctactcaggctccattggatttttttcatataatcaaacatttgatctgaacattgtcattagaacaattgttttacacgagaatgaagcttccataggagcaggaggggctattgtggctctgtcaaattcggaagatgaatacgaagagatgatcttgaaaactagagctcctacaaaagctgtcatggaatttatctaggagattagaaagaatagctcactaatatcattattaacttttacagcaaaagctgttatgaaattcatatataccatacctgtatagaattagcaggccacaatgatatagtttggctcagctctctatttcatgatttgttttcccaaaacaaataaaaagggtcatttattctgttatcaccataagattaaaaatgtttgattttggattttgaatcttctgcctaagtatgtcatttcagtccttgattataatatggtttagtttctaaacttttgtataagtaatattagaattctacctattgcttacattgttacaatattacaagcgacatgtaatttatcaaatttatatgacatattttactcaaagaaatattaattaattacatttactaattcttaccatatacaatacaacttatactttcgtagtgagctcagaattttttttcttctctattgttgttacaagtttgcctttttccttttaattttgtacttgttttatgtttatggtaattttacttttaccttatttttcatttgttatcattttccaatgtttaaacggaacatagctatacatgccagagagaaccaaagttgctcaaatctcacacagagatgattaaacaaacacgattattacaataaaaagcaaaccaacaaacaaaactaaaaataaaaactagaaaagcaaatgaataatacatagtattgacatttgtgctatcgcgttgtatttgtatctacacgttatgatacgacacaattaaatgtgtcaaatattcaaatacaaacacaaaacgattaattagcatatgttacacgacatgacacgataacataattattcaaataaacaatttattttaaaaaattataatttgtggaaaattaatttgttttatcgtgttgacacaattataacacgatgcgattattaaatgtgttcacacaactatgacatgacacgattaaggtagacataaacaaacaaaattattaaacatgtctctcaaacccaattattatgtatctttttaagttgtgtcattgtgttgtgacccatattatcaccccttaataataaccactcaacaaccatagatctgatcaagaatgacattgacaccccaatcgatctcgttcttaatgttagttgatttcaacgtcgtttttatattgtgatcgtttttcttttgatgttcttattttttctttcaaaatatgagagtctattcttactatacattacccgcttccaaaatactattataatatcttttttaacaatttaaagatgcttaataaaaaaaaactgtaaaaaagggtaaaaattaaaaaagaacaaaaaagttaaataattgaaaatagaaatattcccataattacataaaatactattttttgtaaaaattttagttcaaatattttttttatttttatggtattttataaaacaaaaataaaacaacaagaaaattacataaagtaacaaaaataaaatattcaaacaacatcaaaataataacaaaaaataacatacaaataacaaaaaataaacaaaagtacaatataaaaatacatcaaaatactatattttttgtaaataaaatcgtaaaaatatttaaatacaaccgtatttttattatttttgtgtttttttttttttttcaaattatgtacttgttttctttctaatttgtcttagcataccaagtttaatccaaaatatcattcttagaagtctagtaaaaacataaagctcaacatgggtgtgtccaatgatcttttttttcttttgttcatactaagcaaagagatattacctaaataatggattggttggatcccaattctaaaagtaatgagtaatgattgtaaatgatcaaaaaacatactaggtaaatgtcctcatcatactattatgtaggtaaatgtccttatcttaaatgttttagagaaataactcttttatactcaatttattacttaaattatcttttgtcacaaaaaaacaaaaaaaaaaaa

SEQ ID NO: 377789 - DNA, 1176 bp, Cannabis indica
ttttttttttcttctcttctgacaaaaatagaacgccaggattacggctagaagcaacaaataaattaaaaaaaaaaaaaaaacctccgacttattatgtgaaaattcaaacaacaaaagatttgaatgagtgatccttcatttgccataactcacttcttctatgtcagttttgggagtatctccattcatagattcaatgtctgtaacatgatgtatctatgatattgaaatgtcttaatgatcaactctgttgttttcagtagttaggatttataatcaattttggtcttcataccattcattcaaaaacagaaactcttttaaataaaaataaaataaaaaatcttgatcactaccaccatataagactcgaaagtagatgattaattcattcaattctagaaattaacatacaagaaaatcttttaaaaacacagtttccagacaaatatagtaaaccacatagaaatttctcaacttggatcttcaaccattcaatttcacacaataaaacttctcatcaatcaatacaagagcgatgtaagaaccaagccaattgcaattaaaacagaaaacgaaaccaagatacctgtaagagcaggaagtgcagaaattgatattgacggtggttcccacgccatttcccccaatactagtaatgggattctgcatcagtagtaataaaagaaaacaaaaagagaattagtgttggttacataagcaattgtaagattgaagattagggtttagagagaaaagatacctggtgggtgggattggggaagggaagaggttcttggagaagagtggattggaattgatcgtgacgaggttgagtttgaggttgtgattgaggtttgggaggagcaggtgtgaagagattcacaacgtccgtacagaggagaaagattggtaacccaaccaacagcaactgagttcgatccattgttgaatacagaaagagtcaattttgattttgattttgattattgaactaaaacttgttttatgagtctcaaagcaagggcaaaattgtccttttggcattagccaaagcaactcatttttttaaggggtaaattgcagcatacatacttaatgtttccaattttatacactcaaatacctaatgtttatttttggtggcaaaaatacccaatgttacaattctct

SEQ ID NO: 377790 - DNA, 3170 bp, Cannabis indica
aatcttaagttttgtactgcttgccagttaggaaagagtcataggcttcccttccctttgttaaaaagtagagtctctcaacctctagaactcatccatactgatatttagggcacatctcttgctgtgtctatggagaatttcagatactatattatattcattgatgactacagtaagttctcttagatatttcctatgacactaagatctcaagcctttgaaatcttcattcagttcaagagtcttgttgaaaaacagttcaacttgcctattaaaaaggttcaagttgatggaggggtgaatacatgtcatttgaaagatttctaacagaccaaggaatcaaatttcaattaccatgtcctcatacacatgcgcaaaatggaagggttaagaggaagcacaggcatgttataaaaattgagttgacacttcttgcacagtctagtttagacatgtcctactggtggcatgcttttcagtgtgctgtgtactccatcaacagaatgcctaccacattgattggcaacatcagcccatttgagtgcctgttgcataaaaaaccagattacaacatcccaaattttttttggatgtgcctgctttccccatctaaggccttaccatcatcacaaactagagtttagatctgagcaatgcatttttcttggatattctcccaagcataagggctacctatgtcaaaacttagctggtagaatcttcattgcaagaaatgttgtcttcaatgaaactcacttcccagctcaaaaggcatctactcctgcacaggtatcttctaaactctcctctcagtttcctactacacagttctttactactaccaataatgatgtcactcactctcttgtttcatctcctaatgaaattgagtcattaaacacattgcttgctgccccaactgaacaaacacctgctgctatgcttgaacctgttgcttcatccttagaagcaacatatgttaatgacaactatgcttctgctacacaaaatgctacagctctgttcatactgctccttaaatgcctgactctcaacatgatagtgcctctaccagtagatctgctgagtctgttctcacacctgtcacacaaactcagcattcaaacacatcctcatcgagtagtatctctgcaaataatccaactcatgctactgctcctctcagaacatactcaatggtaacaagatctcaacatgacatttataaaccaaatgcctatcttgccaccaaacataaactaccagagtccttgctacctagagaacccacatctatcaaaactgctcttaaagatcctgtttggaatgcaactatgaaaaaagagtttagagcccttaaagacaatgacacctggacacttattccctatgagcctcgcatgcaccttattggaaacaagtgggtacacaaaatcaaactaaatgctgatggctccattgacagattcaaatcaagactttttgtcaagggatacctacaagcacttagaatagactatgatgagacctttagttctgttgtgaagcctgtcacagggagaatggtgttgacacttgctgtgtctttcaattgggaagttaggcaactcaatgtctctaatgctttcctcaatgagacgctttaagagagtttatatgactcaacctcaaggatttgaagacagttcaaagcctaatcatgtctgtctattgcataaggcaatctatggactaaaacaagctcctcgagcttggaatgatagactcaaatctactttgttggcttggggttttcaagcttctaaatcggactcatccttatttgtttatggctctacagacacactcctaattctcttagtctatgtagatgacattctaggttactagaccaaatagctttctcatcacaaagcttgttaatgatcttaatacaagttttcaaatgaaagatcttggccaacttcactatttcctaggtgttaaaatatgcagggacaacaatggaatgtttttgtcacagactaggtacataccagatttattagtgaaggttcatcttgagggtgccaaaccttgtaccagtcccacaagtattgcccacaagttatctttatctgaaggagttccctttgaagacaatacattatatcgaagcactttaggtgctttgcagtaccttacacttaccaggcctgatgtggcttacatcataaacaagctgtcccaattccttcatgctcccacatatgtccattgggaggcttgcaagagactacttcgatatctaaaaggcaccatatctgaaggcttactattaaaaccagcaattagaatgtctctcacaacatactcagatgctaactaggcaagtttcatagatgacagaaggtcgataggaggatatacaatgtttcttggacctaatctcatctcctagtcagcaaagaagcaacaggttgttgctatatcttccactgagtttgagtttagagctttagccaatgcagttgcagaaatcaagtggatcacttctctatcatccgagttgagcttaaatttgcagatgtgcctgttatatgggttgacaatcaaagggcagctgcacttgctgcaaatcccatattccatgccagatgcaagcatatggaaatagaccaacattttatcacagattagatcttaaataatgaagtcttagttcgatttgttcctttggttgatcaagtggcagacatccttacaaagtctttacttaaggacagatttctttacctcaaaaacaaactaaaagttgtaaacctcccttttcatttcgaggggggatgataacaaatgtaattagttaattacttggctattagttactttcactgttaggtaattagttagttgctttggtttgtactctgttttgtaaccgattgagttatcaaaatctctctctcttgtaatcatggtctataaataaagctcttaagctactggataatgctaatgttgtctagcattactcctaaaagttcttttgaattctttatctaaagctgatcttattcaatactggttgcatcgctcaactaaaaggatggtacattgaatgagatagaattaaaatatatttcaccaaattcttcttaatatatttcaagagaatgcatattggt

SEQ ID NO: 377791 - DNA, 2797 bp, Cannabis indica
tataagtaatgatatatgcacacctaaatggtatttatccttttacaaattataaaaaaaaataaataaataaataaatttaaatattctataatgaattctcaaatttttaattcactaactcttaaaaaataaatttatatagtttcaattttacaaataaaataagaaactttgtccttattcttattcatcttaattttcccgaaacagaaattcagtggcagttcaatggaaacctgtgttaaataaggtcataagttatatgttacttcatcgtcaatctgaaaaattagctgcctttgtcttttgattgttataactcaaccccaaaagaaggttaagaaacaaaaaagaaattatgcagttctcttgccagtatcaattagttagcttgtattcaatatgaaatttaacaattgccacaaaaaatatgaactttaacaatgggaatgaagatatcatccaatgatactcaaaatctgagcgatgatcatctgaattttttctctatatatgcacaaaaatgacattgtttccaagatgctagaagtgataagttcctcgatgaactacctaccatctagcactgtgactgtcaagcggttcactgtgcaagattgatcttcttgcttactggttgatgaatcagtctctatgggactcctgtcaaggcaaaatccaggatttttaggctgaggcatagttgcagtttcactactaagcatcaaaaccactgtgctcattgtaggcctgtcttctgcacgctcttggacgcataagaggccgacttgtatgcacctcattacctctgatgctgaatatgaatcgcctaccgacgaatctactagttctaatgcctttccttccttccacaggttccaagcctgaaccagtttccataatgagaccgatatgaatacagaattgcacatatttagagtaacaaaaatctaatggttgtattcttttacttacataacccagcaggtttaattcgttgtttgcataataaaatcctctgttctttttaccactaatgatctccagcaccagaacccaaaactaaaagcatcagatttcactgagaagagtccatccattgcatattcaggtgccatatatccactgttatatcatcaattaatggaataagtacttttttttaattgaatggagtaagaattggaagagcacaatggtacttactatgttcccactactcttaatgtgtttgcttcagtctgatccctaccaaaaattcttgccattccaaaatctgatatctttggctctaattctgcatcgaggaggatgttgcttgctttgagatccctatgaataattctaaatctggaatcctggtgaaggtaaagaagccctcttgcaattccacaaataatgttgaaacgcttaggccaatccagcaaagatcttttcactttacctgcatgagttaaattttcaaacttagcataaaggggtaatgcatcaaatttgtagggactacaaaataattagtacacagtaactaatgcaattaaagatgaaactgaaagagtaactgaacaaaatagagtccaagcttctgttttccatgtattcatatatcagcatcttttcatccatctcgatgcagcaaccaagcagaccaacaagatttatgtgctgcagcttagcaatcaagcgaacttcatttttgaattcttcaacgccttgccctgagttctttgagagcctcttcacggcaacaatgtgttcttcttctaagttaccctgcttggaaaatcatgaaatatgtcaagtactagcttttattggtgcacttttatgacattatgagtgtctaaagtaacatgttttattaccttgtaaacaatgccaaaaccaccttgtcccagtttattctcttcagaaaagttgtttgtagccactgccatggtagtataatcgaacaatggcaactctagctcatctttatctctttcacctgaatggaactccttctttgagtttgagataaccacctcattcaacaaaaaatcctggcttctttcacgcataactattttcaaaccaacaaatgaacaagttagaaaacaccaaatttaatgcatttctgtaatggtctgagaaatatcttggtttatatacctctattttctgattttcctttgcataaaccttttctcttccataggaaaaacaatcctaataacaggatgcagccaccaactgcaactgctacgattataattattcgttttgttgtccaatcattgtctgaaatgagcaaattcatataattaattgtgaatttcaaagtcaaatataaagaaaaagctcatgcctcaaacttgtttttagaaaatgtaaaaataagctagtctataatacacacaaataataataataataataataacaataataataataataataataataataaaggtaaatagcggcataagtacctaaagttttaagtttctaagcggcataaacctaatgtttatttttaacgacataagtacccaatatttgtaaaattgtatttttcttctagttatgtcagtatagactccattttgaatttattaaatgaacatttaaaaataactaatactacatatttctgtctagacccaatgattaagaatctgaatcttatatgtggtctgtttaagaaaatacagagtttgtattgacgaaattagaggaaaattacagttttacaaacattaggtacttatgccgctaaaaataaacattgggattatgtcacttacaaact

SEQ ID NO: 377792 - DNA, 988 bp, Cannabis indica
gatttcaaattatcatcatgaagtcgaaatcagccgctcacaggccataagacagattcaccataattttgtgtcgcctttgaactactggtgttggaattggtctctttgaagcaattgaaaataagagatggaagaacagagaattagtaaaaatattcaataataaaaaaattctaaaactcaaaatcaaaattttgggaatgatggatacctacgtaaatttctaaaatgggtagtgtttatttggtggagtcctgtcgtccaaaagaaatcatctttgaactccttcttattgagaagtctaacaatgattttataatcattagaatgggtacccaagtaataaaagttacctgaacaattctttctcgcaagacatgccttaacggagtagaagcaagtaatctcaaatggggttgggcattcccacccaaagatgtggtagagtgacttctgacatgcgagaatcctataagagttagggacgagctaaaagggcacgatcccaaggtaaatacaaaaatccttaaaatatttcttaaggaaaggacaactcctgccttcacatgctcgacactccaagctcctatccttaaagagtcgttggtactgcaaccttcgtaattcaagagttaagataagggaaataactaaattttctaggcgcgacagaacgtatacgacaacccttctcattcttgatgtgtaacgccctaatgctaaggcacgctacagtactttttcaattacagtgcaatctttgctaatcaaagaattttctcgaaaaacgtgtcaaattaaaaattttatattaattaataaactttataatataataaaatatttacaagtgccgggatcccgttttcaaactttttaaagttaacattccaaaatacatatattacaggtcgcacaacgactatcaaaatataattcccagatgtcccgagaccgaacactccaggtcgcgctgctttgacat

SEQ ID NO: 377793 - DNA, 3953 bp, Cannabis indica
tgagctctgtgttaaatacgtacttatccagtggaataacagagctgtctccaaacaataaatacagtacttagtgtctcgcccaaaaagaacgctccattttggcccttctaggaggatgaaccgtagtaacatcatccagagaagtgtatccaccactttcaactcttgtgaatttctcaaacgcttcaaaaatctgccaaccccactcacgatatctacagaaaagaatattgtcataaaagtgaaagaacttgaaaaataaaagaaactacaactcgtattgtgtggtgaaggcattaaaaaacaaacatgaattcatgaaagctaatgccataaaagaaaaactcactttggatcctctgtaatacgatacaaaataaataatgattcaacagtttcaggccgtaagagattatggcgatcagcaggtttgataattatgtcgttcacatattccgcattcttgttgccaccgtcaagacctccttcagagaattcctgcttaattccaggaatgtgtcaatttccagcacaagtaattgatataataaaaatctagtaacataacccatgcaaagagtcataactaaaaactaaacactgacctctgtgtgaaagtacgctatttctggagcaagaccagtagaggttactgaatacatctcaaagcaggttttggccaaatcttctgcaagctttaaattttccaggtcttcaaagttgagcaagttgtctctcatagctttttctttagtaagacctttagtggcaccaagggcaagattacctgacaaaaagcatacctgaaagaaacaataaacaatgttaaatacaaaaaataataacaataacttattaaataaaagaccaataaatgcagatggtattacacccatagctacaaagccataacccatgatagggtttggtaattggattaatgctatgtgtgtgattaaaatctgtaaaaaaaacaaatgcagattttatcaagtgattgatgaatattgttgcaaaaatgaagagcaacttgttcctaaggttcccaaaactaccacagtaagattttgcaagttgtatatctgttatttttccgattaagcagggtccacaccaaaaaaaaagtagtctagaaaaattaataaccaacacatacaaaaccttttgtatcaaataaaaaattagtacttatagaaaattaggaagaacccatggagagaaactatcgtgaaagaaaaatgtggctgcaaaacataatttctttgatatggcagcacactcccagtcaaaggaagaaaatgtgaataaaaaaagtataaacaaatccattgagttacagccactttataagcatctaggaggaaattgtaccaaacatagcataacattataaatgtaacaaattttcataacacactaggatcaatttcaccatgaacactgagacaagaatcaattaaaaatgagaatgaattttagcagaaggctggaaattgataaatcatctaatgcctgttatttatgaaaatgtcatgcagaagaaatagcacatagctaagagatacttataaagctttttgtttctctattacagtatatatgcttagaaattggaatcacttaaatcaccgatcaatagaaatatatacatctcaaagttgaattaaaacctaaaatgtgtcacagaacatttttcactaatatgtaacaaccatgagttgagaaagaacaacataccaggtgatccatttttggactaaaaccacctttaggtccatatggcaattcccctacaaaaaccagtcctttggggattgttttgcgaacaagtagatgtctaacacccttcattgcttcctcatacatatcatgaagatatgtcaaattactgtctctactagctcccttttgaagccaaactttcagtagatactcatagtagctatcaccgcgagatccaagccttatattatctccactaaactcaccagtatgaggactgcatccatcaaaagatgagataagaacagtggaacaaacgaaggaaaaacaaagtataaattaccgattccttattatacaatttacaaattccatatgttgacaaaaattaccatgagctacagcacatattgtaaatcaacaaaaaaaaaaagtatctacgaacacaagcattaacaaaagtgataaattacacgaaatatgacatgataaagaatataatacatacattattaatgacatgacagactttatcattacatccattgtgacagaaaacatatttccaattatgttttagctatttttaaggattatcctataaagaaaatctataagcaaaaggaccaaatgacacccagcattcatgaaagttaatatatttaacaataaactaagatgaacaaacacagaattaaaatgacgattttgaaaaagcaaaagctgcatgttattttgcaaggctttttgtgtagataaaatgcttctcaaagaaaatgtaagagcaacattttaatttatttttttagaaaaggtactatagtaggaagagtaagaatttaatagtttttatcaaggaacgtaccttatataaatggggactagtccttccacctttgggagagtctttaagtgttccaacaccttcatggctgctatagagtactttggatcaccagaaagagtactgagataattaaactcaagctgtaaagtagaaacctcagacgtactgctcaaccccccaggagcaggatgagaagatgaatcgtgcaaaacaacatcactatagggaacagcagtcgggctggaagtaaaagcagatagcagacgatctgcaaggtttttagcagtttctaggtaaatagctttagatgtggagtttatccctgcttctacaggactcagatgatatgcacttaagagaccccctaaaacacgaatggtagtttcaaataaattgacttgccctttttgactaatcctacttgaaagttgtgtttcaacccatccgcttgctacagaaacaacttcattggcacccattatcatggcagtatcaagggcatccacaatagtagcaccaagcccacctaatccatcaactccatgctgagacacaggcataagttcatcataacccattgcatactttttatagcctaaccatgcatggagaaaagctttcttaacactctgttgcctatctatccatttggaatctaaattcgaactatgaccactagtactatttgcaggaggtaaacgaggaggaaacctgggtggttttctcaagagccttcctagtttgctgccaccgaaggaagtaatcttaccttcccctgtattactgatatgttttcctagtccatcaacagactgtgcaggacttgaatgaatcagcataagacatgctacacctaatatcatcagtaacattagaaacttgcccatactacaacttaagcaattacgcttcatattgctgttaagaagacttcgtgtcatgacctgaaaaatcaaaacaagatattaaattcttactaaatctaatcacggtaatctcataacagttaagaaaataatgccaaattaataaaattgaaagattgctgctataggttccttaagtgtaatatctaactccttacttaatgaactgactttaaagaagattaaggctgattcttatcatgagatacaacaaattaatatgttcttggagattctttttattaagatggcgaaatcctcacataatccaactagaattagcttctaattcattgccatttttatgcatatatcttatgaagttcacattcatccacttgagggactaaggattccctaactcataaaccgtccacatgctaatatatatactttcaagatcacaaaacaatcatcttctcatttatatatgtatgaatatatatatatatagt

SEQ ID NO: 377794 - DNA, 3064 bp, Cannabis indica
aattaataataagaattaaactataaattgtctaaattttttcttgttgttatctatatatattctgttataaataaatgactagatatatgcacagctatttttaactcccaaataagtgattgatttcttaagttacaccaatttatttatatggtataaatatatatatatatatattatattgtaacaaaaaattaattaatttattatttcaatcattattggaaaggattggtaataatatcatttctcaaaacaattttatcttagctattatctttataaatggacatatacaatgttggtacaaaacatgtgaactggaaaatttctgtaactgaatatacaaaccaatatgggagcaataaatttttgactataatttttttttctttcatatatgttaaaataaaaataaaaaaaataaaaaatccatcaaaaagtggaaaggaaaatgaccaaatgggaatctgtcaaaaatccaaacctagtaagtagtaactacacaaaataaatacatatttatcaaaacaatattacaataataataataataaaaataaataaataaattgaagcacaaaacccttcctaaataattcctataaataccaccctataccatatcatatctccacacacaaataatcataagagcctctatagtaatatacattgttattattaattaattatatcattccttttttctcatttttcttctttggtttcagccattgctatggagatgaacaacaataacatcaacaacaacaatgaaaacaatgatgcaaataggaggattagtagaggaaggcaaaaggtggctatggtgaagatggacaacgagagcaatctccaagtaaccttctcaaaacgccgttcagggcttttcaagaaggcgagtgagctttgcaccctttgtggggtcgagttagccctaatagtcttctctcccggaaggaaggttttctcatttggacatccaagtgtcgaattggtggtggatcgatttctaaaccctcagaactaccgtacaacatctgaagcaacaaactcagggacactgcagctcattgaggctcacaggaatgcgaatgtccgcgagctcaaccaacaactgactcatgtctcgggccagttagatgttgagaggaagcatggttctgagttgaagaaggaacgcaaggcgcgagttcccacccattggtgggaaattccaactgaggctttgaatgatatgaggcatttggaacaactcaaatccgctatggagttgttgagaagggctactacacaacaagctgatcgaatcttgattcagactactgctaattctaatgcaaactcgctcttaccacctaattttaatagcatgaatgttaacacaccatcattttatggtgctgtgactggaagtggtaatagtaatggtaataaatctgcatctggatctggatcaggagtatccaatatgctcccccaacagcaacaacctaataataactatcattgttgtaacaataaaaacaaaatgatcatcaacaacaacaacaacaacaatgatggtgttgctaatatttcttctcttagtgcaacacatttgatgcaggcagctatgaatggtggtggtgttggtagtgtcaaccatgtcaatatggctcataatcttcatcaagctggaagaaccatcaatatgcctcctcccaatactattcaacttaaatcttctcctaccaatagtgatggtggtaacaacaacattaataatcataacaatcatatcaaccatttcaatttctctcctatgcctccacaaatgaagccaaacactactagtttcaaccatttcaatcaccatatgcagccaaaatcttcaccatcatcaactcctactaataacattcatcatcatgagttgcctatgttgcctcaatctttgccacaatcttcacaattggttttccaaaaccctatcaacaattctcaagcaatgatgaatagtcatatgttcatgatcaacaacaacaatggtactaatgttggatatggtggtcaccatggatttttcaattaattaattaataatgtctttaatttcaagtataccagccactcacacaaaccctacctcatatatttggtgtctttattaattttgtttcatgttgtttagaaggtgtcattattattattattataattaatttcttttggtctttatttttttgttgtacttgattatgtttttttagtgttatttgtaagaagagattgggggttttaatagttatgagaaaagtggttttggtggattattacatgtaaataatattatttcagataatttatattttatataaattaaaaattgcattttctattaagaaaccgacatatatattaatattttacatataattaatcaaaattaatataatatcacagtctaatgtttttaaagtaattagtgatcacagcttgcacatctaattaattgcttgctttctagatttatatgtatattaagaaaacaaattaataatttttaaatagaatattattaatactcatcatatccttaataatattaattctgtattgtataaaattgcagttaaattataaaaaagttagagccaatctttcttaaatagattattatacatacatacaaagatgttgcagctatatattttccagttttaaactttccttttgctaaattaataatttttttatttttttttattttattttttgtgttggaatacatattacaaataataagttgggtaccaaataataccaataaattaaaattcatttaattaatataatattaatatataatagtatttaattaaatcgatctttgttcgtaatcttattatttagttttttaattagtacaattaattattaataaaacacagtaataactatcactaatccatttcattgttctcgatcaagctagctagtaaagtctatgttatcgtatcaaacctctcttgtaacttgtaagtaataatagcatttatatattatgtggttggca

SEQ ID NO: 377795 - DNA, 2400 bp, Cannabis indica
cttaattaattagccaataaatacagtcatttgatcaaagtcaaaaccccacaatattaaagtcaattatatgacatctttatataaatattgcccacaaacatatgtattttaaaattcatggatttcgtttttcttcctaaatattctcttctaatgtccatatatgaatctaaagataaaaggttaattttatataacatatctcattgataatgacacaaaaaatataataaaattccagacaaattaaactaattatttttatatatattcacaaacaacagacttacaataaaatttaaataaaaagactgaaaatagaagaagaagagacccaaataaaagactgaaaaaacggaaaagaataaaaaatgaaaaaattcattttttttccctccttctgtgtattaattttaaataacaaaattttctttaacaaaattaaaaataaattaatgagctggaaattggtggcaaaacctactcactccttcaagaaacgactcacaatctccacgcttggttccaatacctgtctctcccaattctccgtaaatttctcgccgggttctgacgtcatcaccgccgtgaaagcctcagtcgcatcaagtcgccgtatatcccaaccggaacctttcaaccgtacgatcttactaatttgactcttggctaagctacaagtattttctttaatagccctcaccgcatcctcaaatgcacctctccgcacctgatcattattattattattattattattattttcctcgccaggtttaaatttcccaaaatacttatcgaactcgggaaccccaatagcttttctcaacccggtccgagttgcggaatcgtttccgtggtctgagtcatctgagttgtaaaactcggctaactcgtcgaacattcccagtttcaacatatcatcgactcgtttcgataagtaatcggttagtatctttacagacacgtcaacccagagaaaacaacagtcgtatcttaactcggttgaaatcggtgagttggaacgttcatcgaacacgtcggaatcggacgagtcgaatcgttcgacaaccaaagcatgaatgaacgagttagaaccaccaacaagaacaggaagctttctccttgcagtgatttcagaaacagcatttccagccaatgaacgaaactcagacggagtcaaatcacgatgagcttggtcaacatcacccaaaagatgatgaggaacaccacaacgatcagaaactgaaatcttattcgtcgttatatctaaccctttataaacctgcattttatcagagttaatcacttcaacagcgaaatgttcagacaggtcgattgacagacgagattttccggtaccggtcgctcccatgattacaagaagcttctcttttcggagacggtggtggcgacggagtgcggctgacatggttgagtaatccattgttgggtgttgtttttttccggcgaaagataaaagggtttgggtttgttgagttaacggtaacgataacggtaacggcggaaatgaatagttataacaatgagaagaagagggttcaaatttcatagaatgaaaaaaaggacaggttgggttttgttttggtgagctgtactgaaatggttttagagagagaagaagaagaagaaggaggaggagtagtagtagtacagtaccactgccacagcagagaatgaatttgggtaaaaaaatcaggggtaatagtggtggtggtggtagtgatgagtggtaacaaacagtcatatatatatatattgtatatagtactgtaagtatatttagtacgattttgagtagtgtgttttggaaaaagatttgatttttattaatgggttttttctagaaatggaagaataataataatattggattttttactgttagtattttttctgggttggtaagattcaggttgagaagatgaagatgaagaagaagagagaagatcttgtaatagtaaaggaaaatcattgattggataaaattttgtggtattaagaatggaattggatttgggattagtattttaatttggatttgccaaataatttcatagttaattctgttcatgcgttttcctttctctttctgggtatgaatgaatgaatgaattgaatttgaatggcaaatgggtttcttattaaagagaggattttttgaggaataaccagaaattatttcattctgtttttttgttgttaatgccaaatatataaatgctcatctctatttttttatttcattataataatatcagattttttttattcaaaaagaaaagggtatgattgtaatttcagtcttcaaagaaaaaaaaattaaaagtcctaatctagagagaaaagaaaaggaaaattatacaccattaaaac

SEQ ID NO: 377796 - DNA, 1125 bp, Cannabis indica
cccatagttgctaacctgctttcctatttacttaattctcctttttttcatttttttttctgctatggaaatctaaatcccccttctcctttagctttaaattttcttgagattcttactttactaaattaaagtattattttaatccataaagtataaaaatattttaatttcatccggttacctttttttatttactatttatccttactttaaaagtaaatcaatcctcaccattggataccaaaataaaaattcttaactaagctaagggtttaaaactagttgaggtttctaatccctcaaaatgaagtgaggaattacataatttgtcattgtaataatacaaaaatctaaggcaaaatagaattttgccacttggatatcttgtcaccatgattttcatcttaagatcaaggcttagttttcaacttttcataatcttagattttataaatcaatggaataaaatcaacataaattaaaatttcattgcaatataaaatataaaaaccaatcaaagaaattgattaagtaaataataacacttatacacttatatatatttatatattgtatatgttcaagaaagaaaggtagaagttaaataatttacgtaactttttctttgaaagcaattacggacaacttaaatgtaaattagtaggaatcacatcacatttgtctaaaaatttatttcatccaatctccaagcattaaagaaacactataagaaatagtttaaggaataattaaatctttagatttttttagtgcttttattgataaaaaaactagttccacaaatgagtacattaaacacttatttataatgtttaagtttacacattttgaaatttatacaccctacacatgactgttactatctcttaattgggtatcaataaacttaaatgagtgatttaaaagttatgagagctattagaaagtatctccaataaacaaaaataggcacaaataaaactgaaaaaaacagtatataattagttactagttactggttttttcagctattgtcaattatcttccaaaatattcaaaattactcctatttgttataaatattaataattatgtggatgtccaaatcttttatttattacc

SEQ ID NO: 377797 - DNA, 3482 bp, Cannabis indica
catgtagagttttgtgcattacattttagcagatacctcattcaatttttctttcaaaaactatgtactttatttatttaatttttttgtgggtgtgttgttggcagggattagacggtgaggccactgagccaatgataaaagaattagaagaagatcgtgaagagtcacaagatccagaggttgagtttgcaattgctggtgccgttcgagagtataaggggttagaaatcatattgggcatgatccaggtttgtgattaattaaatcgaatcttttgaggtgtctttaatgtttcacagcttcaaagcttgttcaatatatatgggcttctttctacaaatttagttttctggactttaatttcgactgctatcgttagtctgggacaaacaaattaaatgctgcaggactctggattaattttttagtaaggtataaaataattgtaaattttaatgagttcgttcgagaaaccactagctcttaacatgttctagatcgtgatatgacatatattctaatttttgtttgtaatgtttacttatattttcaaaaaatttgcaagtttaattattactcctgggtttcattgatacttgaactgcaaactcctatgaattctctctccaaaaaaaaaaaatagaggtatctgactttgatttctgtgtgcagcgtttgatggatggttttaaatccaaccaagaacagttggtggcagttctgaatcttctaatgcactgctgtaaaataagagagaacagacgggcattgttgaggttaggaggtttaagtttgctacttgaaacagcaaggcgtgctttctctgtggatgctattgagccagctgaaggcattcttttaatagttgagagcctaacactagaagcaaatgaaagtgataacattagcatcactcaaaatgctcttactgttagtagtgaagaaacaggtgaacaggccaagaaaattgttctcatgttcttggagcgattgtctcatccattaggccttaagaaatcaaacaaacagcagagaaatactgagatggtagcaagaattttaccttacttgacatatggtgagccagcagcaatggaagcacttattcagcattttagcccctatttgcaagactggagcgaatttgacaggttgcaaaaacaacatgaagacaaccccaaagatgaaagcattgctcaacaggctgccaaggagaagttcacattggaaaattttgttagagtttcagagtctcttaaaacgagttcctgtggagagagattgaaagacattatccttgagaggggggtcacaggaattgcagttaggcacctgagggacatttttgctgttactgggcaagctggctttaaatccagtgctgaatgggctttgggtttaaaactgccatctgttcctttaatattgtctatgttgaggggtttgtctatgggccatttggccactcaaaagtgcattgatgaaggaggaattttacccttgctccatgctcttgaaagtgtaagtggagaaaatgagattggggctagggctgaaaacttactagatacactttctaataaggagggaaaaggagatggtttcttagaggataaggtaaggaggttgagacatgccacgaaggatgaaatgaggcgcttagctttgaagaagagagaacagatgcttgaggtacttactgttagctcattgaagattcagtcaattttgccttctcagttttgagcataataaagtaggttgtgttttaactgtcttctcagtgaacacaaatactttacaggagaatttacttgcatctgcaactaattgtttttcaagtattgaaggactcgtcactcctttgtgtcatctttgcttgattacatatgtagagtttgtaccaataagattttaggaaatgcataaaaggggcttttatagcatttactttttcatatgcatcttttgtttaattttcatcttttgagggtttcttctgtattaaagagacacaaaggaaagaatccatacatgtgccaattcttatcatcagcattttgcttttcttgccaacagaaagaagtataaactaattgatactgagaatctctgtttcttatgttttgtgatttgtccaggtgcttggaatgcgtcaggagctagcttcagatggtggtgagcgtattgtagttacccgcccacttcttgaaggattggaagatgtagaagaggaagagggtggattggcatgcatggtgtgtcgtgagggctacagtttgaggcctactgatttgttaggtgtttattcttacagtaagcgggttaatctaggtgctgggacttctggtagtgctcgcggggattgtgtttacacaacagtcagttatttcaatataattcattttcagtgccatcaagaagctaaacgagcagatgctgccctcaagactccaaagaaagaatgggagggagcaactctcagaaacaatgagtctctttgcaattctctctttcctgtaagaggtccatcagttccactagcacattatattcgatatattgaccagtactgggataacctcaatgctcttggacgtgccgatggaagccgacttcggctattaacttatgacattgttctggtaggggctgctatatctctgtttcttctcactttcattgaatgtgttttcatttactttaggagcctattcttaagatgatcgttcatactctaacctcatgctgtgctgaaatctagtacctttcttaactggcatgtaatatagatgactcactgcacaattatgatgatcacgagtttcctagaccttagtacttgtaaattttttatgctctggttaacatggtgatcccctattaatctcttgctatatgttttgtcttgtagatgctagctcgttttgcaacaggggcatcattcagtgcagaaagtagaggtggtggaagggagagcaactctagatttcttcctttcatgatccaaatggcccgtcaacttcttgatcagggaagccattctcagcgccgcaccatggccaagtccgtatcaacatatttaacatcatctaccgtagaatccagaccgtccacccctggatcacaattacattctggcaatgaggaaactgtccaatttatgatggttaattcacttctgtcagagtcctatgaatcatggttgcaacatcgcccagcatttttgcagcgtggcatctaccatgcatatatgcaacacactcacagtctttcatctgctcgtgcttcatcatccgttatcaaaatggagtcaactactagtggcagcaaaaaccccgcttctgaatctggaaatgccgatgatctcttggccattgttcgtccaatgcttgtctacactggtctgattgagcagctgcagcgtttctttaaggttaaaaaaccgacaaatgtggtatcagccaaaacagaaggaa

SEQ ID NO: 377798 - DNA, 6904 bp, Cannabis indica
ggggttccggattctttctagagcagagagataataatgtaaaaatatataaatatataaatatatatattacatactaattaagttactcatatgcattttcatagaaaggagtgcacaacataaaattagtgatcagtattcgcataaaaacataaacacctttaaggaaatcctcagtgatgcctcagcaaaaacaggttctaaacttcaaaatgatgccaaaacagatgcagacagtgataaagaaagagtaattgactcgccaaacaaaacatctttgaaactatttctattcagcaaatctgggtttcaaactttaatgcaatccccatgctgaagagttcctggctcaacaacttggccccataaggcacatcgaccttaacaatgtcgtcagctgactcgcatatcctacaatacggacccctgaccttcctgtccaccagccaaacgcacgttggataatgtaagcaatattttggcatttttggcaaatatgcatttgggaagagtcactcagagtaaagagtcgttcatgcaagtttgctgatgcaccatgggctagcaggcagtctcgctccatctccccaaacttgaccccaccaaatcgcttacgatcagccactggctgacgagttagagggtggacagggccagtgtttcggaattttactttatcttcagccatgtgaaccagacgctggtagaaagttggccccataaagataagcgaacgaaccatctcacctgttcggccattgtatactctctcattcccccatcttgaaaatccagccctatgacacataaatacaattttactgaaatcacttcatactatttaagaaaattggaaatatgtagattctctcaaaataaatctcacttaaatcaatttttaataaataaagaacataaagactagaattgtgtgtacgtatagaagcaacatgaaacttggtatatgttgtataacaaagctacctgtgcagctgttctgtgatagcatcaaccgagggagtggagaaaggggtggcatgtctcactgggatcccctttgctaaagcaatcccttttcctaaagcagcctccagaagttgacctggagtttgtcgcgatggaaatgcatgtggattgatgacaacgtctggaactattccttgaatcgtaaaaggaagttttcttgggattccaaaaagcccaaaacacccttctgtccgtgcatgctcgagaatttgtctccaagaattggcgtacgaacctgcaacaagaatttggaggatgtaaaacatgaaaagaactgtcatgcaagtaccctaaaacatagagaggccctactaaattatgcaaataaaaatatgcatagaatgtaaaatacctgtctgagagagaccacagcaaagttttttccagcatcattagaggagagtacgaccttctgaaccatccccttttcagtgtgcttcagtttaatactatgatcaaccccagattcagcacacctacctataactatatcaccactctgtaggttcgcaccaacaaaaggaaaaccatcatcatctaagctatccacacgaccaattttacttggtatctttccaaaattgatgcattcatcagccttcatctttttgtctaatgattccgtattgtcaacctcagccttatagcttctaatgtgttcagatcgaaacataccgcgctccaaagaagctcggttcatcaccaaggaatcttcttggttgtagccaaggtgaacattgacagcaacaatggcgttctggccattgtagcattcattctttggataacctggttttccaagacagtcagagattattgttcgaaagaggggcctttggggataatgcaattggtgagacaaagtatctactctgatattaggatttgttgttgaaaagccaatagcctgttgagaatgcttctgagcctgatacaagactctccttgcatggtcatgatttgcaaatggtatgattccacagcttacactcaacaaaaaagacatgtccagttcacagtgtgtatattcaacaggctttcccttatcttccatgaaaagaaatttgataccccatgcagttcggcaatcctcctcttcttcagctccaataaactcaactattcccctatcaagaagagatcggaaggtgtattttccagctttagattgtgtaagcttacccaaattctcaacaactagaaggggacgcaaaattcttccagcatcagaaaatatattaacttccccgtgagttttgtctcttttaatttccacctacaagatacaatcaaaacagaacatatcaataaatataaggaacagcagaaatcacagcatatcaatgtcaagcaaaggaaactaaagatatttgaactgcgtaaaacagaaattccacattgttaaataattctaagatttttactattgcagttcataaattcaatgaactagtgcttctgtcgtataaaattttgaaagatgtttacatctttcaaaagtctcctcaactacagaccatgaaaattaatatggttccaaaatcaaaataacataaacctaagagaaagaaagaaaaaaaagtttctgtagagaaaattagagagaacctcgcgcggcaattcctttctgcgccgcattttcctcagtctccaaacgaaggcaagggaatcgacacaaactcctacccaatccccattgagaaatactttatctttcccatcaagtggtgtcgaagtatcattcaccaatttctccatgccactatcgcacaacttggaaacgagggattctgctacttctaaacttactaatccagttgtacccaaatttttcacaagcccacaattttcaccgtccggggtagccaaaaagcaaaccttcccccagtgggaaggatgcctgcacacaaaatgttacaataactatgattataactttcagcaaataagaaaaaacaatgattacaaattttataactactgatgcaagcatcatagagctaatcaggaaatcatcaatcatcctaggatcatccatacaaattctaagaaattattgtactaaaatggacagaaaattgattttgttcaaagcaactcacgggtatctagcatctccaaccttcccagtgtactgaacttgctggcgtgtttttctcatatctacaattgtctgcagtggatttgttcggccaacatttgccactacccctgaaatcctttctgtccgcttgaaaggatgacaccatgccccagttgagaaagctctcgataaaccatttgtgactatagaggcatccaaatagaattcaatcggccgcaatggcctttctccataaaggtccctttgcaaagccttagccatgcgcttccgtgcatgggaaacatgagcccttagctctcgctctagcaactcaccggctaaatctaatctcttatttctaaaatcatccttgttattcaattttctacgaccagtagcagcctgcagaaggcacttcaccatataacctagaaaacgagccttttgctgtgtgcttctcagatttggaaacatatacatactaaggcattcttcaatgctttctttaggaggaaacaaagtcttcttaagctgtttatcaacgtgagtgagagctgcttgggatttacgaaagccatcacatgccttgtcagcagtactaattgatgcaaagagtatattggaaatgctagcatcgtcagtggcaaaatcaatgagatccacaacttccctgtcggatgacacgccaagggcaaagaacaaaatccatacaggaatctcagttgacaaaaagtaaacagtaaggaccttctctggtttagcatcttcaacttggctgggcgctagcctaataattaacctattcctctttacttctgattggaatgcaactgtcagaaaaggatgactacttatccaaagtctcttcctacatatctgctcttgagcaataaatgtctgcaatgaacaacatagagatgttacagcccagtgcttaattaaagtaatacctaaaataagttacatatataaatagagagagagatcttggcaatccttcaaagttcaaacatgttcatacatacattaaccttttccgattgtaaatcatatgtccacactgtagataattatgtaaccaaccttttcatcatttacaattgacaaatcatttggctaatgaacttgataatgcaccactacaaaatacataatagtataatggcaatcacaaataaaatgtcacataaaggagatattactagtgatttctaaagctgaccttttctgcgcccttgactataaaatagcctccacgatcaaaatcacagtcatctttctctgcctccttcatccaacaaaggtcagactttaccatcaccggaatctttccaatcatgacctctttagactccgaacttacaaccttcttgtcaaggtattgcgcctttccagttttgaatttgtcactactagtcatttcttgagtatacacctgaagaacaaaccaaattaataataatactatatttaaaaaagcagccttatattgaataaataaatacctacagaaatgggtcaatatgaagaaaacaatattaagtatagaacataatgtacatgccatttctttacatatgacaaacacatgcacagacacatattttcggtgagataagttacactgtatagactatatagattccaaacacgaataccgtaatgaatcaaaatcttccgaatttaagagagcacagaatgtattgaacaatagaagatatcaaaaaggcctccaataataccaaacagaaacatgtaccttaagatgattcccaaatctatacatgcattggcaataaccatataatagtatagcatgtcaattaaaagttacaggggcagtgcagaacaatcaattttcttttaacaaaacacttcacacatactatgtatgcatacataatcaaaaaacagcacaagtacaaacaattaaactaaaatcagaaaagtggagaatcagtaacccaaaagaaatagaatattttgtcacataaaatgtttaattgtcacataaatgacaagactaataaaatgttcagatatcatttgatgctccgaaatattcacctcaatattaactgtcacataaatccttgacgagtaagtcatgttctgtagtcgagcgtgcctcggtaacatattgtactctttatctttggcagaaccaccccaaaaggttggctgaacaagtctaacctcgccaaaacgcactgaagcatatcgccaaatctctgtctttttcgatgggtcatagccaggctcaactgtaagctcgccaaacgactcaaaaaccctctttgcgccatttctgatgaaatcgttgtacgagtttatctggtgactgatgagtccatactctttgaagaatgctactgaagcatccttgcagaatttctgcaaaaaaccagctcccagatgctttatgcttgctggttccatacacttgtcatcatcaaaatcatcatcatcatcatctatatccatttcagtggtatttgaaaacttatctcccttgctactcatagctatatcttccttgggatccgaggacgctcccatttgagattaaatctggaaagaaacaatagaaacaacgagcaagtaagaaagaatctgggtgggaaataatcctaaaacccttcataaataagaccaattctgaaaaccccaaaacccctaaaccctaaccctttcatcagctgaaaacaaactattaaaaccaatgcaaaaacataactaacctttttgcatgaaaagcaaaactaaatcaactacacagagtactttccttcaaatcaatagcaaaaaaataaatattataacagcttcaggaatgaatgtgtttcctttcctaacatgcatacccatttccttactgtaataaaactaaaacctttaccatcttccttaaactttggtattttgggtattcattccttactaacaacaaacacaaatcaaaattaagcttagtacacctctcaggtctcacctttgtcttagctagaaaaaccctttccggagaaaataataaataatcatctattcaacatcgcgcaagctaaaattaaaatgatttactgttctaagcaaaaactcaccgatcatcggaaaacacaagaaaatgcatgaatattttagagagaatcagaaagataacaaagacttacggtaaaagggggagtgtgagagttaaaaaagcaaaacccttaaccgaaaacaaatttgaagaacaagagaggagaagatgaagacgaagatgaagttgaagggtcttactcaggctaccgaaccgagtacactctctcagtctcaccacttgactggggtctgttgaaacttgaaaatggcgtcttttttgtgctcttttcaatttcacttacctttatcaattattttattattcttccttcattaaaaaaataattagcaattttaatccctaaattttcaataatgttaattttatcttttaaaatatactatttattaaaaattcctccttaatttttaatttagtcattttattaggtttttcctcattatttcatttacatattgacgtatctttgtaaattagtagctttatccatgacaactattaaattgtacccctccaaataaaaataagaaaaatttagtccatatttggcatcataactaaaaaattgttttttgttttttaaaacagaaaattgttttttgaaaacaatttggcttgtttggccttatttttttaaaacagatttcagaaaacaaagttacaaaaaacaagaattttgaaaacaacaa

SEQ ID NO: 377799 - DNA, 1744 bp, Cannabis indica
cagaaagccaaaatccctaactttactccccgtcaacagaatcgggttcccaaggaacttatcacttcgattaagatcacgatatcccaacaaacccttgatttcacctctcagctccataccaacattatccgagaagactatagcagacttgtttgagttcacacactggcctgagttagtacaatacttttccaaacatcgtttgacctccaacacattctccttgttggcttcgcagaagataaaggtgtcattagcatacatgaggtgggagataggcaaaccattccttgaataggagaaccccttaatgaacccttgacgttccgagttaagcaggagccgggagagcacttcactacacaggataaacagatatggggataaggggtctccctgtctcaggcccctttcgggggagaattgcttaagggggccaccatttaggagaatcgagaaggacaccgaggacacacacttagcaaccaatcgtctaaagccgacctcaaacccaaaggattccagggacttgtcaaggaacccccattccaaccgatcatacgcttttgacatgtccaatttcaacccaacgaaccccttacggcctctcaactttttgaaggaatccatgatctcatgagcaataataccattctccgcaatccatcgccccgggacaaaagcagattggaaaggagagataatacccggcaggagcctcttaatacggttggccagaagtttagatacaatcttttaggaaaagttgcacaaactaatcggcctaaaatcatcaaaacactgggcattacctctctttgggataaggacaatgaaggtctaattaagcgccttgacgaactccccagtctggaagaattgggtgaccgatccaatgatatcatcacacactatatcccaatgagctctgtagaaacggcccgacatcccgtccggaccaggggcctttagctgacccatggaccaaacaaccgccttaatctcctcagccgaaggaatcctcataagttcaacattatcctccggggacaccacccgagggatgttctcaaagacctcgctcttcaaaccattattgtttgtagagaacacctccataaacttgttgcgaaaatactgccccacattctcccggcctgtcacccaatccgatccattatcggaaactgcacccacaaagttacgcttccggcggatgaccgtagaggcacgaaagaatctagtattccgatccccatccttcaaccacaattctcgggatttctgcttccaaatctcttgatcccgcttatgaatctcttccatctcaagaagaatatcagcttcaattctcaaactatccgaagacgggggacggccttgaatctcactcaacaacttttctaacagagcaagcttatccttacaaaacccaaacacttctttgttccacttagcaagcttccgcctagtttcagcgagccgaaccacaagctgataactcttgaaacccctaacctcaatttcccacgcctggcggataacctccttgcatccaggatcacgagtttttatgacccaaagaataactctatcatcaaaaatacttcataaacattaaaaagtaatagaaaaaattcttcaaacaactaattgtaaacacaagtgtattaataaaattataaagttaaaaaataaataaaattataacgttaaaaaatagagatctatacatccccac

SEQ ID NO: 377800 - DNA, 9026 bp, Cannabis indica
cttctctcccttagctggttttgatcacagcctttgtatatatataggtttcattgctctgtaatcttttaacttaacttcaataataatcaaagctttttcaattccgcattacagccatacataaaaacatgagctacttcacttatcaccaattgattttgaaatagaatctcatgattctcaacacttacaaattcatcacaatctcgtttgtataacctcatttgtcccataacatatgttagatcgaattggtgactaaagagaagaggttcttgttacaccaatccaatttatatgtgtcctcaaccatcaaagattgtattcctttatttctttcccatcaatgagtatattcccttaaatagaatcatagaatctaagcaaaagtgccaaaatggaagatggtgaaaaaagaggggtataatgggaatatatattttaacttcattctaaatattttactaaaaaaaattaaaaatttaaaaaaaaaaaaaaaaaaaaaaaaaaaaaaaacaattacttttaccttttacaaacttataattgaaaaaaataaataaataaaagaaactaactttaaccaaaccaaagccctaaatccctaaaagctgattaacaacgcttgtggattctccgacgaaccacaacgccggcgtttttcagtcttcaacaccagaaatggaaaaattcctctgcgatcaattgcttgacccgactcagcccatctcagaccgcttcagagctcttttctctctccgcaacctcaaaggttctcgtcctcgaaatgccctcatactcggtttgcttctttctctctctctctctcagtcttctctgtttcatttattactcacaagtttggatcttttgttgtttttatatgaaacccaacacttatttgttctgttaattactaattagaaatatatatatatatacatatttatgtatagatattagactaattctgcaatttatgtttataaactgtaataacacaatgtataatgtttcacaaattggattaaatttgaaatagaatgaggaaaaacaattaatcatgtaagggagaaaatgagagttgagaatgctgagagaaaatagcaaatgtatatactttgttttactcaattatttttattttaatggtagtgaagttatttgggattttctagtcaactctcttttggtttagatttagaccctttgctgcaattttgaatatgttccctctttcagctacaagggactcttctaatttgttggcacatgaggctgcatttgctttgggtcaaatgcaagatgctgaggctgtccctgctttgatagaagctttaaatgatctttctttgcatcccattgttcgtcacgaggtgaattattaactttgatagtgctgattttgttgttttcttgcatgagtttgatggtttttgacattattcgacaggcagccgaggccattggtgcaattggtttaaagagtaatgttgatttgttgaggaagagtttagtcttagatccagctcaagaagttcgagaaacatgtgaattggccctccaacgaattgagcagttgaaggatgatggtgagaaattcactgttgaaaagtcaccttttctgtcagttgatccagctgcagcagctacttcatgctcttcagtacatcagcttaggtttgtctcgttttagatactctaacatggtacgaatttgctatgtttttaacttgtatatcctgattgattcatagggatgttcttctggatgaagaaaaaggcatgtatgagcggtatgcagctctttttgcacttagaaataatggtggagatgaagctgtagccgctgtaattgattctttgggttcaaagagtgcccttctacgacatgaggttggttcaattagtcttattcttcatacttattagaaatatctacattttcttcttggttataggaaaggctcatgtttggggttccatgctttaatcctttggctacatatttcgctaaaaattcaggtggcatatgtgttgggccaactgcaaaacaaagctgcttcagatgctctttcagacatacttaaggatgtcaatgaacacccaatggttagacatgaagctgctgaagcacttggttccatcgccggtattatgttatacctgctctacttcttgctttttacatctatagttctgaatacgatttatttaacttacatgcttaattgaatgaaatttaagatgctcgaagtgtgtcacttctcgaggaattcgccaaggattctgagccaatcgtttcacagagttgtgaagttgctctatgtatgctggaatatgaacgatcagggaagccattcgaggtaagcatacaactgttttgagcttagaatctatcatgcatctatatcatacatagcccttttgttaaatgatgactaagaccagtattttacacagtttttcttcacgcaaactcctctactgcaataacagttgttcaacacttttgctttgtttgaagacactcttgtcatctcctagcaagaggagatttattcttaaactgtatttataccaatttatggctcaaatgtaactcgaggaaagagagttctctttcttttcgaatcgttttagctagtttggatgaacatgttttggtaatacatactacagatattgaatatgtataacacatcacgagcatgtcttctcgcgaagagttttaacagttgaattgtctattcttaataaggctttcttgttagtttacgttaaattatattcgttcatcaagatcatttcgatccaatttatttgagtgaatcggataagggattaaattaatcttttaattatttatttatttttttttatttcatatgaaaaataaatacttgttcaagcttaagtaggttgaaatcatagtgcaagcaagaaaaaaatttagataaatttagattggctagaaattaagcttgaacaaattaagcttaataaatttagataaatgaaatatggaagtttcttaataaagattacataaatttgaatgatgatggtgatgacaatgatgactattaataggactttcattgaaatgtgtttaaaccttggcacacatttactctcattagttattcaacctattcctcttcccaataggaatcaaaatttcaattatatgtattttacatgttagatttttaaaaaattaaatatccatgtgatatatgatgtcattttagtatatttaaaaagttagtcggcactctcatgtatgtcaagttgaacctgactataagcggactaggtctgtactaagatcccactctaaaatacttcattgcatatactataatatagtagtagatatggaagagattttgagaacaaaaccttatgtatccatacattcttacattttcttttttcatatcaatgtgataatgccttctccaagtatatgtataatatattagtaacttgtcaatgttatttcttgataaaagttactagaaaattctattactaattcaaccacctaaaaattcgtcaagtttcagaacatttaggccctgtttggtatagcttttatttatagcttcgggaaaaagtcttttaacactcttaaaagtgcttgattttttaattctaaaagctaaaagcagcttaaccaaacaaggtcttaatgtcctgaaaaactctgtaaccgggagagtcttgagtacaatcccttggattctaataagcttgaatgtgaacccatttcaacaatctcacctttgtccataacaacaatagtatctgagtttttgatggtggaaagcctatgagcaactgtgatttgtgtaatacatgacattcgatcgccatttagattcatcgattccaaagcattgacaatgcttttctcagactcagcatcaagagcacttgttgcttcgtcgagcagcatgattgaaggtcgcttcagcagagttctagcaatggcgactctttgcttttggccacccgaaagttgacaccctttttccccaacaacagtgtcatatccattgggtaaagtgcttacaaattcatgtatgtttgcttgccttgatgcttccacaatctcagtttctgtagcctcatttgtcccataacaaatattggatcgaatcgaagaactaaacagtaaaggctcttgttgcaccaatccaatttgtgtcctcaaccatctcaggttatattcctttatttctttcccatcaatgagtatattcccttctatagaatcataaaatctaagcaaaagtgccaaaatggaagactttccagccccacttggaccaacaagagcaactttggagcctgcttcaatttccaaactaaagttgttaaggacagtaacttcaggcctcaatggatagttgaacttaacatgttgaaactcgatttgccctttgatcaaatcgcgatttgaaggctctggtgtgtttggattgatttctgtttttcggtcaagtgtctgatatgcaggagttagtacacttatagcagagataacagtaggaataagtgtccataattctgtgattgaaggaactgtgagtgagaatatctgataagatcttataccatcttcgaatttcgcttgtcttctatcaatcaaaactgttgtgtaccaaagagcaacagcatgtgcaatgttccataagcaaagtgaaaatccttgaattaaaccatacttaatactttgttttctgctcttctttatgggattttccaatgacattttggctttgcttagtatattctcttcataacaaaaagaggcaacagttcttatgttggttgaagactcaacagcaagagcaacaagttcagaatacgaagaagctaagtcacccgaaaatcctttagcagacttggcttgaattagtccaccaatgaagtgacaaggcataactgcccaagctaccaaccccattctccaattaacatacatacttacaattgttgctatcaatattgaagagatgcattgtacaataacagacattcgatctgcaatgatagttttcaccatggttgtgtcactaataacccgagatgtgagtgaaccaacactgttctcaggcttctcaaaccatgccacttcattgttgagtactcctgtgaaatttgaaggtttgacatgttagattaagttgatggaaggtgaaatatgagcttgatatggcttcaagtttaggatatacccgaaaacaaagctcgtcttaaattcgccatggctttctctccaactattccaaagaagtaatgttgcaaagtatgagagaataaagaaagcaaccctataacaaaaaataacaatgaatacaagccaacttttctccttgcatcattatggtagtatgctactcctatagtgataatgtagtatccgaaaacaggctttgaaatgccagaaaaagcagctgcaacagaaccgagaccaatctttgtgagctctctttttctcaatccaaaccaaattcttaagaatattgttcttttccttcctctttcactctcttcttgcttggaattttccaagacaggatgtacagattctgttactgtcttattttcttcgatgtcattttgaaatgacatatggttttgacaactttcatcctcttcacaagaattttcacttctgtcaattaacaatagaacaagattagatacttcaattctactttatatagaaacttttaagcatggaatcattactttgattcgagaatcggattaaggttctgcatgttgaacaagttgttgtagaattcactcctatcaagaaggccgcgatgagttccaatctcggtaacatgtccattttcaacaactgcaatcatatcagcattaacaatggttgacaacctatgtgcaatcaagataactgtccttccttgcatagctttctcaacagcatcttgaactaacttctctgactctgtgtcaagcgcgcttgtggcctcgtcgagcaaaaggattggagggtttttaagaatggctcttgcaatggctactctttgcttttgaccccctgatagttgaactcccctttgtcctacctaatgtaaaaaataggtaaattttctcaaaaccaaaaaatgtaaaagaaaaaaagactgttagaagcaaacctgtgttgagtattgatttggtagttgtgaaatataagaatgtgcattagccatctctgctgcaatttgaatttgttggtcatttgcatccatatcaccaacttttatgttgtctttaatggtgcctgtaaatagtgatggttcttgggaaactattcctatgttactccttaggaactttaaatccaaatccttaatgttatggtcatcaatgagaatttttcctgtaaatttacataaaaaaaagtaataaatatcattctttatgaaagcatttgtcaactacacaaactcattcacaccatttatttaagggaaatactcctatattaccttgtgttttttcgagaaagatattttaaataatacttatttggtactatatattttgaaattgtacatatttagtaccttaaaataaaacttaatcaatataattttatcaatttgaccaaactgttctcgattatatgtaatcaaataattaaatttgaattcagaatttataaaattgaagatagttttattgcattgatataattttatcaaataaatttcaatttagagtaccaaatatgtatgatattaaaatatagggtgtcaaataagtattactgaaaatacagaatacgaaactagtatttagataaaacacaggataccaactgtgtaaacactcttaatttaatcaaaatgagaataaagaaacatcccaagattcccaactaagatgttactcaattctatctatataatagaatcgagcattttcaaccacactctctaaatgcactattgacttaaaatagagtgtgagctccaaccgtaagaacaatgactctctaaaatagagaaaggatagtgagctcataagtttacttttggattccacaaactgaaaaattattaaaataataaattctaaccaaactagagatcatgattgtagtgagatgaggaaaaaaaaatgtctattttagctaaaagaaaatgaaaatagggagcccctttggagatgcatactaaaggtgtatactaaggaagaaacatagtgatctttttaagtgaattttcaagttgataaagcaaaccttttgaagggtcatagaaccttgcaactaaagaaatgatagtactctttccacaaccactactccccactagagcaactgtctttccggctggaattgatagcgaaaacccttcaaggatttgcttctccggccgggatggataggagaaaaacacatcacatatttcaatgttgccacaaacctttccaagtgtttttccttgtgaagaatcactacttatagttggctttctttgaatcacttggaaaacttcataccctgcaaccttggcttgattgaatatttgcatatctggtgcagcataagtaattgatctgaaatgagaattttatgtttcattattagttatagaaaactattcattaaattcaacactgaactttgacatgtaacaaattatattccttgaattttttcaaactgttaaaattctccctaaacttttgagattgttaaatttgaggacttctctataattctattacattttattatcgaggagattgtccatgtacgaaattgtccctctcgaattttaacatgtaccaaatcctccccctccctcccccccccccccccccaaacctttaatatatgtcaaacttttatttgtaaaattggacaaaagtacttaaatctaacaaggattataataatttggaccatgtattttgcaaaagttactggttggaccctctgttttgttaaatgacaacatggacgttgtattttccaaaatggtaaaaataagacccagagcttaatttttgacaattgtttttttagtataaccaacttgaaaataattcctaacacgaacagatacaataaaaataaaaataattttatcataacacttttaaattagattattattaaattttattttgacaaaaaatcagttcaaggtcctatttgtaccattttagaaaataccggattcattttgtcatttaacaaaatagaaagtccaattgataacttttgcaaaacacagggtccaaaatgatatttaccaatctaacaatctcaatagtttggaaagaattttcaacagtctaaaaagttcagaaaaacataatttagtacatgtcaaagttcagtaaacaaaaaatcatattcagcctatatataaatttcattttaaagtgtttttggatattaaaactgaagctaaggagtttcgaacttttgacatcttagatattaaaaagactttcaacactaaaatttactagagaagtattaatatagaggccccgaaatctaatttcgctttaggtctcaaatagcttaagaccggtctttaacttaacttacatagctccaaagagaatgctcatgacagcagctatgatatctccacctttagctttgttttgtgtgactaaaacagctccaatccatataataagagcccaagaacaaaaggaaactgtttgaaacagtcctgttccaactccctttattaaagcttctcctttgcttaccataacttgttgttctaacctctctgagaatgattttattgcagagttttctccaacaaatgcatacactgtttttatttgagaaattgtctgttgcccaaatataaaacatatcatattacataaactacttacatatgtatatacaaggccgactcaaggataggacagttatgacccaagaaatgattttatgaaaaaatgtctctaatttgattttttaaaaaatgttgtattttttttaatattatttatta

SEQ ID NO: 377801 - DNA, 8284 bp, Cannabis indica
ttgaagcaatatgccgagcctttttgtggaagggtcaaagtttaatgcaaggggcaggactagtggcttgggagaaggtttactctccaaagaaggaaggggtgtaggattcaggaaaatacaagaatggaatcaagatgctttatacaagtaagtatgggcactagcaaataaagaagataatctgtgggtgcgatggatacatagtgtctatattaaacatgtgattggtgggaatataagttcccacaaaatggcagctggtattggaaacaggtggtgaataagagcatgatggacaagcagatgtttgttggaacccgatactccattgctgagggatacaaaatgctttgttcagttcaacagaaggtcacctgggatagagaggtttgaggaaggctaaatgttcccaaacattgctatactttctggttagcaatgcacaatcggctgagaacaaaaacaagattgaaagctcataatatactgcaggaagatacttgtgtcttatgcaacttacatcaagaagacattgagcatttattcttctcttgttcagtttcagctcactgtttgcaggaaataaaacaatggctgcattggggttcgaatagctcctcattgcagcagctggtgagagtgataagaagagcaaggatgtcaaacttcaagagaaaggtatttttggctactactgctgctttgatttataatttgggaaaacaagaaatgagcacatatgggacatgaagacaataagcacaaataagattatacagcacacgaaagaggttgtaaagacccgtgtaagcatatactggaccgaaggaagttaaaaagaaggagcaagactggttttcaacttataaaatggagaaaatagctttgatgtaaataatgataaaacaataatgattcatataggtccttatccaatgaggttcctatttgtttgtacaaatgagatttatgagcaatacaaccttgatttatacaaaaaaaaaaataataattgaaaatactaaaaaaaaaaaaacctttttcaacttattcctctctttctttcttgtttttatttttttttaatgaaaatataactaattcatcttaaagaagaatgactattaagttgggcacaaaaaatattatatttagctcaattcctcaccacttaaaaaaaaaaatacaagaccagtcacgcatgcgtgacttcatccgtgtcctatatatatatactagtgaaggagtagtgccattgacacctatcacctatttttctctattattttcatcaatagtatattttaattagaatgtattaattcattagaaataaaaaaaataataaaaaaataaaaaaaaatatatgaaggaagaagaggaaaaagatcacgaaaaatatataattaatttaaaatgtaattataattggtacaaataaaattaaatacatatctaaagacataaaaattactaatatataatcttattcacattgagaaaaatataaaaaaagcatggactatattaataaaaaaaattgaaattttaatcgtagttataaagatatgtacatattaataacaaaaatgataagagacacattaagatggcaaacaccacaaaagacaccataaaattattggtgcattttaataccaactcccaaattttttaatttaaataaataatttagaaaactgctaactaattattggataccacttcaatcggtatgtattgagcaccttaaggtgtcatatagcaataatagtaaaaaaattatttaccgaaaaaatagtacaaagacaattcatataacaaaaaaagaaacaaaaaataaataaattttgcatcaagttttgcaattgtgtattggagtataatactaaaaattgatgcaaatatattacaaaatatttttgttgccaattatatcacatttttttacatatctcattagagatgttcttgcacacttatatataattaaagtgaatttcaatatcagttcccacaattttaatttgataaataatttaaaaactagctaacaactattagataccacattggtatggtattgagcaccttaaggtgccacatatcaatattagtacctaaattatttaccaaactttcatttttgaaattctctccgtacatttttgaaattctttctgcgatggcgtacgcagtgtacgaatagagtgtgccgtgtgtacgatttgcccgttatggccggtacggcggataggggtcgtggccgactaccccctgaccattcccaagtggtcctagggtgtattatccctcattttgttctgcgatattacatcatccttttcccttttcaagcttgcgaaaagattttgtgcgattgctgctactagagtcgattgagtggggtttttacttcatcagctaatatggatagctctaggatcgtgactgtggaagactctgtggaggaagtggaaaatttttcttaggatgatttctcgatccaaatcgttcctgatacagaggcggctaagagcactattgcttcttcagtggtggggcgtttcttctcttagagggatttctccactgctacaatgagaggtgctctgactggtatgtggagattacaaaggggctggcgcttccaagttctcgactgcaaaaccaagacctttgtcttttgtcttaactctgagggggaggctcggtttgtcctctctaatggaccgtggtccccttgcgatggattcatgatggttgctgcaatgccggaggacgggctgtggacgtcgggggaccttgattcccttgatgttttggtgaaggctcacggtatacccctagagcttatgactgacgatgcggcggttctgctcgcgaacagagtgggaaaatatatctcggcgaataaagtcaggaagaaaggggttctaataaactcgttcatccggttcaggtctcgaattagtatccgcctaccattggttcctggcgtctccttggaaggtaatagtaagaagaaacattgggctttttttaaatatgaacgcttaccagttttctgttttaagtgtggtgtgattggccatttggagaacatgtgttctgggcgtaacagagtggtattggtggatgatggtcgcagtgttcccctttttggaccttggatacgtgatgggtctcgtcttgaaaatggatttgccttactagaggtggaggatattcaggatagagttatattggagaaatcagatggctcgcgtcctcaggggatggataatggggctgatgctgcttcttgctgtcctcctgttgatcatactccccagttggacgtctccaacggtggggatggaacccctacgtcggatcttgttagtaaggatttactcgctggggggatggaaggggtgcctcgtcaaagatctgatacgacatgctcggtggcgtataacgattatgtgaagattccgttccccgctcaacatgtatctcatgtggccaagattttccaagaaaaactagggccggtctggttcggtgctacccgtgaaggtgaggatatagggaagctccctaaattggcttatcacttgaagaaatcgaagatggtgggtcctaatggtatccacaagaaaccggtgtttagattctctaaccgggaccttgagccttgtgtcgggggtaaacgtaagaaatcgatgggggaagagttcacaggtgaaagcactgggaatgattgtattgctattgtggataatcatagggttaatgatgtgtttggtgaaggcagcgccattgacgcttgtgggaatgaaggggaggaggaagagataatctccccatctaaaaagttgcggcttgatggagagtccattttggaagggcgtgatgcacttccgattatgggcgagtgcaacgagtctatcaattctagactcctggtggaatctgcccctgcttggttggatggatagcagaaagtgggtaaatcctgtatatcggatgcaagggatcctcatcttacaattgctactgttggaatggtgaaaaatgcggaattgaatttttcgttggccgaggaggcgggccttatcatgcccctcaagtccccatgaaactcttatcgtggaactgccggggcttggggcaagctcgagcagtgtctgcccttaggggattggttgtgaatgaaaatctagatgtttgttcttgatggaaacgaggttaatttgtctaggatgaattggatatggcgtcatttgggatttgttaatgcgatcgtggtggaagctatggggtcggcaggaggcctttgtctatgttggaaacagggtgtggagatcgaaaatcttagtgcgagtaaggcgggtattatggttcgattcgagaatactctcaattgtccagcttggatcgggtggtttgtctatggcctgcctattcgaggggacaggggagctttctgggatgatatcactctccatgtcttatcttttaatgaaccatggatgttaatgggggatttgaatgttatggtcaaccagtccgagaaatttggggggtcccaagtgattgctgtagaatgccgatcgttcactgagttcttgcttcattctggtggagtggacatcgggtgtgttgggaatttcttcacctggtctaataagagacaacttcctgatcttgttaaagagaggctcgaccgtgtgattggttctactgactggctaattcgtttccccaaggccggtgtgaaagccttacctatccgatcctcggatcatgcaccgctggtcttggacttactgtttgaccaagacaattatcataaaccatttagattcttggatgcttgggcaagggaccctacttgtaaagaggtcattcgggaggcttggaatttggctgtctacggttaaaagctttcaactggtatctcggattgccaacactagaaaacggctcgccaagtggaatcaggattactttggtttctggaaggacaagttgaaagtgattgaaaaggctctcttggaagttcagcagagagttccctcggtcgaaaattcccagctggaagcggatattatcttggagattgaggaagtaactgctcgtcaaagcgaaatttggttccgaaaatcccaggagctgtggaatcgggatggcgatcgtaacactagattcttccacgcttccactatcgttagaaggaaacagaactttattggagcgatctcggaggagggggtgcattggatcaataactggcttgatattggtaactatttctcgaaaaacttcaagtctgtttattcctctagtaaacccgtgtttaatcaggaaatctttgaccttttacccactaccgtcacggatgctttgaatgatgatctaattagagtcccgtcgggtggggaaattcgcaaagtggtttggtcgatggccccgcttaaggccccggggccggatggaatgccgggccgattctatcgtgctcattggaatattgttggtcaggatgtgattgatacagtggtcgagttcttccgtacttgtgaatttgttaaaaccttgaaccgtaccttcattgttctaatcccaaagaagcaagatgcctggaagttcgatgattaccagcccatatcgttatgtaactttgcttataaggtgatagcgaagcttcttgctaatcgtctccgcatggtgctgcctttaatcatatctaccttccaatcggcttttctcccgggtagatggattgcggaaaacagaattatagcccatgagattcttgattcctttaagaaaaaacagggtaaaattggctttgtggggcttaaggttgacatgtccaaggcttatgatcgtcttgaatggagtttcgtcgatatagtctttaaggctttcagttttggcaatcggtttaggggtctcattatgaaatgtatctcctcggtttcgttctcagtgttattagatggaggcccgctcaagcaattctgtccttcccagggtttaagacaaggcgacccctctcgcctttcttgtttatcattgggagtgaagtcctttctcgactcttgctgcgtgaagaggctactggtcacctccatggtttcaaagtctgccctcgaagtccccccatctctcatctcatgtatgctgatgacacattccttttttgtgcggctaaagtggatgagatcaacgtggttcaagaatgccttaagaagtactgtgattggtctggtcagatgcttaacgcctccaaatccgctattgtttattctaagaatacttgtccagaggtcaaagccctgatcaataatattttggggttccggcctctttcggacaatgataaattccttggaaacccgatctctttttctaagagtataacccgtgactttatctttgtggttgacaaagtcaaatcacgtttagaagggtggagaagcaagctgttatcccaagctgggagaaccactctcatccaatcggtggttgctagtatcacggtgtacgcgatgtcaacattcctccttcctcagaggatatgtgatgagttggataaagtggtgagaaaattctggtgggttggaggttctaataaaacctgtttcttgaccctggccagttaggactctatctgcaagccgaaagagtatgggggccttggcatcaagaagttctcggatctgaatatggctttgatttcgaagctcgggtggacccttcttgcggggatgaaaggttgtggtgtcgtatttttcgtgccaaatattgtaagcatgatgaatccttttggagtgtcaatctccccgatgcggcttctaaggttgctcgtggtatccttgcctcgagagactttattcggggtgaatcgtgctggctggttgctaatggtagaaatacagatatttggcattcgccttggatcccttggcttagttggaatgattacatagctgccttcaatccaagagttcaatcgcctagagtcaacttgttatgcaacttcttcaatgagaggggggaacttatgaccgaggccattgctgagtggttcgcaccccgtgtggggaatcagattgggcgtgtggagctgctttctaatagtgacaaggatcggctaatctggcgggattcgatagatgggtccttctcgattagtcaagcctacctttctcgtatcaagcctcgccttgggataggttctaatgtttggaaagagatttggaaggcccctgtccatgaacgagtcaagttgtttttgtggaaggtctgtaaggatattctcccctgtggatcgtgtcttcgaacagtgtttggcaatgaatctcattgtgttctgtgcaatgatggtgaggattcccttccccacctcttcttcctctgtccgtttgctagagcctgctggtttagtagcccgtttggcattcgaagtgagcggctgctattcagtatcaccttggatatggttaattggatcctccatccttctccaagtgtctatcctggtacctcgggtgaaccctcattatcccaatttgctgcctacatatgcttctctctgtggaactctaggaaccatgtttaccacaacgtctcttcattgcgtccgcaagaggtcctttccaagtgctcgaagctggttaacaattttctgacttgaaagttgagactctcggtggagaatttggaggtttgtgatcctccttgtctccctcagcaggtgttgaaggagttcaatttctactccgatgctgcggtgcgtggtagctgggcgtttgtggctgttgttgttttcaacaaggacagagttttcgtggacgctctcactgccaaggtgcgtgctacttcagcgctccatgccgagtgtttagctctctgtcatgccttctccttgagcctgaagttggattgcaaggaagctaatttcttcacagattgcttacaattggttaatgctgttataaaattttctattcctgtgtggaacctctctaatcttttttttgcatttgtatgcttgtcttaaaacttcttctggtttaagtgtttcttggctgcctcgggatgccaatgttgtggctcataagcttacagcatgggctgctgtgaacgatatttctcgggcctgtactgaaagggaagtagcaccctttgttgctactggtttctagtttgttttaatgaagtcttcttatgcataaaaaaaaattatttaccaaaaaatagattacaaagatcattcataaaaaat

SEQ ID NO: 377802 - DNA, 2017 bp, Cannabis indica
tatactaccgaattatatcttaccaacattgacatgtactaaatcgtgctttactaaattttcattcacgttggacttcgttagtaaaattggaacaaagttacttaataccaacaatctcaatagtacatgatttggtacatatacaaagtttaagacggtaaaaatccaaattagtctaatttatatctatatatatatatatttatatatatatatatattaactgccccagacacatattttgaaacctaatgcttttctttacacaatttttgcagataaaattaaagaacatggtataccacactgcgcgtataaattgtcttgcttggtctccagacagtagcatggttgctaccggatcactcgacacatgtgtcatcatttatgaagtgaacaagccgccagcaagccgttcaaccataaaaggcgctcacttgggcggtgtttatggattagttttcaccgatgaccaccatgtcatgagctctggcgaggacgcctgtgttcgtgtttggaagctaactccacagtgatattctcaagaacaaacttagtcaaacgtgcttcgggggtttgttttcttttctctttcttttgttttttgtttcttggctagcatccttattaccaaactgaatgaatcgtaaatgtcgaagctgaaaatggatggttttccttttttattgtaaccgatcgtccatacgcggctccctttatgatgatttcggtaaagtgatacttctccttctccatgttgaatcatagaaaagctttttcttcataaggtgttgtctcttttttatttattatttttccaaacccatcttcttcaatgggtcttgtggtgagaatgtgagatagttttttatttattgtgtaatcttatgtattttttttttctatattaatgttataaattgtgtttttgagtatttagaacttggtagttttaaagctttttacctctggttttaagctctctgttgtacacaatgggtttttagggaaccttcaattaaataaatctaaatctttatttgtgtttttttttttttgttgaaagccgagttttacaaaattccaattattttgttctgcatgttttaaagaaaatatctctggattttcataattgaatatggaaataatttttgggttctttttggtataacgtgttttgttgtgttgtattttattgtatagtattatttaatataatattatgtttgatattgacttgtattattaagttgtttaaaattatactatttttaccataatcccacccttcgttgactttgaacctcgactcgaatctcgagctcgatttggaccttgaccttagactgaccctgaccctagctcggactccaaacttgacccagaccctgacttcgacttcgtaccctaatacctttgctaataataaattgatgataatagttaaaattattatttttatttttgaagtgactttatttaataaacataacacttaattatgatttgaacccataaataagaatggttatcacaaaaaatcaacaacttaatttagtcaaaatagtgtaatatgtttcttaaattgagcaaacaacatttgtaaacaataacctagagaaaatatatataataaagagttgtagattagtcgaatgagacatcataaaaattcaacagaagatctttttctatcttaaaattcgactgaagatctttttcatatagtacataatttttaatgtccattcaaaaacctattgaaccatttagcagactctttaggaatacgattgagattgttcttgtaatcaatgtagtacaacccaaatcttggaagaaagccttctccccattcaaaatcatcaaataatgaccaatagaagtatcctttcacattcactccatacctgtcaaattttaacaaaacaataaaaagaatatgaacacttagagcatgtttgttattgttttttgttttcaaaaaaaattgtttttagaaatgagaaca

SEQ ID NO: 377803 - DNA, 1777 bp, Cannabis indica
ttttttttttttttttattggttcaaatattcaaaggaaaaatataaataaattagagtaccagatcagaacgacgcatggatctagcattatgggctcgagcgtaggcgatgactaagacaaggccgatggctaggccaatgatcaaaccggtgaaaaacgacatcgtttagaagcaatggaaaattgtgaaattctgttatgttctgtgattgacaattgagtttggttaatctgaaaatagagttgagtcatttttgttttgtccaagtaataacatacacatatcgaatggaatattagaaaattgatgtaggaaggcttagttatgtgacaagtttaccaataccagaaagaataagcattttagcattaacattattaattaattaattaattattccgattttgcacataagaaaagaaagttatatattcttttctttcaaattattttttattatgatagactcatcaccaagtcacaaaacaactaagaaattgatgaggttaaccttccaatgaaaacttcttataacgcattttcattaatatcatttgacagtaaaaagaataccatccacaagctccatacatggtaacagatttaggtgttggttatgttagttaagttatttagaatcaatctcttgattctgttggttcggttagagtttagctaactctagttagcttagatcagttagtataaatgaagtgtctatggacactttctgtaatcaatttttttcatcatcaataaacctcttttatttttatttttctctttgattcatttggcttcttctctttgaatcaacaaatgtattcttttgatctataattatatgtaatatgtttatctataaaattgaatattgttattgcatattttatgcgtgataaagaaactaacatattattcttatattttgatatttcaatataattttcttaaaattcttttgggtattcaaaacccactatcaaattgtatcaataataatcacttcaataattctttaattgtattcacacaaatacaatattttttacaaatataaaatattatatctgcccaaatatgtatcgatattaaattaatttttattgtcttcaaagaatgtaagaatatatatatgaatatatactcatctttttattatatttcagttaattatttgacatatttatataatcttcaagatatatgtaagattacatcgagaatacataattttttaaatatatgcataatttatatatattttctctatcatatcatagatacaaaatctataaaatatattataaataaataataagaacacataatatatatatatgaatttaagaataaatagatgagaataagaatatatacacacatatataatactagttgaatgttacgtgccgaggcacatattgttagttttatttggggttttggtcttggttttttttgtagattttgtctatatttttttgtttaaggaatatatcttgtttgaaaaatataagagatattggcggctaaaccaccctaacttttaggtttgtaacagttaatcacaaaaactgaaattttggcggcataactctctgaactctggtttcgttttgctctgtacccctctgtccaaaaatcacaattaagtgccatggtagactgtctacgtgtacactcttgtacacgtggtaaatttttagtggtccatgtaattttaattttaaaaaatggttataaataatttaaaaattataaaaaataatt

SEQ ID NO: 377804 - DNA, 2149 bp, Cannabis indica
gtacgttttcggggtgctatttggttcaatgctttcctaacttcattctcagtagtcggctcaagaagttgagaattttgttcccaattaacagtagcagaaatactattcaacacctcatcaaacaccagcgtggaaggagtaaataatttatgaaaataagagctaacaacaacagcaagctcaccctcccaatccgtccaatgaccattagcatcacgcaatcgatgaatgaaatttcttctcctgtagctagaagctaccgcatgaaaatattttgaattctgattgccttctcgcagccaaagctgcttacttcgctgcttccaaaaagtttcacgttgcagcaaaatattttgtaaagataattctgcctctttatagttctttactgcctcagaatcccgaccatgtttccactttttcagctcctttttgcatctattaattctttcttgaaagttaccagagtaatctttgccccaattaactaaaattcactgcaatactttattttttccacaatgtgagaaccagaatagtgataccaagcattttccacaaccttaaagcacaaaggttcttttagtcatgcattctcaaacctaaataccttattccttcccacctcaaacgtgctggtaagacataattgtaacgggcaatggtcagaagtagtaacttctaagttgataagtttcatagcagggaacaaatcaacccagccttgattcacaagtgctctatcaatgtgcacttcaacccaatctgaggtacctctacttcgctcccaagtgaatggatagccacttaaatccacatccaacaacccacagtccactaaagtatcacaaaacctatcaattaaccaattcggataaagattacctccctttttatctgcttgagacgtaacattgttaagatcaccaataatgcaccaaggaagagatgacttctcctttaagcctcgaataagatcccatgtatgcttccgtaaactcctattaagttcaccatagagacccgtaagtctccaacttcgcccatcactctcagcaatagacgcatcgacataattaatactgtagccaagcaaacgatcctcttcttcatatcgccataacaacgcccaacccccccccatttttcccctgaacatccacagaaaatgcaccctcaaagcccacagccacccgtaacttctcaacaacagctttccttgacaaagtttcacataaaaaaccataattgggtttcttttggatcacaagatccttgatgaattgaaaagcccatgtgttcccaagcccatggcaattccatgatattatactcataatgattggtgggcctggaaaccaagacccacctttaatccattttttaacccacttgactcctcaacattttgctccatatcatcatctacaaactcacccacttcactaccattcaaaatatccatgcgtcttcttttattctccataatacatattaactcattatccaccattattggcttttctgaagcaattttcctcccagcatcatcaatagggttgacatattatcaccaatattttgcccattactgccttcaatatgcatccctgaaatcatgggattgatattgcctccagaaatcaatgggtcaacttccatgattttagaagtggtgactgtcgtaccgccaccggaattgctccgatgagtcgaactactccccataacgttttcctcctccctaccaaaacatagccattgcgccccaatcaaataattcttctttctcatttgcgctttcatccatatcccatatggtttagtaatttcctcaagtggctggtcaaatttctttggacaaaatcgctcagaaggtccaataataccgcagataaaacagaaagtgggaaggtgctcgtacttaaaattagtccaaatcgattctccattctccttacacaatttcatatgacgtttcaaaggcttctcgatatcaatcgttgagcgaacacggagatagtccctccatatgccattaaaattcttcggatccgtcttaacaaaagacccaataaacgcaccagcactacgaacaactttatattggacattattttaccataatcttagatctactcacaag

SEQ ID NO: 377805 - DNA, 987 bp, Cannabis indica
aattattttacaaaaaaaaaatagagtcttatgcaattattcctaaattctttcataagagaccataatgggattcgaaccattaatccaaataagaaaagatgtcaacaaaaacatccttacaactacactatacaagatgtggcatagttaccgatagaggaggcaattcgtgtttgtgagttgtattcaggtcgtgtcgaaacctatgtataacatgtatatgctcgacatgaagacaatctgcttattaaacgggttagacaagtaaatctgaatacgacctgaactcatttaaaaaaattcaaacttactaagtcccgtgcagatttcaagtcgtgttatcatgcttgatccgttttgacagttctagttatttaattattgttttggaatgttttaacttttcatacgggaatatttaagtgcaaaaaaagaaaaaagagtaaattcactttgtacaattctccatttttatcgtaccaacactttagaatcaatcgaaatgtaacaataattccaccaaaaagaagaaaaaaaagaaaatattcatctttgtatttttgtacaaaaatcacacaaaagaataagaatctaaaattagtgacaaaggaataaataaataaaataaaataaataatccgaattggccaggttgactctttttcgttgaccccacaacaacagccgttcaaccaatcgcattaaggcatggtacacaacacgtggcgtctttccattggttgaatcccggtaactttaaagatcaacctcgttcccaaacttttcctttctgagtcttcacacaaagtggacacgtcatcactttagtggatgtgcatatggataacgctgtgggacccacttgtaaaaaagcgccacgtgttctcatccatgctggaaagttcacgttcataaatgtacacgtcagatctaaacgggtaaagtaccaaaaaaaaaaaataaacaacgaagataaagagagaa

SEQ ID NO: 377806 - DNA, 2600 bp, Cannabis indica
tggtaaaagcactaattcctacacatattttgaattttgattagtttcaatatgatttctctaatttatttttctttctaattttttaatattgtctttttgccaatagtaaatagtaatgaaattttagtttagatgtaaatttgtcactttcacaaacgaattagtgttgtaatgataattttagttgataagtaaatttgatgtggctggacacttattgaagttgcccgagtgaaaactcatatgatttgttacccttgttcttttgttttaataagtatcattcatggtcttttgatattgatttttgaaatttaatatttgtagaattagagattctcattttgtgaaccaataactgtagagtccacaacgcacggtgggggtggttagtaatccatggtaataatgattcacttataaattataacttatgctctcatttttttcctttgttttcttgaccttttgcttttttttttcactgatatatagccatcatcaatgcctattgttgagttttgttgcaatttgagtcagccatctcttttaagctttagtactttattcaagagaatatgctgtgtcatatatctatgtgagttggtcttttctatataatatatggatgaacttttggagagagaaaattgacaacattaaaaattgtgagtattacaaagctacgagtattcacttagagtggcgaataattagaaataaaaataaaatgcaagtgaataaaaatagtaaaaatgtaaatgagacaagtgacttataggttcagtcagagcttgatccacttaatccactattgcaagagtttgtacttagtctttttcatactggatcactcctttatatagaaagcaagtatccgtttagattacatgatcgataaaaaatgaccgttattacatcaattatacaaattaataaaaaagatgtttaaaaaataaataaaagaatagtttcaaccgttctttattcattgtctcaacgaatgtgacttgataagttgcacactcgctatccatattctaacacgtgagctcgttggctggctctttggtgttatactcacatattgggcctttgggcctataataacttcaaaattattagatagttgaatgcatacgattaccctaggttgcgtatttgggcattcatgcgttaacaacatagaacttgagagttccttacgagttgtcgaacatattagtcttttagactagacgtgtgtaaagatgcggtctttacatgtcacaagagagatatacttgatcattgcacataatcgatatatgcgcaactagtactaacttctcttgatcctgcttctatctcaactatgttgggcatagtatgcaattagaccttgtatcggtcacatcttgtgcaagtttctatcatgtgaggttagctactggagctatgtattgacacgttatcctcttccatcaggaactgggtccacgtgttagctccttgcaagactgtactcgtatttctaggcaaaaaatttgcactataacatatgcccatagttttgcgatgatagttttctatcactcgacaaaactatctcgagagtcaggagaattgaattgtcacatcgtgctgatgcttgggtatcttattaagggatttgaaatgacggttataattatgatttttcttattatgccacatcattaaaaccctggggtttgcgtaggctcgaccttggttaactgtgcaatcatgcatcctttggtttacaattgccatgtgtcacgatcccaacgagtgacgacaacaattataaaaacccctgtaaaaaaatgagatttctattttcctctcattctcacctacacacttctcttaaacttcttgaaattccaaaaattttatcctatttttttttttcaaatcttcaaagtttgctcgaagacctttgctgttaaattgctcgagattacattaaagttcttctctagaaatcacagcttttaaataaaagtaggttctttaaacacttaagttattttttatatgaatgtttaaataatcgcatacattcttgtttataggggttgaaaaagataaaactgaatggctattttctgggcagtaaaaatttaggctaaaataaactaaaaaatgcaattttttgggaaattttgacctctttttgaataaccgcatcttcttcgtaagaactatgaataactgcatgtttcatgctagaacactttgaatgctctcgcaaatgtatatatgttttcactcagagcataaagaactgtatgaatagtcgcgattttatctagaataccttaagtatttttcttaacatatttaagaaataatttgcacgagtgaggatactcctttaatttgcacacacaatatgctaaaaagatcttctatttttaagatgagtgatcccttggacagccaagagtactagtctcaagggagagcattcgtggatgaaccccaaagaagcgaaagcttcatacttgcatcaatttcagacaacgcgtttctgttagaagttattttaccaagatttaaatttactaacatatatgttgattataatctat

SEQ ID NO: 377807 - DNA, 3536 bp, Cannabis indica
ctcgtcctatactagtgttggtagggttaatttgtacctcgagtacactaagcattataccacatacactcagtactcttcccatacttgtgttagtaacgttgaagtacgaccactataccacatgcactaagtactcgtcccatactagttttggtagggttagtccgtaccccgagtacaactgagcgttataccacatacactctgtattgttcccatgctagtgtttgtaacacttgtcataccccttaacattatactatacaaatgcactacgtacctcgaccgtaatagtgttggtagtatacattcatataattcatgtataacacatgcatacatttacatatcttacactaatcttaccttggttctgtaatcaagtatgtcggtcgacctgagtgaaaatattatttgctgaacaaaggccctatgtcacatttatgtaaaattggtaagtgttaacctaaacacttttgggtacttaaattcaaaactagaagtttccctatcgataaatattaaatagcatgacaataccctaaatatcaagaaaatcccaaaaatgagactttgaaataaattccccaaaaactggcaaactgcttttctgggttactgccagtaaaaatggtagaccgtttatgagaaattgatttggcattttttgctgcaaaattcccaaaaatctcatttctcacccaaaactaccttaaacttcgtaaaattctctatctcataaacgcagcaacaaagccctgtaaaaaaatatcgtcattgatgagttaagcttgagcttaaaaactcaaacttaactcatactaagatacagctagaaaaacctcattagaaacactctaaggagttctaattcaatttataaaacaaaaccaaaaccccacaagcttggacagagcctaactcacaaaattacatatccaaaccaaacttttcttccagaatcaaagagaaaaagtatctagaacttaccatagttcttgctacccaattttcttcccattccttgctgaatttccttgagaaataaatgaatctaggtctggttccttagttttccttatggccattagagagagagagagagtatgctaaaaaggttgtttcttttgtgtcaagtttatcaataaaatataatttcaatttaattgaattaaaatcagtataaagttttgggatttatctacaaaacccactcacataactaaaaacaacttaaagtgaaaggaccaaaatgccccttgcttcaccatgaagtaatctaatattctaggagtacaatggtccagatcaataaccccaataaattctgatatttccaatgtctaactctctttccctactaactctaatatatacaaccgtatctaagtgacttgaatggccaaaccctcgtatttcaaccgttacctagcaaaatcataaaatattaaaatgcatgtttatcatatataatacatctagaatttaataaaatctctgaaatagaaaaattataatccaaatgcttattccttgacaattggacccatatcacataatataattaattaatgctaattgtctactaattccaattctaggtatgcgatcattacaattatcctcccgtcaatagaattttgtcctcgaaatcaaatttgaataactctgaataatgagccctctaattgttaactcaaactttaggtctctttattttgatgataacaaatatttgattattatttattactaatgatttgttgattttgtagcgcaattaaagataaaatatttttttctatggcaaaattaactctaagggtaaaatgctaattttatcaaaatttctcgaaagtgacccaaagtggatttcaagactcaaggaactcaagacaagacttcataaaggtttatttacatttcctagtcttatatagtgagtttcaagtccatacttaaaaaagttaagtacaaatttttggcccactaacttgtgcgataatttttctcaccaaatgatgtaaaaaaattgaattgagtttttaaatcacatatcatttaactaagagaaaaaaattagaatttttgaaatcgggtaatcaagtaaaaagttatacaaattttaattcaaaaaaatgcaaaatttaccgctgtaagccatctgaaattttgattggaatctagaattctgattgtaattaatccagaattccgattcccatcaaaaattccaattcatggtagaatccccttgaaatgcgtgttgacggctataaacggctctatttcaccccaacactatataaactcgatttttactcaaaaatcagggttggctgagcatttatatcatacacctaacatattcaagtgagtttaatgagctcccaagtctaaaataaaaaaaaaaatacttttcacacactttgagccaaaatttgtgtttaattctttaacgtatgcttgctaatgactctaggtaatctattgtttcatcatacttctagagtgaatttgcttgtaatttcaaacatttctatattgtgattgaggtgagattggcactggtattgtaaacaacccagttagagtgagattgtcactacaacaatccaagaaagaggttgatagtccttagtggtgcaaaactattgtaagaggtttcaaaacacctcgttgaaaaaactcctggttataagggttagtcaagcccgttaacttggctcgatattggaacttaaagctaggtctatagctttgaagaccaatgatgtaggtggcttagctctactaaagcttgtaaaaatcgagagtttacaatatcttacccttaaactctctttactttacaattgattatttgctatacatcattgattgccatattacttacatttatttaatttggaaacgtatcttgggttaacaatttgtatcaaagcgagggctcatttatttgattagatatcacaatttagagcatggtgtttccaagtaattcacaaaataacaagttagaaggtttgagcacaaatagaggaccatacttcaatggagtaaattttccttattggacaattaaaatagaaacttaccttcaatctatggattatgatttgtggcatactgtgtctagtggaccttacattgctaaacatgttataaatggtgtagaagttgttaagacttatgaggcatatgatgtgaatgataagaatatactttttgaaaatcctaaagctaaatatgcacttatatgtgatttggagagataatttaaaatattgaacaagcctctacaacctttgatatgtgaaaaatgcttgagttactcattaaggaactagtgctatgaaagagactaaaattcaaatttatcccactcaatatgagaactttaatatgaaagtggatgaaaccattgctaacatgtatactcattttactacaattactaatggtttgaattctcctggaaaggtacttactcaaaaagatatggtgactaagattttgagaagtctcaccaa

SEQ ID NO: 377808 - DNA, 2554 bp, Cannabis indica
tttgctgatcgtttaataaaacgcaaactcacagcaggtaaagatgaaagtaaagactgacagtcttgtaagagtaatccaaagagagaacttattggttgattaccacggattccttgaactgagatcaagctgtcaaactcaatatcaacatattgtcattgcatctcttttatccaattgagagcctctttgattcttaaagcttccacagtcgaagcatcaaggttgccagcatgaaagccagttttttcttcaaggaggtgtcctgtgctgtcgcgagcaagaataccgtagccataagagttttcctgcggaaaaagagcagcatcgacgttcatcttcatgtgattattttcgggtttagtccattgctcagctccatctccaatatttgtaaagaatatggaagagagacaagtgttatactgagcttttctctattgatcaagagttgtttttgccgatgcgaggactgcattaaccgtagtttttttttatctttccaaactgtattatttcgcgcattccacaaagcccagcaaaccatggccatatagttcacttgatcttcttctaaagagcagagcatcttgttaagccaactaccgaaagatgactgcccttcgaaaacataatttgagccaagtttagtccgacaagagtgggcgaatgagcaagagataagagcatgaataatggtttctgcttctaacttacaaactggacatctcgaagaaatattcacatgtttaataacaaggttcagacaagttggaaggcagtcggttgaggcgcgccataaaaggtttttgacctttggaggtatctttagttgccataatttatgccaaaaccccgagttgttgtgtgttgtgtgagagtttttagcttgttggagtaaattgttagcactttttacagaaaagcaacctttggtatcattcgaccaagaccagaagtcattagaggcatgatgagacaaaggcaatcccaatatcaaattagcttccaaaggagaaaaaagatcatggataatatcaacatcccaggtattagcatccatagaaaagagagagcttacagtttgggagattaaacctagatgagtagatgttacaaaccggttctcattgttgggaagccaaggatgggataggatactagtagaagtcccattaccaatagtgcgaatggctcccaatttcaccactttttgagctccccagatgctacgccaaacaaagctcagattattaccaagctcagccgaaaaaaagtctgaatgtgggaaatatttagctttaaagccctccccaaaagagtatcagggttgcaaagcaggcgccaatctgtttagcaagcatagctaggttaaagtcatgaagatggagaaaacccatgccactatcatctttagaggccgccatacaattccaagacatctaaataattccatttcctttacaagaggaagtcttccaccagaagctagccattaatttctcaatatctttgcaaatgccgataggaataagaaagacactcatagcatatgtaggcaacgactgaaccacagtctttaggagaatttctttaccaactcttgaaaggaatttgccttcccaactgtttatccaagccattaccttatttttgagaaagccgaagatggttgatttattcctaccaatgatattaggcaaacctaaataaaggctgccatcattcgcttcaggcatctgaagaattgagcaaatatgagaccggttttggatgtcaatgttggggctgaaaaaaaccgatgacttagtaacattaagttgttgtcttgatgcttgttcaaaggcgtggagaagggacatgacaccttcagcaaccgcaactgtagcttggcagaagagataactatcgtcagcaaagagcatgtgactgattggaggggctccacgagcaacacgctagccatgaatgatacgattgttttcatattgctgaatgagagatgaaagcccttccgcacagattataaattaggaggtttgaaagaggatcgccttgtcgtatgcctcttgttggggtgataggaccgatggagtgtccatcatgcattacattatacttaaccgtggatacacaatgcataaccatatcaacccagtgtgagtgaaatcccattcggatcatgacttctcgaagatagtcccattccactcgatcataggctttgcttatgtctagtttgatagccatataacccttacgcccttttgttttcctcttaagatagtccattacttcaaacgccaccatgacattatcggatatgagtctaccaggactgaaagcgctctgagttgtgaaaattatcttgtcaattatgcttctcattctgttggcaaggacttttgagactactttatagaggacgttgcagagagcaatggggtgaaggtcgctcattactgtaaaattcttcttcttcggaatcaaaaccaagttggtgagatttaaatctagtagctgttggaaaaattctcattacaagagagaa

SEQ ID NO: 377809 - DNA, 4007 bp, Cannabis indica
tgtcctcctgcaaaacttaaaaaatgactctacaaaagcacaaaccaaaatcgttttgaatgatctcacctcttatggcgggaacatgaagaaggtttctaattacacaacgattcttgacgtagttttctactctgggtcctcgaaacaactcgtcctccacgaacctctgaagaagcacttgaaagagctgaaactcagaggccacaagattaaacggacgacacccctgaacgtcgtcgtattgcagcaactcttggactttcctttgctgccaatggaggatttcccatgatagacaaacctgtgccacatacaccaattcgaagtctttatctaatgctccaccgtgttttagtattggttcagcggctacggctgttgatctttgtgctttaccaggtaaaaagctctttactattggattaacccaattcttgggttttaatctcactccttggtctttcagctgcaaaaaacctgatgtccacacccaaaaatgaattaataaataaaatatgttgatgacccgtttttgtttattagttttatacaaactataattctatacaactaagttttttttttttttttgggggttggggccaaagtaatcttcaaaagaaggtgttcgtgcaactgaagattaatctaaaaattaaaataatgattaaatcaattgctgtaacaaacaaacttaccgagtgcatgcatggtttggatattcaatatgtccaattttctcatcttctcagaataaattttatagacagtttggatttcttccattcgatctttgtagccaaactgggaatcgatcttcagaggcttcaaatggatactttcttcatgcttcggagattctgaatctgactcttcttctaaaattgtgggtagtcctccggttctggcatttttaatctcccatttaagctgttctattacgtcttcatgttcccaaacaaactccgactcatcttcctcttgaagcttcattttctcagaggtaggtaaatgatttgtctcaatgtaggttgttgtactctgctgttggtggagttctaattctatgtatttgtcctcagaatcattatggtgttcacctgaaacagccaattcttctccattttgtacaaaaaattcagaaattctctcctcctcttcaatgaccggaggaggaggaaaaggataaggggtttcagtttcagggctcaatatttcattaacttcttctctgtcactttctcgagaaaatttataggtgatgaaatcaacatcttgattttttctcaaagacccatcatcacatgaaatattaggtactgtatcctcatcagaagttgaagtgaacttttcagagaatgattccacgtcatttgaaaatgaaaagctattttcataaaaactggacgtatcggtactttcggtagaaagctctgtttctggtaaattcccctgttctgggtcatggaagaggtcttcgtccatactcgaaatttccgaaactgcgctctcttccaaatcagaagcctcatcatcttgtcgtttttccaaaacctcctcctcacaaaacgtacctatgacgtcgtttaattcttccaaataaccatcttctgctccggaaaagttttccggtaaatctgggccagaggagacttgggtttcaaggatttgattttcaggaataggaaattcgttcgagtccatatataataattcttcgacagtgaagctcatgggttttagctcttctaaaaaaccattcaaatctttcccggaaaaaaactcgtacttgtttgtgcttgcagctgaggctgtatcatccaccataccattcgaagaatcggcactttgtttttcgttttcgtcattattaacacaacgaaagtgaccatttctttctctgaattcatcaatatcagtactcttacttcgctgatgatcaattattaatctgaaaatgaaataacagcagttaattctaactatatatacttataaacaaaacaaataataaataataaaatcaagatgcccaaatcagagaatggatcgttacctaaatataacactacaagtaaatccaagagcgtataatatatatccccaaacgaaagcccatatagaacaagtaatcttaaccatgctttcatacacaacccggtttaaaatactcttgtgtaaaaaatcaacgtgggttttcagcacaagaaagtttctggtacccatcagttcaatcaaccactaaggcctttgttaattttatttttaacctcaatcctaagcaaagttaggagggaggaaagaccttagaaatttctcaacaaaaattcattgggaaagtgaaattcaccaaagtggacactccacttgtagattgctaatcttggtttgaaaatttcagagatagagatagctgagatagttctaaatctgcgagaatgagggagatgatttagcagagaatatgggctctaatagaatgaatggaagaaagctacgtgtgaatttagaaatagatgaaaatgaaaatacccaactttttttgttttactttttgggaattttcttaaaatagtgggaggactgaagagggcttccgtttgaatttggtgacgaatattctattctactggttgattaatatttatttactacacaccagacacgttttgcgtttctgaatttgatgtaataaaagagtcaaaatatgttagaaagattgagggtgacgactacaaggagggcaaaagtagagcatttttcttttcctcattttatttttcaatagtgggactttatccgtggtgtttggatcgagtcaattattaagtcctatttttgtcattttgagaagaatccatttacgttggcagaggaaaccgacagtggtttttattttcatttcattgaatttgtcattatgatttaagtttctttatctacccattgaactaagttgcaatttttattttgaccttattgggattttttcctattagactctagagttggtaagcaagaagaacaaaactggttttgatgatggaaaagggagaattgctcgtaagcgtgcaagcaagtattaaatccacaaagacaaaagcaaaataaaataataataataataataataaggtaagctaagaagggcttaccaacagaccatgagaatctgatagcataccaacattacacagattaagtatagaatagtgagtagtaaggcatgggaatgccttcaacaacagcatcagcatggtccattagtatgtacattgcaccacctatgaatcatgatgattttggtgtatgaatatcatcaatataaatattctaaatatggtctaccttatttagttaataatttgattaactaaattctctaaattatatttcttcattaatttaaaaaatatttaaataattaattgtatcaaaatttttgatagaatgtctcacatatacaagtagagatttttgatcctaaactcattactcatttagattctatcaatcaccataataaagagctagcgagaacttgaaaaatttataacccactaattatttctctcttattttttaatctaaaaatttacacattgctggacacttacattcattaaatgatagaaaaacacaatctcaactctttttatatatgttcaatcattattttaatttcgcgtacatataagattctcacatatacttttagattgatattgatctcataattggtatgagagctatatttttctctttcttaatttatgtatgtgatcaatttgagttatatatatatatttatctagctatggacttaaatctttgttttttctgagtttgtattttttaattatattttgataataaagaatattagaaaataggtagatataatattattactcaattatagagattttataaaattatacgtgtcgtatgtatatgatgtatatttattattgttgaccgaggttttcggcaactattaaaat

SEQ ID NO: 377810 - DNA, 4495 bp, Cannabis indica
aaaatagtgtccacatcatcaagctaactgtttgggtaaataataataataatttatttatttatttatttatttaatttgatatgatttaggatttgaatgagaattaatttcagccactcattatcattcattctattattttaattaaataaatgattaacctaaatactattgtttgcctatgtaaagaaagagaaggaggtagaaaactctaatgtctcatcttcttcttcttctctttcttttagtaattttcgaaaaaaagcttctactattagattttgaaaatttcatctgtcctcctcattgattttagccagttacatattctaagtaagttgagcatcatcccacactattcaaggtgatactcaggcttttgtggaagatcgtgtagaatgttaaatgttacttaataaaggaaaagaatatttgggttcaatacttagtgatactctactatagaaataattcgagtgttagaatactgaatagaaagatctatttatctcgttgcattcccaatgcaacaaaatcataaattatttatgtgtttaatttaattattttagaaacatgttttaggttgttaatacaataatatttataggacatattaattttttaaactatcaactgttgcaaattagtattattgtattaaaatggaaactttgttataacaatatgatgtttaggaaaataaacccttttagaaaaaattagaaaatttaaatattaattataattatataatattagctttttatgttatatcagagcaaactatcagtccgtgccggcagtctcctgaagaagttgataggcactgaaggtagcttgctccgaaacctaggatgacgcaagtagtagagccctgcaaccaaagccacaaccctaaagggggtcgcatagagaactaatgcaacacaaaggcagaaaactacgaaaaggctagttgctcgaggatctctccaactaagcaaagactgaactctctccccttgcgttgctatgtccccaaccacagtctgaatcctccctgcaacactcctcaacctatcatacctcattcgaacggcatcgttcgattttgatgatggaaatgtgtcaaactcttcatcaagctcatctgggtggactgcctcggcccacgataactttgtgtccatgttaggagggtgccttggcctaagcctatagttccaaagcccaatcaaaaacatgtaaaggaacatggtaggaagtattagctcagggtagcaaattagtatgaggaaaaggatatggacaagcactgttgtgattggattcttccacgtgcaaacatctccaagccaccagctcatcgatatcacacctgagataagagccatgatacgaaagaagttggccttgcttctccgcatgctccaaacatgcgaatccacatctaacatgtactccaccacctcttttcttagcggtggctcagctcgtcctaatctcactgccacaatgttcattgcttggtatctcaagttatccacttggttaacagttaaaggatgcaagtaatgcattttaggtagtaaaggatgtccatacacatagatcatgttcgccaaagatagtgtcgtaaaacgtaccgctagttggagctctcccatcttcttcaccccgtgggggtgaagaactaaaagtgggtatgaatgtgtgtaaattcgatgagcttcaagtgtagaaagtcgaatccgaacctttccaattcgagaatcgcgagctccagtgccaccaccattcaacttctcacttccaccaagatggcagttgtcaaagactcctagagttataactgtacaaggatcataaacctcccacgtatactgctcattccatttgggattgaaagtgtcaataattgttcttgttcgaacccatttatggccatacttagctacacaataagcatctgtactccctctactatccttcatcttcatgggaagaagtccttgagcacctaagatcccaacttcaagaattccaatcggttgtttccaaagttgcctcgccgtaggcctttggtcacttatatacatagttgattcatcgagcacatggtaccccccttcaagacaaactcttaaatggattctacttgaaaatttgagctctctcctcgttctgtcgggctccaaaacaccaaagccatagttctcaagattgaaccagcgagaatgaactgacctgtggtcaagacgtcggtcgaacatgtcaagaggtaaggttatcctccccaacaagtcatcttttgaagggtgaactcgatcctcgacagtaataactaactgatcctcaaaaggctcagctgccacaaacattaaatcttcattccaaagggggttagcagttcgagttgggcaagtattggttctaagaacttggcttcccacctgcgctttgacgaaaacttcaggtaatcgacttcgatcgtttggcataacgtcttgagcttcgatcacattaactctaaggtaccaaagttttggagagacataaacttttgatctaatgttgaagactccatctccatgagctgaagcgccgtcagaatgccaagcatcggaaaatgcctcatcagcttgagtacccatccaaacggccaccatgatttcacctcttactttaccttcaccacggcgatggtcgagcctgtaccactgcggagccagaggactgtctggtggaactctagttgggatctcattcaagtcgaaaacgactcttcctaggtaatcgtctctcccgatcatctctttgtctttgacaaaaacttcaagagttgaagattgaattcgctctttcgagaaggcaaagacctggttccattctggattaagcttcttctcgaaatgcttggtccttcctttgtagtttccaagcttcacttccacataaggatcacaactcgcagtgatgccactcggaggaagatctttggccttaaccactcgaacatagagatagaacatctgctcaacaagatcataagtgcttgagtatctctcactattcatccatcccattcctccatgaccagcgcgaccaccaacaccactaacgctcggccatcgttcacccaagtctgggttagtgtccttgaggctgaaatcatcattgacatttgcaggaggaataggatgactatgagactgctgatgatgatgatcaggcgcaacctggggaatattactactttggtggtgcattgtcaatggcacacctcgttgccgtctctcaattgacatggtagtaagttgaatccgcgctcagtgttcctattttcccaaaataaagcaagaatactcaatggaaaaattgttggagcaaggacatttgcggtaggactattatttggtgatcttctctcgtcgtgaacagactcttcaataatgagtttgttatataaatatataggagttactttctaatttggtatggtaaaaaaaaaaaaaaaaaaaaacctggtttggtgttgttgtggttgtgattatctgattctcaaaatggatttctagaaaaggaagtgaagaaggttgttgttggtagctgggcataataataaggtcatgagcatctaccagttacactatcagcttcatgctctgccttttgttgttgtatacttagtagcagttcgcaagaatactctgggaagctcgaatccgaagcaaagaagttgtcttttggaagaaacaggtaataaggttctctgagtaagctcttggtttttgtttaagcaaagaagctttgttggagaagctgtgcgtataagagaaacttaaagttggccattcaagaaaaaaaaaaaaacagaggaagtcgaaaagttttaactacttcattttcctatgtttggtttggttattgtaaatgaggaattaaataataatatatcaattgggcttctataatcatctttagatgttttcaccaacaataattaactttataagtaaacgagaaaataatggtcacgtctgagcaaattgctctcatttctttgttattcttcctagtaaaaaaaaaactgtagaatgagaaatagtttaaataaattcaattaaatatttgatttagctttaaaaaaaattaaatatttgatttggctttcaagaaacatactttccttgagtagggagtaattgcctgtgataaagaaaaagtaaagcaagtacttgggatttaaaggctaagagcaccaagtacttgggatttaaaggctaagagcaccaaatgagataataattatagttgccaatagtatatatatcatttataatgttatatttttatttttcttcttatattcatacatatcatcaatatcaataacaatatcaatatcaatatcaatatatatatatataaaggaaagcattaaggagttgaggtggcaatttgtttgagtttttcaccctcttctttgatttctcaatttctcaatttt

SEQ ID NO: 377811 - DNA, 7528 bp, Cannabis indica
ttatttacactcacatgatgaaacttcattttttcaaatcatgcaagatttctataattgattattgtaccatgcttccttagatatttcaaaaggaatgaactttgttcaagaatcaatccaatactctgctgtagttaagaaaactacaattaatgaacagaaaacaactaccaaaattgaaactaattttaaggatatatgatgactatgtctattttctttttttgctaattgtcttttctattttatcatgggaatacatatatacagaggtatttgattattaagttgctcaaatacttgagtaccattttcacttatgcctgtgagtgcctagagtctaatgcactggtaagaaaaaccataatgagcaatgactcaatacaacccacctaacataatatgcctctagtcttttgaattttaattgatgtccactaaggttgaataaatggatgaaagagcaagtacagtgatacatacaatacgtgtgagagagagagagagacccaccttcaagcagtttcattaattatatatccagtggatagtaacaatagagaaaaccatacaacagttataagccactgaactatttaggctaggaaattagaagcccatgtattgtgttctatatgaatattgtgatactatatagtatgtttttgcaatcaaaattatatatgaaaggggaaaataatgaaaagaaggaagaatatttaatgttaatacttaagtacctttaaaatatgttgcttctgatgttgtaacttgtgatagatggagatttagagtagatttactgagtaaaaaccgaatgctgcagcagcatgtggtgaagttatctgccgtcattggtcattaattgggaaaaaacttggcttgaattaatttctaaactactactgccgtcagcttcttcttcttcttctactcttcttgcattgctaggagttgtagtagttgacaactgctgcgaatcgacattgccaacttcttcctgttgagtctgtggttcagattcctgaagctggagtgcatattccaagttccataacacatctcccattgttggcctatcaacaccatattcagccaaacatttctctgctgtttctccatactttttcaacgagcttggtttgatctgtccaacaagatggcgatcgattattttctcgagcatgcctttcctttgccattgaagtgcccattcagctaagttcacctgttctctaggaagcaatggatcaacggctggcctagcacaaagaacttcaaagagcacaactccaaatgaataaacatctgacttatctgttagttgctgcctgcgaaagtactcaggatcaagatagccgaaactacctttcacaccagtgcttacatgagtttcactgagacatggaccagatcttgaaagaccgaaatctgccactttggccacataattctcatcaagcaaaatgtttgttgatttaatatctcggtggataattccttgtgctgaaccagtatgaaggtagtgaagacctcttgctgaaccaatgcagatctcaagccgtttcttccaagacaatggtgtggaccttggactatacaaatgatttctcaaggttcccttttccatatattcataaattaatatcatttccgattgttcatcacaatacccaacaagtgaaacaagatgaaggtggcgtatttttgacaaaattgttatctcagtctggaactcaggaaggccctgcctagatcctggctgacctctctttacagcaacctttgtgttgtccctcaaaacacctttgtacacaataccaaatccaccagaacctacaatcctattcttgtcaaagttgtttgttgctgataggatctcagtgaaagggattctcaagccaagatatccgtttggtcctggtgatgcaagggtggttccttcagacagtctactgagtgaactgcctccaaatatgcgtaaaggcgtccacccaacactctctgcaggtcttggtcttggttttggcctcctcttccttcgtctgaaaggaagaatgattccaagtataaccaaacacagcagaacaactcctccaacaattgaacccaccaaaatccaaactgttttcttacttacccctccatttgactgcgaagggacggcatgaagcatcttcattatctctgccccattcaaaatggcattagcccttgatggagaactaagatcagaagggccaatactaacttgcataaatcctgaatcatcagaatcaacaacaaaatccatatacactggagaagcaagtaagtgaatagttaaagttgagagatcaagatccctgtaagcagagtacccattgatgtacacactgaagtagagtgagttaagactaggactaacaatgtcacagaaatgcaaacgaaccaagtgtggaactccaccagaacctactgggaatttccaagtaacattaaatctagagccaacatttaagttagtcctattcatttgctgggcagtcatatagacattatctggagcaatctctctacttgcaccccctttctgataatttggagtgtgagtggtgacagcaggcttggcagcagatgctagaacaagatattcttcatcaggtaaccaagttctccacaaagtatcattaaaaggggttaacattgaacctccaacattaattctctgaatagtttcaaaaacctgagaagagagattcttgtactctacatctccatcagctttaacatacttaactccatcatcaacaataaagtcatcaggggcagaaaaaacttcaatagcattcacataagcgaaacccgacttacccaagggggtgaatacaatttcaagtgcagctttgtctattttcattataaactccttaatcaaagtatctctaacatgggaatttttcaaaaccgaaatcccatttacagaaattgtaaaatttgcagatggtaatggaaaactaggagcaacaaaaggtgaaaagtgaaaacgtactatgtgagtgccattcttcttgatgttgaagttatacccagaagcagcggtgaaaactctagccgtgctgtaaacaggagacaagtttggagatgggttctggttcttgaacgagatagaccggtctgtagagagaaaatccgaacccaaattggatgaatcaccaatgaagacccggttaaagagcgtaacattggaaggtgaaccacagttgagaaggtaattgtctagtggagtgaaagaggctgatactggaagaaggaggagaaaggaaagagaaagaaagagaaagtgtagcttcattcttgtctccattgaagatcaaggaggagctcaacaaaagaaaagttcaaagctttttaagaaaacaaaagaaaagaaaagaagacccttttggggtttgactatgggagactcaattgtagtacactactagtctagtagtggagacagagacataagtatatttcttagagtgttcagataagattaacaatgatacaaagtcgcattttttctactattttgaaggaatactttttccacacttagcctgactggaacccattaagacaaagaatatatatttatcatatatggttactactcactggcatttttatcaaatatgtacataaaagtcttccagcattaatatgtttccatcacaatcgccaatcacgtagcaagaaaataaaaatctattgatatggtaattatgtaattttcttataaagatataagtgcttttctttttttttttttaaaaaaaaataaataaaaataaaccagtaacttttattaaagattaaaattattcaaaataacatagcgcacttcagagaaaatattcttcaactgaagcacatgacctgtagagaaacaagaactccttaccaaataatgagccaacttgtttgtagatcgttttacaaaatacaattcaatataattgtaagataaaagaagagtacgaacatcttatactaaaagaccaaattgagataagatgaatatattactttgaatagcttggacacagaccaaactattcgtttccaataataccggaccccatgagtgatgagcaatccagcttaaagcctcctcaatgcttatatttctgcaattttgagttgaaccagtcccaacttgcccatagtgtaggcttcaaccatccttccacgacaatcgtgagccacacaaccaaacctaaaacgacccttcttctctaacaaagctctatcaacattaatcttgatctggtttagagaaggtgcagtctaacgctcagtaactcgactgccatcaagaagacgagacaaagaaaaaccttttctctcttgagcaaaactaaattgatcaagtagaatttttgttgaagcaacaatatttgcagtagaccagctctttttttgccaaacaaactcatttcgtgcacgccatattgcccaacttatcactgccgcttcttccaactcacgagttctgcccctgctcatcaaaactagcaaccaactatagaaattttcatccacaccattaccatatccaccatcaatcagctccagctagcccgagcaaatgagcagcctaccaaagcatgatagatggttttgtcacatgaaagacacaaagggcaggttgaacttacaggcacatgcctttttttttttttaattgaacacaagtaggcaatgatcctgaagcggtcctccaaagaaaattactgatcttcggtggaattttaaggttccgaaggtcctgccaaaacccaatagcattatccatcgaccaagctcttttaacctcctgcaagtgcttatacgcactcttaattgtgtattgtcctagcttgtcgaatttccaacaccaaaaatcagttgtggctgagtcacttagttggatagaaaaaattaattcttggtctcttttataaaaagatccttaatgatttcctcatcctaagcttgagcttctaaactaaacaggttgttgatagtcttattctctaatgcatgatgcattgaagtaacaaaactactagtgttatgtgggagccatggatctcctagaatagacacatgttcattcgtaccaatggaccgaaaagcacctgctaggattagttttttttgcttcaaaaatacttctccaaatgaagcttgggttatcccccagttcaacaaaaagaaaagacccgtgagcataatatttagctttaaaaacttgatccactagtgagagttcattcactaaaagcctccagccttgtttccctaaatgagccatattaaaatctctcaaacttctaaatctcaatcctcaaacatgcttatgacgacacatatgatcccaactcatccagctaataccagtcttctaagaggagtccgtattccaccaaaatttagccatgagtcattcaaactccttacaagtatcagaaaaaaaattcattgcataattagggagcgcttgtgaaactgattttagcaaaacttccttgcctacacgagacagcatacgaccttcccaaccttgtattcttttccttagtctgtctttaagaaaaccaagtatatcattcttattcttactaattgaataaggtaatcccaagtaataaccattgtcatcagcctcataaatttctaatagatcacaaacaacatccctcataacaattctagtattattgttataaaatacagaagacttagaaaagttaattttttgtctagaagctacctcataagtatacaataattctttgacattatgagcttcttcctctatagctttacaataaatgtaactatcatctacaaataacatatgtgagataattggggctcctcttgcaatcttacagccagtaatcaaaccacttgttcataactacgtaacaagctcgagaagcccgtaagcctctttgagcaacaataggacccaactccttacctccatgagtaattgtgtaagaaacagagcacatattggattatcatatttatccatctaccatcaaatcccattctatcaagcatggctcaaagatagaccaattcaaacctatcataagctttactcatgtcaagcttaagagccataaacccatcacgaccccttctttttcgcttcaaataatgcataatctcataagagatcattatattgtcagaaattagacgtccttgtaagaatgcactttgcgtatcagatatgacgggaggcataacaatcttaagcctattagtaatgactttggaaacaatcttgtataatacattacaaagggcaatgggtcttaaatcacccatattcataggctacttctttttaggaattaaaactagattagtgttattcatactagtagggatatgtcataaattgaagaaattgtgtaccatttgggtgacatctcgactaacaactagctaacacttttgaaagaagccaagggtcataccatcgagacctggggacttatccgggtgcatttgaaacagcactttttgaacctcttcatccaaaaatggttgtagcagctctgtgttttactcaagtccctatcgagtcatcaaatacgctttgtcatctggacaagttcattatgtaaagaaacaatctttactaaatcgcaagaaaaggctacctagtcattgcatatttattggtatatgttcgacttgtataaacccatcttggtcctacttattttattctatgcatggcatagtatgcgactagacactgtcaaggttgcatcatctcgcgagtttgggtcaagcggggtcaactctcgaggagtcattacttaacaactcatccatctcttggggattggatccacgtgtcaatttcataggagacttatctcaagtttttaggtgaaaatttttcactataacacatgcccctagttttgcaactgacggctgagtaattaaggaaactattagagagaggcaggcgagttgttgtcacaagatggtgacttctggttgtcttgtcaagcgtttcaaaaatacagctataattattactttatttctccaaggtgccacgccatcaaaaccctccggggtatgtgtaggcgtgttctctgaagactgttggattgggagacctattgggtcttgtgccctaaatacagcccattttaatataattagatttattaattaataaagatcagaaattattctatgttgcatggttcacatgatttatttcatgattatatatttaatgtacaaattctattaagtccaaaacaaatatatatttgtttatgattatagtatcgtcaacataggggaatataatcatgattatatgttcaaaagtttaattgtcatgatttgtcagttcactggatttagactgacatgataattggcgataagatatacttacaccttggataagtgttatgtcctttccagggcattggcaaagtttatcagtatcggatgtatggagtat

SEQ ID NO: 377812 - DNA, 3214 bp, Cannabis indica
accggttgtcaatttaataaatatgaatacccctattgaagcctagctaactctatatataaattaagaacaaccattagattaatgactagactcaatctaacggctacaatccaatcactaattgtatatccaaaagtacaataatgggacaaaatcctatccctatctttatagggaaatttgaattttcatgcttaataaactcataaattggttttttaaactaatactatgtataatttgtaaaatgcgataatttttcctaaaccccaaaaacccctcccatttttcccaaccgtctctctctcttcctctttttccaaaaaaattgactgaccatcgggcccatcgggccccatcgggccctatatcgggcctttgtcttcaacccagattcaattttttcatcatgatgcatcgggcctgcatcgggcctgcatcggacctgcatcgggcctgcccagaaaatgcaattttcaacccaaaaatcacagattcaccaccgccttcaacccagatccatcggactgggtttgcctttgatctccggtggtgttcgaccggcatgcgtgcgtggtggatcgccgatggtggttcggttgagatgggtatggatgggcgtgggttggctttcggcgtgggtggttggacgaggaggagatggttggggcggtcggtcggtaagtcagacggggttgcgtggagggttggggcggtgggtgggtgggtgggtgatgatggttgagggttaggggcggtttcctgcgatggggttttgggcgaagaggcaaagaggcaaagagagtttgagggaaggagagagaaagggtttgagtttttgagaggggtatttttggggttttggaaaagtgatcatatattttcaatgtagaaaagtattagtttaggaaaaaaattatcccctaatgcatgcatagaaattcaaatttccctttatatatgagaaaatcacttctaactgcataattaagattaaatacacacattggcagggtcatttagtaacttattaggtgttgtagtagatagatattaaatatttacaaatatatatagaatattttttaattaatattattataattattaaaaaaaatttaactataaatattaattttaaaaaatattaaagtattagattttgatctaaattgacgaaataataaaaaaagaaatttaaaatttgtaaaaatgaggaatttttttaaaaaataattcttaattatttttttaatttttttctttcacattatattatattaaattcaatacatattttaattttattttataattttttaaataaaattttacataatttttatttaaatttttttgttataatattataaaaatataatttatttttgtttaataggtatattttttaagaatataaattagaaggaacaaattaaaatatatataattaagaatatatatattttatgtaaaataaaattattaatgcttttttttagtgtatacacatgataacttccaaaaaatattttatttttatatatgtcttataagatgaaaagaaaacaatgagggtggttttcatatgaataaaggtgacgctgagagtatttagccatgtaccaaaacgacatagttttcagttttgatataattaagccaatttgccatcaagatgatgatattgatattgatattgatattgatatatcacgttatgcgtaatatgaatatatatatatatatataattatcaaacacatgagagaggggtcactttttacgttattttattttggctgtattacgtggttggttttggccataatgtttggcatggtcgacggtaaggggagaatatgagaaaagactttaatacctctgtttgggacacaatacgtatattattttaattaatcctcagaactacgcgttttatttaatgttctttttttcttatctatttattatttattattaattttttaattaattaataaccaaaaaaaccaaaaatacaattgcatggaggtttcaacattaacagtacagctagctatatagaagtagataaaataaagtgatatacagagacgtgaaatgggttaacacgtgtgctgtaacgaatcttaattacgtaattgtttgaaaaagtccaattaaaatgatttcattttcagagatattggtacgtgtgatattcttaggttatttttatcatgattcatgtccacaacaccaatatttttctttattatttgagaaaaaaaagaagaaaatactatatacattacaacttatatatcttgatatataattaaaatgatatgagtagttttgtaatatcatattttatgtaaagttattatgtttaaaactaagttttactaaaaagttaacaatattttaatcattatacataattattggaagtgaattttgaagatatataattaaaatgatatgagtagttttgtaatatcatattttatgtaaagttattatgtttaaaactaagttttactaaaaaagttaacaatattttaatcattatacataattattggaagtgaattttgaataaataattaattaatcaaatagaattatatcaagaaacaatttgactaataattatattattttttgttgtgtcgaatttgacattataatttgtccaaaaaaaattgacattataaattgataatcccaaggtctctctagcttgctaaagtcttgttccattatttttaaattccgaatacaactcatgacccttcattcatatatagttacttttttttatattatacaaattatatttaattatgtaattaatattagtttttaatcagtaagaactctcggattgttagtgatagaatattattatggtctgtgaataatgttttaacaaaatcattacaactcgtttagtgtttgcttgttttgattcaagaacaacattatatatatatatatatgactatttaatggttacatttttattataatcatatggttacatttttctttgacctgtaaaagcaggttattattaataggtagacattcttttttccagaattaattaattattttttaaaaataattaattaaatatttaacaagacatcttttagcaattaatatttatatttaaatccttactctaattattttaataattaagccatttaattataat

SEQ ID NO: 377813 - DNA, 3873 bp, Cannabis indica
tttatacctctaccacaatttatgggcctttatctattgggccagtccagtactcattttagcccataaagtttctgccttttctgagttcttagttttgaggagaagaaaaaaaaaggtcttaaagacattttaagattgttaatgattatcatttatcaacatcatcaaaactcctcccaagtcccaaaacccaaccagaccagttccaacttcacaggcctcagcctcctccctcagctctctgatttcttaaaatctccgacaaagctcaaaaaaccgtaggaaggaaacattctcggatcggcttagctttttgtcttccactctcttccaccaacaactcccacatatcaaaatttgatttttatttcaaaggtaaagacttttctccatttcttgacaacccaaagattctttcttattagtaaaaattcatatctttgctttagtttttgttgaaccctttttttaatatgacttaatacataaatatatgtatcaagaaattcactttatgcatcaaattttctgtcttttttattattagggcttttaatttaagccaaatgagagattatgcaaaattttagtcaatggtaatttgtaattatcaacattttgtagagtgttttgtaaaaatagcttaaaatttttattagcaaaataatcttgtagggtcccctaaatggccataaatttatactagtaaattaagtgagattattttgtaaattttagtatttcatattgtttatttggcaaatttctccattttgtatttgcaactttggtaagtaaagaaagaaataatttcattggtttgttttcttggaaagattcttagaaattttgtgtttggttttgttgtgtagtataaggtttccatcgttatgggctcaattagacaaaagcttatactttatttgtgggaagagattcattacaatgtttatggagcatatgaaaaggtgcagattgatttctagttcagttgaaaatcaagtgcttggtggatgcaaagttgatttgaatattcccacaatgtcatcatcaatggataatactaatgtcataataccaaaccccattgttgagcctcatgatggtatcgaattcgaatctcatgaggatgcatatacattttacaaggagtatgctaagtctgttggattcggtacagctaagttgagcagccgtcgatccagggcttctaaggagtttattgatgcgaaattttcgtgtataagatatgggaacaaacaacaatctgatgatgctattaatccaagaccttccccgaaaatcggttgtaaagcaagtatgcatgtgaagagaaaacaagatggtaagtggtatatttatagttttgtaaaggagcataatcatgatcttttacctgctcaagctcattttttttagaagccatagaaatgctgctgatacaatgaagaatgatgttaggattcgcagacgaaagaacttagctaatgtgtctaaattattcagtgcttatcaaaatgttgaatgtttagagagttatttaaggaatcaacacgataaaggacgatacttggtgttagaatcaggtgatgctgaaatgttgcttgaacatttcatgcaaatgcaggttgataacccgaaattcttctacgctgttgatttgaacgaagagcatcgactgaggaatgttttttgggttgatgctaaaggaatggaagattattctaactttaatgatgttatatcttttgacacaacatatttctccaacaagtataaaattcctttggcactctttattggagtgaatcatcatattcagcctactttacttggatgtgctttgattgcagatgagagtctttatacttttgtttggttaatgcaaacatggtttatagcaatgggtgaacaagctccaagagttatcctaactgatcagaacaatgccatcaaaacagctgttgcagctgttttcccgagcacccgacattatttttgtttgtggcatgtaatggagaaggtaccgagacaactcgagtttttgggtatgtggcatgatagtgttatgaagaagtttagtaaatgtatctttaagtcttggtcagaaggacaattcgaaaagaggtggtggaaactgatagagaaatttaatcttagacaagttgaatggattcagtccttgtatgaagatcgaatgtattgggtgcctacattcgtgagggacatatcgtttgcaggtttgtctacaacttctcgattagaaagtttgaattctttgtttgacaaatatgttcaacgggaaacatcgttgagggatttcatggaacggtacagggaaattcttgaagataggtatgaagaagaagctaaagcgaatttcgatgcttggcatgaaacacccgagttaaaatctccatcaccatttgagaaacaaatgtctcttgtatatactcacgaaatttttaagaagtttcaagttgaggttttgggagcggctgcttgccatcttaagaaagaaaatgaagacgggacaagcacaacttatgctgttaaagatttcgaggatagtcagaattacatagttgaatggaacgaatcaaaatcagatattttttgtttatgtcaatcatttgagtataaaggttatctttgtagacacgctattgttgttcttcaaatgtcgggtgtgttcagcatcccgcctaagtatgtgctgcagcgatggacaaatgctgctatgagtagacatcccattggtgaaaagctagataatgttcaacgaaaggttcgtcgttacaatgatttatgtagacgagccataatattgggcgaggaaggatctttgtccgaacagagttacaatgcagctttaagtgccataaaagaagctttgaagcaatgtgcaaatttgacaaactcgttagacaacaacacaagacccgatacctcagctgtagttggtggtgtttgcaccgtcgatgcagagaatcaatgcagcaatgcctctacttacgaggtatccgacgttaaagtgaccccaacgcacagtgagagacccgagcctgggaaagagacctcaagtaaaaaaggaaaggtgagtgagttttgattttgcttttgagtaaatactcttttgaaacttatgtttttgcaaaagttattgattggattttcgaaaatattaaaataaaacttaataataactcgatctagaagtgttacgacaagactggacaaatattctaacaaaattatcgaaagtagagctaaagacattcttaaaatatgtttgtgtgtgtgtgcagttacatcagacaacagaagctgcaagtgttgtcactcatcaagggagctttcaccaaacggtatgaacattcgaacgtaaatcatttaataaaaaccgaaattatgtgagttttgattttccttttgtttgaaaagcaggagttttctggatcaaacatgatgcaacagttacaaaatgtggtagtacctacacaattacataacatgaatatgatgcctcctcctcctccaactgcaatgtttcaaactgtttcagtagctcagttccataacatggctgctgctgctgctgccgcctcaaccactcatctccatcacaacaacccccgtcttcctcgttgatgcgaaattctcttgtaaaaaccgaaactttattatagtaatatgtacaggtacatacatggattgaggactcacttactcttatcactaactgaactggcaaaaacctttaggctctcattggtttgaggtaatgaaacgaaaaagtaataaaattctcattattatttatttgtttctttttattttttataaaaaaattataaattttatgagttt

SEQ ID NO: 377814 - DNA, 2999 bp, Cannabis indica
ttttttaaaaatatatattttatgaaattttagttatttttattttttaaattatgtctttttatttaataaatatctaaaattttgaacaatgtttaaaataattaaaaatattaatatgcacaataatttataaatatctatctatatatttataaaggaaattataatttatgtgtacttttgtcataattatttgttcagtttttatcatttaactagatttttatgctaaaactttacagtttatatagaattaaaaaattacaaaacatataattaataaagaaaattactatcaatatcaaatggtgttaattttagtaatttatatctatatattaatataaaagatgaaacatagggaatgatgtgacgccttctatgagttctatagaaaattagtaatgctaaaattttatacactttaaagacttagttatcattaaataaaagacataatttatttcatgtaaataattcatatttttttaaacatctgctgcgaaatacgggttgtttattattatatatataaatttgtgttgtcaaatatttttttttacattaagtgatagagaaaatataggataacaaaaaatatattcaaacgaattatgctaaacattttatgtttgtatagcatctatttgacaaaaattaaatgtagtgattaatgttaattaatttatctcttattttttatttattatactagcaatattttttttctctttgtgtttgagaactaaaagttaatattgagtatataaatatttatatatatatatgaaatataaataaaatacaaacataaataaatatatatccttaagaaaaaattcaaatgatataaagtaaataatgagagtaaaaacgaatttttgattatattatattttaatttttttatttgaaaaaatatgtcatattttgtagtattatttttttaagagaatttaggttgtatattatcgtttttgtgtggcattttattatacgtgtcactaagggtagtattcttatcttttttattgtattaaatattttaaaagtgtgtgatgtaatgattaatatcaaagtatatgatgtgatgtgacaatttttttattaaaaattatgatgaagaacttatcaaaaccatcttttacatgtttttgtttttttttttcatttgtagttatagttataataggttttttattttttccttcatattgctattctctttttcttgttcatcttcttctttatttattttcagctgtttcttctttttcttccttttttttttcttgtttttgttagtaaattagaaataggtaagaaatatttttttaaaaaagattccccatagccttacatcttttataactttgaacctaaaagaaaatcagctgttcattctgtaaaaaaagagaaaattaaaatgtttgaaagcgatcagaagattgagactttgatttcgaagttgatgatgaagattttgggatacccaaagtgtcgaaggtatttatgttatttttcaattgaattttttttccttttttgttgtacatattctagctttttttctctaatctatttcttcagctcattttaatttatttgttgttgttatgtatttcgtattttttgtttcttattgtatgcatatattttttagtgttttttaataattgttttgttgttatctgacttgttcttttgagtcgatttttttttttaaaaaaaaaaaatagctgaatacacgttactccaaacccattacttactgatctcctcatcttcatcatcttcaaaaaaaaattcttcttcttaagttttttttcaaatttttttcttcatttgtttgaaaggtacgttttttcaattgtggtttctattactttttgcttttcttatctccatcatctttaaaattttcttccgcttcttaagcaccttaagcttcttttttaatttttttttattttgtacatgttctgtcttagttattaatttgagattttgtttcatcactctccgattttgttaaatattatatattttgttgttctatatgtattattcgatacttagtattatatacttaatttttatattttttaacgattgtattttttggttgttctgaattgttttttaatgtatttagtgtaaggggaaattttccaagttgaaggttccctctcgtgatattatggaagtccacactcacaaaagagttattgaggtatactatttctttttgtgtttttatttagttattttgttttgaagtttttggagttgttttagttgattttttatattattgttacaggattggaatcttaaatacttacaatctgactagagtatagttgttttttggctgttttggtattgctttagtggttcggactgtaggtgttagaaatagaggttccatatgtgttttggagtgtgtatagtataagagaaaaaaaaaattaaagtaagcataatatttttataaaaattttggtttgacagtataaaggtaaaactgcctccaaatctattctttttgtaaaacccccaatttttatgggaaacttataaaaatactggaatttgggttaacttttacaaaaatactatcacacggaaatcttttaaaaaatactgtgtttctataaaacaccagtaaaacacttaaaacaacagtagaacacctaaaaaataccaatagaacatcaatgaaaacttaacacagtacactgcaatatgaaacttataaaaaaaacacagtaaaaaagtaagaaataccgtctgatagtatttttataaaaaaaatagcaaaagttaatataccatgtaaatttcccatttttattacatattttttaggggtaagttgaaaaataccacttttattaatcaattgatcaaatttacttctaattttatatttgattgaaacatacctctttttatatgcgttgtacctaaaataccctgacataagagagtca

SEQ ID NO: 377815 - DNA, 5522 bp, Cannabis indica
aatcgttgaatttcccttttttgtgatcgcgttagtcagagccatctttgctgtgcttgccaccaatattcccattgttggagaattgatagagatcatctgtgctggttggtacatctaacagcacttgaggcaatattatgccctgtgtctatttagcattaacttgccctcttgtctgcgctttctggacaacttcttcaaactttatgaagtcatcagctctctcaaggaactccttcatgttgtttgttaagatccttctgatatatttccataattcactcaatggtaggattcctctgagtacggtcgtatatcggccttcttctatcgtgcttttgacgttggtggcctcagccatgaacctttgaatgtagtctttcaaagcttcatcttgtctttgctttattttgaaagatcctccagtcgtgaaggtatttgtcttgaagtagagaactgaatgtagaactccggggagaattcttcccaagaattaaatcttcctgaggccagcttgaaataccattgttgggctatttcaactagggtagctggaaagattcaacatcgcacatcgccaaatacttgctggagatctacatggatctcaaagtcttttaggtgtgctgggggatcttattttcccatgtcatcttccaagttggcatattgaatttgggcgcaggcaaggcattgatgtatgtttagaaaggttagcccctcgacctatctagctcgaggtctaatagtttttggccagtcaagccctttatcatgtctcttatttgatccaacagtgcttgcacaaaagaatctgttgttgtaggggcctggttgattggccctaattaattaagctgcaaacctagattggccagagcctagccgaccatagcttgggaaaggatacgttcaaggctagccagccctgagtctggcagtagtccatggctggccaggcccccagccctgtactgggtagggcctagccgcccaatcttccttcactggctaattgagcctgtccattgacacagagtagatcacaccaattgttggcgattggtggatctaaatgtataaagttattgtattcactcctcaggttgttattatcatggatgcttccacccattctcgagcctaaccagttaaatattagcctttgggtgactcgctcttgaatgttccaagatgggaattcaccttgttggtcagccaaaggtgcacttctaaggtgctggacgaccatgggtgtcacaattggggatgttgtagtgcaagaaattcctttctagcccccaggccaattgctacaagagtttggttattctcaccaatggatctttgttgtaaggcttgtcctccttcatgtcggggaaggtttgtcctagttctagtagaactatgttggatagtttgtttgtagaccctccctgatctttcgattagcctcccttggagtggatctcttatgagatcctgacctcttcttgcaattctttcgtggaactgccttattaagtcgctaccttctctcttacaatgatctaattttgcctgataagatcgaaggatgtactcttggtcatccatctctcaaaaatttacatctctattgtacgagtgcatcgcaacaaacagcgcatggttcttcaacttagctgacttgataaatatcctctctaagtctagctaacttgagatcttcccccaagtctacatggggctcgcactggtctcgtgtctcaagcatagtaatggggatgaggtccaaatgttgttcttggggattgttccccaagggtccttccttcagtggaaggcgcctgtggagggtcctcccttggaggcaatggctaattgtttagatccaccgagatgtttgtgttatcctggccaactataggggccagattcatggtgcctactgagatggcaggaatgaccacatctgcagtgttcatggaaattccagtcatggctggaacatggacatcaggatctacaatcagggggtcttgaggaagagctaatgatgtagatggtgaaactggagctctcctcgtgttaaccgtggtatttgatcagttatggtaccaattcgctctcaatgaaagcaccaaactgttgacctcagaaatgtgccaactgatagcagactcgaattaataccgatgcttgccacgtcttactcaattagagttagaaagtaaaagaacacaaggatttttatagaggttcgaccccctaagtttgtgggtaatgacctactccccttttagttgtattgataccgagagataatactattcaaatcactataagtgtgatctgatatagctctcttaaggttacaaagcatgaaccagtaggcaggtctctaatgagagagaaatgaagccttggaggcatgtgaaagagagggagagaaagccatttaggcgtgtataagagagagaagagaattagggtttcaaacttagagctttaaggcttaaaatgagacttagggttttagggttgagttaaggttctttatataggagagcttaaatcctaactagtaaataaaataagagatatttacatattaaattaataaatacaaatgaccaaatttccccttaaaagtagatatttttgtagcatcttagtaaactttgaaggcccaacttgtagcttggcttgctgtccacgaatgaaggtttcacattaatgtcttacaagggagaagctggtcggccatacacctgcaagatataggctggctggccatacaaagtctgtaggttgaggtcgggccggccatgctcctgctaggatctggcaggacatgttcctaccaggatctggctggtggaggtgaccagcctttgaagatgaaggctaaccattggaggtggaggctagcctttggagatggaggccagcctttgcacaccttttccttgcagaggctagtctcccttggtcgaacggaagttcacttagtctaaaagtcacgttttgtttagccagcttatgctgaaaccctggccaaccacacaagctcacttggtcggcctatagactccccttggccagccacgcatgttggtacaactacttgatggctcgcttaactctttttgcttgttgcttgatggttttgccataccttgtaaggagactttattttgctatcggcaaggttgtattccacatgtactctatccttgcttacgtggaaatgtcacgtcagatggaaaaaaatttgggataataggatgcaattagagaggaaaaaaattagcaaaagagacgtagaagacttttcaacaacgttttttgacgatttcttttcttctactttcttcttatgttcttatttgatctgtgtcaatctcttataattgtaacgccctatcccacagggacgccacgtgtgagctttttataaaactactcttttactaatttatataaatatacgaaaagtgtggctaattaaaaatttatagtcaaaacaaacacaatgtaatatcttgtccactgggtcgtggcaccacgactgatatgtacactgctgcaaagacctcaaactcatggttgctcaacctttcccttccctttatctgtaccatttagcaaccgtgagtaacgtagactcagcaagaaaagtgattaaatccataaataatatgaaatccaattaataacaccataacagaatgtacgcaaatataacacatcacacactaacatgcttatacattttcatattattaatcgcacaatctcggtgcttcataaagcatccttacaagtcattatccacaatctacgtatgtcactatcgtttcccaatacagcgaatgataagtaaaaacctaactgaagattttggagtaattactcaaaacggtaatgatcgtttccaaccatcggtcataaccgaggcataacaaacacataaaaaggatctcaattataatcgagactataacaatcataattgttaatcacttaaccgtaagtggtgcgtatcacttttcttacctcagtccagaaatcaggtgtgcgggccgacctgagtggaaacagagctgggcgatcccagtccaatgtcacgacaaccagaattcaataaatgccttaaaccaaaactcggggaacaaaccctatttccaaaaccgaacaaaacttaacctccaacaacctgaaaatacgctaaacaacacataaacaacctaaatcagatactaggtaccatctcgagccaaaacagaactcgaagaaaacctcggtaattccccctgcaggaaaaccagtcgaccagttctggtcaccagaaccaaccggtcgaacggttccggcagaccagaaaaccttgggttttcttccccaaactcaaaccaacacctaaccaatcctgtccaatagctccaaaaaagtttataaacatcctaacaaggtatacgattcatcaattcacaacaattcttaaaatttcactatataccatgtttaaacctaaattggatcttaaaacccaatttttcttaactccactcataacagccagacatctaaacaaattgaaacttaactaaccttaaaatcaacatcacaacaaaccctaaacttagtctaagcatatagccccgaaaccctagaaaattaaaccaaaacaaaccttatacttatgtaattcaagggaaaagtttcaagatcttatcttgatgcttaaacagcttctaccccttgccaaatcaatccaaaagttgaagattgagctaaaagaatccctggtttgcagcctcttaggggttcgggtagcaagaagaaaggaggaaggtaagtgtggtgacttgtttgtaacttaattctaatctatatcttagttttataaaataaactttaacttcagcctccaaaccatataagacaaaacccacaccactcaaattgaccattttacccttcctaaacccttaaacttaaaatcaaatactagggtattttggtaatttctaactaatttgcgaaaactgacaacccaaaattttaaactagtcttgtatacttccaattcaatatatctcttattgtcgtgacattttgaccactctgtcaagttcccacggttgccagacccaaaatcctttaatttcaaaaagaatacaataaaatctctgcaattaataaattatgatttatttaatcatttattaaattcacaccaattaatttaagtaagataataatcttacttcattaccagaataattacatatttaataaaatatgcccaattaagtaccatattattttctgggatattacaactatcccctccttatagaaattttgtcctcaaaatttacctaaatagctcgggatactgctctcgcatctgcgaatctaactcccaagtcacctcttcaactttactgttctgccacagctatttaactagcagaattaggggtgttcgcggtgcggttggtgcggtttttaaccattttttcaaacca

SEQ ID NO: 377816 - DNA, 3632 bp, Cannabis indica
tactcgtcaatccactgacatgttacactcatataagatatctgctcatacgaagtccagaaatcaagtgtgatggagacctttagagaaacatgcaccaagatgctctaatatcttcctgcatgcttctgaagacatcatgaaatactgttttatacttgtcagctggccaaagttgaattgctggattcaaaaacttgtaagagtttgccagccatttttcttccaacgtcgaaggaggcagagatgctaaaacaagccacttaacgagcaaccaatttaaatgatcatagtccacttgtgatgttttcccttgagattgtggtttcttcactacagttacaggtggaagcgtggaattcgtggcaacttcgcctgatttatcatatccaggatgtcgattactaagatgccttcccaagttaccttcacagtagaagagattggtaaatgcactttatttgcatataatgaatgtaaagtaccgctcatcatcccacccaaagatcccatggtaaggtgtaagtaattcagttgaaacccaaaaaattgtttgttaatgatcaatgaaactggtcaaagcttcaactaaaagcccttgtctttctataaatcacagtaggtagtgaaattatacttagatagcaatagacataggagtcacatagaatttaatttttttttttttttaaaaaaaaaagcagtaacataacaccaacaaaaacaagagactgggaggagaaaaggtaccagttgcagtggcaatagaatagctctggccacaaacttgcacctgcggctttttccatctggagctgtctcgaagaatttgagatacactgatgtcatttgtttttttccttggctttattgtcgaaataggatgtccatgtcccttatctgaagaccccaatccaatatctactggatcaattggaatgactgctagatccataactgattttggttctatatctatgacaagaagaaaacagattctgtaaggttcaatacccaagtaacaataataatagcagcatgtttatggacctttaaacattgagacatcttgtatcaaattgatgcttaagcagcaaattcagcagagttttcccacttaaaaccaacccattttcccttgacaggaaaattgaccaccaaaaatgtagaaaaattaaaattccacaagttaaagtgaagcaactcatatttgcgtgagtcatcagggtggtaatagtatagggtcgataaaatcattcaaaacgtctttcacaagcaatattcctcctataaactatcaaatatcatcaatactttcccccatcaaagtcaaaagcccagctgaaaaacctttcaaatttataacatccaataaagaaaacatgaaagcatccacaaataaactacattaagcatgaacgagaaggattgagtccaattataagaatacctttaaaagtcttgaatgtgttattgttcgccccccactccatttgagcaactgttttcccagtcacagtcacagttgctgctgctgctcctgcctaacaaataatcccatttccaaataattccataaattaacaagaaaaaatccattacttcatccaaactacaaacataaacaaaacaagcattacatatgcttcttaccccaaaattcatgagaaagagtgaaatccagagagtttgatcgactcccccaccaactcaaccaactaagcgattcacttcacgccgtagcaaagtttcatttccaaaacaaacgataacccataataaagttcaagtcgaactcaggttgagaattgaataagtccgttttgattatagccgaatcgggaataggagagagcaagaaaattgaggaaagaaagagagggaaaagaatttggagggaaagaggagtgagccggatcagagccgagaaagaaagcgaaggagaatagatcggctgagttttgtttgattggggcctttggggaagagttaatggctggcagagccgcgagcgacgcctcaaagtcacagatctaaaaactcaaaactaaaagtaggcgcagctgcctagcccagccccagccttattatttttacttctctctctctcagcacacagtcataatcaactcgactcagtggctcggccccactcggccactcgctccatatattattatacatttttgtttttttattggaaaactttttttcagcgtcatatattttaggtttttcttaaaaaaaatactaaaaaattcaaaattattacgaaaatacaacttacagttttttataatatgtttacgttgttatttttaccttatttttacaacaatattatattgtttgcacatattgttttcatttacttttatatttatactatcttatttatttgttatttttcatttagttttattgatctcatttatagccaacaataataaattaattaggcgatttaaaaaaaaaataaataatgataattaagtaataagaacataaatttgttatagaggttcgacttcgtgacgacggtaatagtctattctcctttttcttgtattgattatgaaaagagagcaaggaattattaatcttcttcgaagctcttacaatggtttagtagcttcagtgttctctggattgaataatgaaaaattatagtaaatgatctcaaattatagaattatgttaataaatgccctcatttcaaaatttgtagcgaaatgtcattttttaagattatttattatttatattgtcttttgtcacataaaaaaatcaataggtaaatacttattaatgtagattgtcattttttaagattatttattatttatattgacgtggattcagatacactgcacagtgtatttcgttgggtcacctcgctgggatagtaagaataaccctaacagcgagatggagcttttcccatgtctttccgaggttgaaaatataaatactgtcgtttctgctattaaagacataatgctccatctgacaatcacagttcttggtgacaaggtgaacttcagcagtcaacatcatttgaatgtcagcttctatttgagagagctgactcgactgagcagtggatctcattgaaagatgtttgaagctgattagtgaaggtaccaggaatatacattcctatagcgagatggatgcctcgctattcgttgtttagactcaaccaactgttatgcttagtttatataatgtatattatacgctaagtgttctaacagtcaacatgtctcatctctaccttcttatatgtagcgaggttgatgcctcgcctggtattatttatgccacccttatgattgtgtcttctgatgtgaaatggcttctcgctaacgcatgagtcaatagtttgtacatccttatctcgtgtaaaactatacagtaagcgagttatagatatactttatcaattccgcatttaatgagttattccattttaatacccttttacataattgatattatattcgttgattcatattctccaagattgacatgtgtcctcctttgaagtgtcagccaaaatgtaggtataataattgtcccttaaaaagttctttttaatgaaaggtgctttttaaatgaatacagagggt

SEQ ID NO: 377817 - DNA, 3080 bp, Cannabis indica
tatgtatatatgagtttgaaaataattatgaaaatgaaatcaaaataaatattgaaattaacataaaataatgtgaagaaatttttttttaaaagtaaaatcaaaagtaatttttaaaaattatttaacttttttttttttaaattaatggagtgtatttatcatcttatggggtgcaaatagaactcccctaaaaaaaataaaaaaaaaacttagcttccaaaaatacccctttttttttgttcaataaaagattctggtaatgtaaaaaatgagaaatttaaggaaaaaaaaattaattcattttgtaatggttaattaagatttttatccccgaattttcacatgtgacaaatcatactcttaaacttttctggtcgttaaaattctcactgaacttattatattttcactgttgttttaggattattttttggttgttacaatgcaaattaatttatatgtttcacatgcattattaattatctataccaattttaaggttaaatttttgtaacataataatcatttaaaacattttcttataacacaaacttcaatcaatttacattttttaacccataagctatcattagccattaatttttataaaattaatagtattagcatcatctttttgacgaatgtttctcaagaaaaatcaccacttcttcaaaaatataaatgtaattttttttttgttatttattttacagtaactacatagtcttgtatacgaaaattaaaataatttattctattattagtcacataaaataagaataaaattttctctattagataaatattgatttaatgtggtaagtgatggtagctgtgggtatgttagggcttaggggcttgggttcgattggggtttgtgttggtggattcgatccgcccttccttcttttggtgatggtttagagaggtctatccttgtctgagtatggagttcgggtggcgcttattttctttttttattttttttacatttggtcctggtggttctttttggcgttctagctctggtgcactgaggctaccttgagctcaaggagtgttgacattgagagggggatatgggatattcccaggttcgccgttcggtcataggtataagtagactaggcctgtgcctagagcccatctagccaaaatgctcaaaaaaaaatatcgtatttgaataatacacatattttttttattgattttgaaaaatatcgaaaaatatcgcatttttgtatttcaaaataagagtacaaaaatattttgttcttattgtccactaaatttcatggccagccctgaatttcccaaagaacgtgcatccattgtcttgttgttggtgccccttcacaccatcttgaactcattttggtgtttcttgagcttttattggttgtgttccttagtccaaattcgactggattttgacaagtgttgaagctctctcaaatctctagtcgagagttaggaactttgggttggctcgggggtgtgtatctttagttttttttttccataataatagtcttttataccctatatcctttgtgatgatggctttatgccgttttgtgaggtttgtccctattagtcatttttttttaaagattttactcctttataatcaatgtacattttattgtgtattcagcttatttttcttgtgagatttgtgcaactttatttttattttattttttggactttgtccctatttaacccaaataaaattcagaaaaaatatatataaaaaaaacaaaaaattcaataattattcccaaagatgctaccttgatactattggcatcatatctagcaatgctcttaaaaaattaccctcataataaaaattgtatggactatataataggaacagtgtatttcaatatacccccataatcactaatgagagagtgagctagctgtcaaaaaatataccgttattgaaaagacgaaaataccctcgtccaatctccacgtcaacggttagtcaaagtgccaagtaggcattatgattactattaagaatagaaaacaagagaagaaaggacaaagaaacttaacacacttctccaaaaaaagaaaaaaatcttaaaaataaaaattaattaaataaaaataaaaaataaaataaagtatctgaaaaacaaactatataaatagagactcccgctttttatgcctattcacaatctgatttctttatttatttttcttctctctctctctctctctctactttctctctcttctttcctccattcatggattcaccttctcgctcctccgtaatcatcatcggcgctggtgtctccggtgagatttttttatcttaacctcaaaatttcaaatttttctgttttgaatttgacctgagatcgatttacgtatattgatgaaaggtttatcggccgccaagttgttggccgagaacggaatagaggatatattgatactagaagcgtcggaccgaatcggcgggagaatacggaaagaggatttcggtggagtgtcggtagagcttggagcgggttggatcgctggagtcggtggtaaagaatcaaatccagtttgggaactcgctaacgaatctggtctcagaacttgcttttccgattacagtaatgctcgttataacatctacgatcggaggtccgtatgcgaatttttccggtcactttgtttttccttttcttcttcttatttcattaattaatctggttccagctgagtaaattgctcatgtgatgaggcaggcattaaatgtaggttttaatgatttttggtaccatgcatttttggaatttttcgtattaatggttcttctgaatctttggtaatttatattctattagttaattaatcgatttaaatatattatttattgttacagcgggaagatttttccgagtggactcgctgccgactcgtacaaaaaagcggtcgactcagctattcgccagcttagaatacaggaagcggaattttgtggtagcgacctctccaatgcaaccgaaccgccttcgtatgtgtatatattttcatttattttatcatttactttttttttt

SEQ ID NO: 377818 - DNA, 1898 bp, Cannabis indica
ctctttatccacttcaagattccagcaaagcttatattgattggaaccaatccaaaaacctcacacaccttggaaaagaaaatatttgaagagtcattcaacccgaaaaaaaaatataataaaactagtcatgaagatattaattacaatacacaatggttttgaattacttggccgaagaaaaatatgcttcaaatatttagtgacgtgacctcagtattgtattacactgccaatatatgctttggccagattatgaaggtatcaaaattaactaaaaataaatgttaataatctcactcttaggatgttgatctcgacttgtatacatatggggaagtaatgagtttatataaataaaggagtttgatgtatatatatatatatggaaactactaattacttaataagtctttattatttatgtacagaccaaattgagaagagtgtattttatgtttagcaaaaatgaatggtgaacccaaaagggaaaggctgtaatgtatgacaaacactccaagtataatgtttgttcaagtttaacaaacaggcaaagaaaaaaagaaaaaaaaaaaaaacaaaactgaacaagctaaatcaatcatatttcaatcaatcaaaatcaatccactgtacatgcacgtattagttttgcttatgatgattataagaaggaaaatggtattaattaattacattatttggattatggtcaggtatggtaaggggtagttgttgtcatatctatatataggtatatagatatataggtcaactttagtttgagtggttttggatttattacgtgcaacctgatgtgtacagtattaaccatgcatttggatttgattgagtgatttcgatgtgtcaaagaagatgaaggaagaagaagcagagcacgcccctgctgcaatgcaattacaaaattcccagctccaatctacgtcatttcaccaatacacacacaaccataccgtcttttgcatgaaccatcacgtaaatctcaatcattaaaatgatgaccttatcccggtcccctccccttactccccagggcccaaagaaagaaaactattcctcaatcttcaaaagttacaagtgttggcttttcaggggttggtacggggtttgctcttactccgagatatgtaataataaagctctctccactggaccatttttcctatatatatattattggacttgaattgaataggagggcaaaggtaggtgaagatcaagaatatgtattctttgtgtgtgtgtgtgtgtgtgtttacgagtgaaatatagtccaaggtttgttgctacaccagggttggttgcttagtagatctagctatatagcttactagccggctaggcacgtatgtatagcctgagaagagtagtggtgcaaatggtcaaattttatgcatggtccctggcccctacagaggatatatactgatcaaaaatattcacatcacacagtgatgggatgaattgtactcttatattatatctatcttctagctagtacttggagttggagctaatgtgaagaaattttttgttttgagtttgtgaaatggaaagtgataacacaactcacaacaatattggattccagaattattattgttatcatatttgactgattattattattattattattattattattattattatacctttctttgactatatgtttcaccaatttcaaatccatggtaatagagaaatgttaaaaaatattattgtgtctaccataacttaaaatgtctggtaaaatgaaatatatatctcagtcctaattaaattttatttaatttaatggaataactataatggaatatgacacaattctttttacaaatttttacatcaaaaatataaaatgataattttat

SEQ ID NO: 377819 - DNA, 3303 bp, Cannabis indica
gttttgtacactatacttacatttgtacattggagttgccttaagtccatcattgaattgtggttatatcttatttaagttatctataaatatatagatttatcactaagagtgtaaaagtgtgcactattacgtggccattaatacatatatcaggaataactacaaataattttaagtttgttaggttcttttaacctatattagtagctttgcatgtgcagagctgatgaaagattgcccatatcatcatcaaaattaatatgaaccatttgatttaactaaaatttatatctatatattatgaatggtgactactgatgatgatcaacgtggcttataagaaagaagtttcctctttatttcagtcagattctgaatggtccaaccacgatggacagacctttttatgcctgtctagtcgccattgaacctaaagtacactctaataactaatatataatattaataactattagatgcaaaacgagactatatagtgtactagctactacactattcaacttccctccaataattaatgttactttctttaatttatagctttttctctgggtttttgtttgtaggtttgttctgatttgatattatatagctatgccaaacacacaagcaaaaaaaagcctaaacttaaatctctgtttcaaaaaaatcaagctttcccaactattctcccaatctcttcctatgacgactccacaaatcaccccagaagatcacagccgtccattacctcaacccaaatgctcatcaatcttggtcagaaacttcaactcactttacgaaaatacccttgatttttccacctccaactctccaacatctccttccgcactctccgtcgacgacgatgataacgacggcggtgcagtcgccgtcgccgccgcatttgcttctagtagattcttcttctccactcccggaaggtcaaactctatcgttgactcgtccactactattaccgcctccgcagagcccgatgaggcagtctcctctacgctcttcggaaacagcgtggcggtgccgacgatatcgccggacccctactcggattttcgaaggtccatgcaggaaatggtggaggcgcgtgaggttggtgacgtggaaaaatctaattgggagttcttacatgaacttctcttgtgttatcttgctctcaatcctaaaagcacccacaaattcattattggcgcttttgccgatctggttgttaacgttttgccttcgccgccggaaagtggcggtggccgcccggggaatctgatgtagtcgcggatatgtatgagaataagaggtagatgattttgtctctttgctgggttcgtttaattaataaactttactaattaattacataaaatatgagatgggaactgaagttggtcccccattgattatttaattaataccgtgttattgtatgttaattcatgattatattataacattgtttattcacttgttccagtcttttaattttatttttctttctttcttttttctttttgttcttatgtataaagcagtacacactcaagtactgtacctttggtaaattaatatacaacagttatagacttatatagtattattgaagaaatctcaaagtactatataagttttgaacaaaatgccacttagccgcagcaaagctgcaatgtctaatttcttttacaacccaaatttacaactcaaaataaattaaaaaaaaaataaggcaattactaatataatatagggtaattaaaatttttgacccctgaattttcacatataacaaatcattttcttgagtttttaagatcgttaaaaatactccttaaactattgagattgttggatttaatgatttatgcctaatttcattcaattttactatttcagtgattgcttatgtactaaatcatatttctcagactttaatatctatcaaatcatatccctcaaactttgacatgtacgcttctgaactttcatccatgttagactttttattaaaattggataaaagtctttaaattcaacaatctcaatagttcaagggcatttttaataaccttcaaagtttaaggaatataatttagtacatgtcaaagttcgagctacataatttagtatgtacatttcaaagtttacatccaaaaatcgaaattaggctataatatattatcaatactccaattgtttaaagccttcataaccaactctgaatccttttccaccatcataaaatcacaccagttatatatacataatatataaatacaagtatacataattttggaggagaacgctctggatcaatctttcatggccaaaaaacataattattaatatatcgaagaaatctcaacattattttttgttggaaaatgcacaggggccctgtttaaagatgtatggatattaatcgtagcagcataagatctttattgtaaagtttttaattaagtttaaattaatgcatggttgcaaaataattaaatcagaagtttaatttaataataatttatattgattcttaattaggagttttgcagagagtataataattaataaaattaagccacatgtgagttccagatagatcgatcccttggattggagctctgatcactctcagtctcagacatgtatatatgtataaattgaatttctcaagcaaaaggaatatacaatacgaaagagaaaaatgcaaagctataacattttcactatcaaaccgatttatatatatataatctacaattcaacttataataactaacataggaacagtaaatcctgcggcgaccactgcttctatgttctgatcaaatggttatgagtagctacttcacaccagtacggtacactattaattgtacggacggcttcgatgagtgtcactcataggtaggtagaaaatagcagccacactgtttggatacgaatattaggataaaggttgaacatctgatccaatttttttttaaaaaaaactgaatctaaaaaaggaaattttaatatcaatacataataaaactttcccatatcaaaatttatatcttgaattactcaaattgcttttttcatttaatttttctctttctttgtccttctctcttcctctcgtttctctatccactcaacccaaacattgaccccttaacacgttacaaaccaagggcacccgaccaccgtcaccaccagggctggccctaggtataggcgggcagggcccacacttttcgagggcccaaaataaaaataataaaaaaaatttattaggcttttatttaa

SEQ ID NO: 377820 - DNA, 3320 bp, Cannabis indica
aattttatgcataaatctcttatgtcattattctattttcttttcaatatatgaatggaatttatttagcacttattcttttctttggaaagtctgcttttatttgaaaaatattacattcaactgcagatcctattagaaagaagattttagattgggaaaaacgtgtcaacattattgaagggatagcacaaggacttctttatcttcacaagtattccagattgagaatcatacacagagacttgaaagctagcaatattttacttgacgaagatatgaatccaaaaatatcagattttggcatggctagaatttttgggcgaaatgagttgacggcaaatacagagagagttgtagggacatagtaagttacaaatgctttttgttttctttttaacaatatttgtttatgtttatgcatgagttggttttgtgtttgcaaggaatacaattgtgatagtaatcaattgattttatgcagtggctatatgtctccagaatatgccatgaatggaattttctctgtcaagtctgatgtgtatagttttggagttctactactagagattgcaagtggcaaaaagaacaccacaggaactctcactctaattgaacttgtaagtttacaattctacttagtctccagcaaacaatgtcatgatatattattgttcatagactgatttgaacttttcttctggttttgttggtatataaattggaaatgactaaaggcttgggatttgtggaaaaaagaagaaagcattgaccttgtagatgaatcagttgatcgttcataccccgaagaagagtttacgaaatgtgttcatattggtcttctatgtgtacaagagcatgcaacagacaggccaaccatgtcagatgttatctccatgctctcaaacgatgttaggtcattgccacagccaaaacaacctgcatactgtcatagtggaaaaagtgccggatcaccatcatcaggaactgactggatttcaagaagtgcatcaataaataatgtaactattaccgtattggaacctagatagcagctttattctatcaaatttaccatattactttggtagtattttactagtcatggctcgtagaaaccatgtaatgattcagtcccaaatatctctgcgatcaagccaagtggtaggagaatgcaaagtgtataggactaactcctttagaatccttatcagttgaaacaaacaaggtgctctgttctgttatgtatttgaatatgcttctagcaaaacgaagcttcacactactgaaaacaagcaaagtaaaaccagaattggaaatgtgctttgctttcatggcttttttttcctatggcaggaaaacatgtaatccccagtatacattatgtaataaattctttcctcttgcagattaacaggtcaatatgcaagagtatatgtttgagatcaactagtttgattgcttttgtcaacaaaagtattactagttagtagttacaataagtatacacctaagttttcgttcatatcaaaaagttgcagcaccatcactagttttatggcccatatttggccaaaacagacaatttacatatgctccagcttgtgaacctcatcccacttacagacaccaaccctgtcaaatctgatatttgaaggcaaaatgatatctctttgatttatttgtcattggtgttgaagaaacataatttttcaggctctaagtttccacttgcctaatcgctttcttgctagcaatggcttagaccttaaagtaacacttttttcctcctcactatcttcactatccacgacaattaccgcttcagatatcagcgattcttccacttcctgctgcttaccattttgaccttgatgagaattctgattcttgtccaacccattgtcctgctgttggatgtgcttgttattgcttacttgcaatcgggacagaggacaaagtgattgtttctggcctctcccttgcttctcgtggtttccatgtccactttccaattgcttgccctccgatggtaatagtgctgtagaacttggtctctttggctctacattttccttgtgtgtccctgatgagcgtcttagtccgagagacagcttctttcctgtagaacagaagcttttattacttgtattagaagacacattttcaattttgtcaactaaatccttttggggaggtagtttaatgtggtctagagcaagggttgttgaagcaccgtcatcaaatgagttaacattggtctcagatggcacttgaggattcacatatattttctccgtagtaacatctacagtttccaaagattttagtgtctgcttgtgacaaagtccacccagcttctttgatttcatgtttatgttaccatctgctgatttagcatcctggataagatgaagccctcccctgctagaatctgcatcttgcggcgttattgaccccaaagaagccacagaaaggtcctcagacatgcatgaagaatgttgatttggtatcaccttcttctgttcattgtcatttctcttctgctgttgagtaaaagcctccagtgataacttccgcttgttcccattaaacttggacacatgttgtaactcttgtttagttccttcaactttcatctggttactagagtctttgagaaaggcgtgtttgttagaagcctcattgtcatttgcttctccatcactaactctttcctgtgactggtccaaagactctagcgttagcttcctgctgatcccaaatatcttcttatggttaagggcatacttgttaccttcatgttttgcctcattcactgttgtttcaacttctacctgcaacagcatgaagaggaaataaaaaaaatgcaaggctgaaatttcaaaatgctctaaatttgaaagtgaaggcttaacagcttactctattacttaccatgcttgaatctgagttggactgaacacacccactacctccaatgctcccactagctccaggacgggcatacttctcagtcataaatcgagctttctggtcaaacgcctgtctgttatatttgtactccttactctgcacatccatcactacataaattaaggaacaagcaaataacaagtagcagccaaaaaagatctgaccattgatgagcatatccacttaccgcttcacacatgagaccatcatctggattgggttcactcagtaacagcccaatgctcataagaacagttgaaatatttagcgatggttgccatgccccctgctcatattagaactttaaaccttattgtttataatcataaactcaaagctgagaa

SEQ ID NO: 377821 - DNA, 1686 bp, Cannabis indica
tggctagtatcctttataattcaaggaaaggagtaaataaatttagtgaataagtaccaatctgaatggttataattccattattgcagccgacgtcaagacagtccttgccttcaaaccattctttcttcatgacctttagtctaggatcttcctcaatgtcctgacctagctgcaacgttatatagaaataacatcatcattgtttaacaatagggaccttaatctttggaaaactaatatactcaagcatatcaaaatggacatatcacccatataatcagaataactaaaggttcaaaaaactaaagcaaaagggccaactaggtcgtcgatactttccaggctaaatcaatccatgattgcaaaactctagaaaatgtatttacatacatcaacaaatatactcctgacctcaaaaacgtgcagaaaacaattacaaaaaaaattaagagaggtaagaggggagaattacccgatatccatagtagtttctgtagttaccgtaagggaatatttccttgtgctttttcttcttctgttcaacttctttggtgcttctctcttcaccttttctcttctccgctttcattttcttctctctcttttccgaattgcccatttggtacacacaagtagactggattgtaaaagataggatcagatagtattctactttatcctgagtttgttatagaatttaattgaactgcttttaaaattaaattgttaaggcttaaaataaaataaaaaattatataaacatatataaaagtacaagttataataaatctaaaccatcatattttgtcaaatagaattacaaaattcatttctccaaatgactagttctttttagctacctaattcaattcatggttgtacgcagggcacaagttttgacataaaaatgcaaagcataaaaggtaaagttttgctaatagaatcattaaccgctcctgtaatcagcctaaattagcactagaaaccaaaattagcactataacaagagtcatatagactttgaacctttgcttccgtagcagtaaaacagctttacgcacgtggcaaactagcaaaacttaacctgttaagcaaaatcctgttgcagaataaactagtggataaagaaagattcgtaaagaacctgattttcagagactgagcgactgaaatgggcgagaagacaagagcatcactgagtttcacagcaaacggcgataagtaaccagcgacgaaggcggacccaaacagaggttgggcgaggttgaaggagagaaagagaagcagcggaaggtttagggtttagttaattgcgaggaaaaaaggaggcatattagcggtgaaacgccttgcagttgttaacttatcaccctaaccaaaaaaaaagtcactgtaaaaagtagtctgattatgtagtttagtgtaaaatcttttattttattttattattttttttaacataaaaatcttttatttttaatgcatcaattcacaccaaatattacattaaataaatatatattactaaaaatatctagtattttatactatttacattgataaactattagtaaaataaaatatttattaaatcaattaaacattaccactttttttttttagaattactctatatattatttttttaactttttttttttcaaatttacggtttgggtttct

SEQ ID NO: 377822 - DNA, 7437 bp, Cannabis indica
tagtcttatgaagaaaattagggaacaataccaactgtgaataaatgatttgtattgacttaatatctaatccatatgcaaaagggtattatttgtcataaacgttttcattctttttaaagggtttcaagaccttactctcccacacacacgcacacacacttgagtctagctcaattggctctcttgtctatatataaataatattcatacgaacttacatcacacttgtaacatcaacttttggcgttgtatttttcaggtaggaacttcattaggagcaacaagaggactgcttctgcgtggtgggaatattctagaaaagttttcaatggtcaactctattgtgtttgacaaaacggggactttgacagttggaagacctgttgttacaaaggttttgacacccaggtatgtgaaaattctaatcgagccgaaaattttctgttttgctcatcacttggaaacataatttcttctatacactgtagaagtcacactaggcagaactcctgaacatttttaaaatggcactgcacattaacactgtagaaattctcctttaccagtatagatccttgcagaattgatttagaagtgaaatttatatactaggagaaatagaagaatatatagatatattttaaaaaaaaaactagatttggaaaacttcatcaagaaagagttggaggaaaatgaatgcaccacatcaaacggaaaataagagacatctttaaatcagttatacaaacaagcctttgcttgtgtgtgtgtacttcttgttcatccatcttgttatatcaatatatcttatattatcaaggtgcgtagatgctcaaagtgaagcccaaggttattaggattcgttaaattatttccatattttttctcctccgaaacatatatcaagattcacacggttgtttcaaaaatagtttcaaggtgtgtctccttgttaggctataaggtccggtagaagatgcattgttgaggcttaacttaagtctaaaggtcactcacgttttgttttgagaagataataaccccatcattccctctttccctttcagtgtacaacagtcggaccattttttgtcagaagcagagattttgaagttagcagccgccgtggaagcaaatacagttcatcctgttggtaaagcaattgtggatgctgctcgggctataaatccccaaaatgtgaaggtaccttttcacaaattcatttgatagatacttcttcagggttcttttacttccttatttgagtatttgacacagttatgatcagacttctcatccttctttcttttcttatttttttaaaacaaaatcacatctttactcatctcgtataggtacaaccagcagattagagaaaacaaaaagaaattaggaggctaaaaaatagcacattacatgtataattaccaatctctacatctcacactttcatggaactttcttgtctgtgttataggtagctgatggaactttcatggaagagcccgggtctggtgcggttgcaaccattgacaacaaaaaggtgtcagttggcaccttggattgggtccagaggtaatatgcctttgctgttttttgctacttgttctgatttgatggctctaatatattatcattcttattgcattgaaaatgggataatttcacttttaaaaaatgaaatttttcagcacatacgttaatgctgtttagactgttaaaaagttttcaattactttcaagttgattttagaaagaaaatttcatttgacgttgtattatctggaatcttcacaaaacttaatagtagatgttcctcatttagtattgaaatctgatggcatttgtcttagtagctgataatttgagttattacggacatgttgcatgatcattctagtcatgttgaaaccatttcctcttctcttttctcatcacttcaggttcttattgatatgtaagctaataaatatataccttgtggtagtagaaatcacttagtttgaagccagatagcaggcatgtagatttttatacggagttaaaatctccgctctagttgattattttagcaaaaatgtttcttggcatcacagagaaagggactaaccttgtctttgggatgcttgtctctacaagaagctggctatcactgctcttcggtcatttcatgtgattgcagtatttattaatttaagatttttattttatttttgcaggaacggggttattgagaataattttcaagtagaagaaaccattaagaatcaatctgttgtctatgttggagtagataacaatctagctggtgttatttattttgaggatcagatcagggaagatgctagacaagttgttgaatctttgtcccgacaaggaattaatgtatatatgctctctggggacaagagaagtacagcagaatatgttgcatctgttgttggcattccaaaagaacaggttaaattctagctgttttttccgttaaaatccatattacaaattgaattatgcagtatctgtagattataactgattatttaatttattagatgtgtatacataatccataaatccagtagctccaataacttgattatctctttagtgcctaaaaaatttttcatcatcaatgattaaacacattccgccaactgcaggtgctctctgaagttaaaccagctgaaaagacagagtttataagtaaacttcagaaggatcaaaacattgtagccatggttggcgatggaattaatgatgctgctgccttggctaatgcacatatcggaatcgccatgggtggtggtgttggagctgctagtgatgtgtcttccattgtgttaatgggcaataaactctcacaggtaatgaagaagttactttcggactatagttataacttatttcccactgagtaagcatgtcatttcctacaagtatagacatgtcttttccttgttccatacaattaacctgattaccctttcctgcagctgcttgatgctttggaattgagtaggttaaccatgaagactgtgaagcaaaatctttggtgggcttttgcctataacatcgtaagtatttttgcttaatactatcaatcattcggcttttttattattagtagtaatattttttttctttttcacttcatcttaggttgggattccagttgctgctggaatgttgcttccaattactggaacagtgctcactccatcaattgctggagctctaatgggtttgagttccataggagtgacagctaattcgttgcttctgagattaagattttccgaaaggcagaaacaaatacacggatcatctgcgaacatcaaaacttacataaattctgatcttgagaaccaaaacaagaaagtgaagcatcctattcctgaagctggatggaaaggggcatgatgacaatataatatttgcatattctttacccaatcgtcaatggacagcacagaagtggatatccaaatcattttagatggcactatcgattcagaagaggtaactttagtgaattgagaaaccctttttttagtgccagtgccaagcagctgaagtggataaacagatgaaacccaaccattttagagaaaatgagaatctaacatctgatttctcacataagatctaaataaaagattagttagaacaaattcattataaacttagtagattagaaccatttgaataaataggtttgtgcacatagtttcaggactgttaattatttttctgtactttagttccacttgcacccaagtctttacatcattgcttcagaaatggcccacctttgttttcgtcaaatatttatattagcagttatgtactcatatttgtaacagttttaggccattggaataaattatttctttagtaaatgtttatctctttataatttttatgtcaattaaagaatttatctaaagaaaaatagtgttcttggccatgacactacaattaaactaaaataaagcttgtaagacataatatacttgtgcaaatctctctttcataatcaaataaaaccaacatataattccattttcaagacaggtaaaaaaaaaaacaagaaacgtaatcaaatcatgtgtcaataatacagtgactgtatatagtctatggatgttgttgttgtcatctcgtatggtgttgtatcattcatgcctatacataataataataagtcacatgtgagggtacattttgttaatatatgcctatcaacaatttgagagtgaacagatatataatgtcttgataaattgtaagctcacatatctttggcatggtaagtacaaaccccaatcatccaatctacactagacgggcgcctcgggagaaataatactacaaaacttctctattgttggatccaaagggccagaggaaaccaattgactcagatttttcttgaattgcatcaacaattgaaatacaccaccacatgaagtcctcttcaaccctaatctttctgtgtcttcgactttgggacggtttttaagtcgagggtggatttcattttggtagcaagaaaactgttcatcaaaccatgtatgtcatgccaacctgcattaaatgagagtggggtacgctcaaattggcgattcccctcctacaattttttctcaaaaaagcatagaagtaatttatgatcagcttctttatgaaccaggaatccttcctggctctgatatcgccatgaccaagaagataaacaactccagattctttagccttgtgtataaaagacaattctctttcgagactctgttctgctgtcaaaggcgggtctgcggaaggtgctggattcacctcttctgatgtgcttgcttcattggtaggtctgtctgtgtctctaaagtcagcaagaagaggaacaccaagtgagtagacacttccattgggagctatgagaaccctagaacatgatgtctcatccgctgaatctgaatcacaatccccatcactctctaatgatcgttcttgagcttcacgacgaatgaatttctcaaggctctcgatcagtagctgctcaaatgtctgatggttttctttgcggacatccttgtaaccatacctaagtcaatgataaataaaatacgtgaagcagagaaatacaaaaggatgagcaaggatgaaaaggagaaaaaaatagaagtgggttaatgagttacgcattgataatcttagctagttttgtcagggtatgacattgtcgttgatcagctttcagaaatttaataaggcaatggttgtgatggttcaaccacttagcatcaattagtcaagcccagccataaaggctatggtgggctccataatatgatgcattttctctctcatttgctaagtgaagaaaagtaggaagagacctatcatgtttagctcgagttgtctggttctttcctttttatttggaaaaaataacattgaattgtattacaagaggagttactcgatggaatcatgctcagaatgcttcttgctttcaagggaggtcttacacgaccattgtgatatgttcttagcatttaaaaagtatagatagatgggatcttaacataataaggattgggcatgtaccttgcaatgcacgaaagatgtgatagctttttgggcagactcgccggaaaagaaatctttcactttgaggaacaacaggaactggtacatacttgatgcaaacaaatataaccattgagtgaattgcagggagagtagtcagaaaatggccaaatattgctggtatacccttcaccagctcgttatataacacccaatgccaggagctctcattgtcccaaggttggaacccaattgccgcatcaaatccatagacagcttttgctttacttcagtttcatacttgagcttgctcccataattccagatagacattatgaaaaacataattacagcaaagaccaagataatccaacttccatctcccacactccacaaaactgaagagaaaaagaccaattccaatccaaggaaaaatgtaataaaacttaacactatgacaatgttgatctgccaaataagcagcataacaatggttactaatatcgttgtcatcatcattactcccaactcagcaattcctgcaaaacagaacaagttttagaatggttaaattcttgtatgaaaaacaaaatgagcaataggaaacaccaatgatgttaatgtaaatgaacgttgctaagcctaaaagaaatttagagatcgagtgcatgcattaaatgctagatataatctaaacccaaatgctattctcacaaagatgataaacagagatgaataaaataaccagaaagaaacacaaaaagaatgttaccatatgcatttccaatctcatccatgtttgagatagagtagacagatattaagcaaactaccaacaggaaccaattgatgacgggtatgtagatttggcccatgaacttcctagaggtgtgaacaattttaagacgagggaaacaaccaagtgccatagattgttttacgcaagaaaatgtggctgttgtcattgctcggctggcaatcaatgcagcaacgttagcaataaagaagacaggccagaacacaccacctgcaaacagagagtatgatttcacatcatatcatatctcttttatataagcatgaatagcccaacctgtacagaatctcacaaatactgtccacatcaatggatctcagtcttcaacagagattcaaaaatgacacttacttggaattgaatggaaaaaaacttggtcagccccagtctggtttgccattaggtatgcagcttgacccaaataacccaatgaaagacaaggcaatacaagaaacacaaaagtaagctgtgtacaagtcaaacacaacaacaatgttataaaaacaaaaggaacataaatattgtacatgcgtgtttaacagatgtaaagtacattcttgtggttttacctgaactgatcgcacagaaaaataacaaagatctgcaaacattgcttccgaacctgtaacattcttgccttagtaacagtataaatgcataggtggcaggaagattatgataagatatttaaactgcccaaatttctttttcatttatgcatttcataatttggaccaaaatagttaaattttggtttcaagcttcttcttttattttctttgttcttttttgtcctgttactgttattatttgagttgatgatccatgtgtctataacttaattaccacaaatagtaataataataataataataataataataataataataataataataataataataaataaatttacattttaaaaaaaaaaacaagcagataaaacttcacgtaattaagaaaaaagaaatatcacaattgaaaaacaaccagatgtccttccaatcaacatttggcagcggtta

SEQ ID NO: 377823 - DNA, 2516 bp, Cannabis indica
caattaaagaaagcaacagaaaatttgttgcaaccaaaactaaaccccagcaactgaattaacagacttaactaactaccgttagcattaggacccttaacaacccccttctaacttagtgtggttgagcaaaccacaccaagtttgtcccttagcaaagaaaaccgagagctggaaattggcttagttaaagaatctgcaagttgatgctcagcagggacatgttgaacatagatttgcttgttgagaaccttgtcccttacatagtgcaggtcgatctcgatgtgcttactgcgagcgtgcagaacgggattggcagagagatgcacggtgctgagattatcacaccaaatcagtggtggagtagattgaggcagacgtagttcagtcagtaacgactgaatccagttgagttcagcaacgacagcagccaagcttcgatactcagcctctgtggacgatcgagaaattgtagcttgtttctttgatggccagtagatcaaatttccacccaggaaaatgcagtaacatgtggttgatctgcgatcgtcaggatcagcagcccaatccgcgtcacaaaaagcttcaagttgcatggatgagggacatttaagttgaagaccgtagtctaaagtgcctgctagatacctcaggatctgtttaacagccacaaggtgagactgcaatggctgctgcataaacaggcacaccttgttcacactaaaagctatatcaggccgtgtaatcgtagcatattgtaaggcaccaaccagagacctgtaggttgtagcatattgaaccggttcactaccataattagacaatcttagcccactgttcataggtgaactttgagttttgaccccttgtaactcagccttgcagattagatcttgaaaatatttttgttgggataggatgatgccatctgaggtgtgaacaatttgaatgccaaggaaaaaaaatccattatacccaagtcttttagagcaaacttcaaactgagagcgtgaatgagattgctgacttggtgagaatcactcccagtgattaggatatcatctacatagatgataatgtaaatgacactattgggacagtataaattgaaaagggaatgatctgttttagcagaagagaacccaaggttcagcaggacagatgataacttttcaaaccaagctcgaggagcttgtttgagtccataaatggccttgtgaagcttgcacactttgttgggatgttcatggtcaacaaaccctggaggttgcaccatataaatttcttcttgaagatcaccattgagaaaagcgttattgacatccaattgtcttacatcccaacccttagataaggcaatagtgaggacaacccgaattgtgactggcttaaccattggactgaaggtttcattaaaatcaaaaccaacttgttgatgaaatcctttcacaacaagacgagcttttagcctttcaacagacccatctttgttctctttaactccaaacactcatttacatccaatcggctctctgttaggaggtaaattgacaagagagtaggttttgttcttcttgagagcattgttttcttctgacatagcatcaaaccatttggcatctttgagagcacttttaagagaggcaggagtgagagatgccataagaacctttggttttcgaatgccagatttccctcttattttcattggatgcttgttgactgtagttggtgcctaacagtgttatggatatgtttagtcacaccagcagtattcgaaggcccagttgggatagttgggagagccatttgagaggcacttgaagtggattccacctgtatattgttagtacctgtatgctcagcagctaaatgatcaacagaagtattatgggcaatattattagtagctatggcaatattatgagcaccagtggcagtgtcaacgacaccaggtgctatagtattggtttcagtagctataggcacatgatttgttggacaggcagtagtggtgtgagatctgggaaagtgagtgaagccagggggaggaaatgggagagggtgtctctgcggtgagatagcagtaggaactgcagcagtacttggagtagacagagaagtggtggtggatgactgcatagcctcattggcatagggaaaattagttcatcaaaaagaacatcttcagagatgtagacacgaccttctttggagaggcatttatagcctttgtgggagaggctatagccaataaaggtgcagggctgagctctatactgcattttcactttgttgtatggtctcaaattgggatagcacaagcatccaaacacttttagggagttatagccaggtttaacattgaatagaatctcaatgggtgatagatggtgtaaggcaggagagggcattctatttatgaggaagacagcagacctataggcttcatccctgtaaacaccgcttagtttaatttggaaattagcagttaatcacgtttaattatgaaatta

SEQ ID NO: 377824 - DNA, 2546 bp, Cannabis indica
agagagagagagtgtgtgtgtgtgtgtgtgtgtgaggagatggatttttagagctgctatgttgattaattcacaacaaactggtattagagcttggttcttagaatcatggcagctgctaagtatgatgttgagaaatttaatggtttgaatgactttgggttattgaggatgagatgaaggtcatgctggtttattaggggttgtacgaggctctacttgggaaaaaatgcttgcctgagaatatgcctaaaaaggaaaagtgggagatgttagcaaaggctcataatgttataatcttgaatcttggtgataaggttttgagaaaaatttcaaaaaaacccctttgttgggatttggatgaaattggaagaattgtacatgaaaaaattgttggtgaacatgttgtacttgaagtaggctatttattcatctaagatgatggaggacaaatctgttgatgaacacatggataaattaaacaaaccgattcttgatcttgagaacattggtatcaccattgcgatgaagatcgggccttgttattgttgagttttttgccaaagccttttgggcattgcaaggatacaatggtgtatgaaagagaatccatttcacttgaaaatgtgcaattatctctgagttcaaatgaattgaatcggagaagtgaattaaggaacaatgggaatggaaaaggtttgtttaccaaaggaataagtgaaaagagaaagaacaacaaaggtgtaaaagggagaccaagatcaaaatctcaatctgagtcacagtcaaaagaccaaaagaatctgagatgttaccactataagaaagaaggacatatcagaagaatttgtccaaaaaatagaagtatggtgatgaaagatcagagggagatgcaactgtgatgagtgatggttatgagtcagctagtgcacttctggttagctctgagaattcagattcataatggatcttagatttaaggtgttcatttcatatgacaccaaacaattcttggttcaaggaattctaacctggtgattatggaattgtttaatattggtgataacaaatgttatctgtgtttctggaaggggacgcgtggactccagagaactatctaaagcccattaatgggcttaaacgacgtgaactggactgaactcaatgtcaacctggccttatgagaaaggaattacacttctcgctcagatgagtctccgccaaggatagtccgtatccagaaggatcctagctctgtgttgtcggaagaacccttcagcatatacctggaagccagttgaagtttcctatttactgtttcgtgcagaataaggaaatcactctcctctcggtcaaaaaataatatcaagctaaaataagaaacaacataactgaagataaagtaatcaatatataattaattacccataataataggacacagtaattacagttgtgaccatgatcaacatgctaagtcagcatacagtcactgcctcatgggctgagctttatttgataagtccaaagtaatgtattatctgtaaacaccccattagataagtatgaccaatattgctctataaatacacattgaatccttcatgcaaagggttagaatttcttaactcacaagtttgagaagagaatagagtgttcatattcattatattcctataggcttttccagcctatctcataataatataaactcgtggactaaggctcattaatgccccaaccacgtaaaaacttcgagtgttctctttatttttattcttttaatcgtattttctttagctcttatattaatttttttttttaaaaaaaaatcttggtaaatattttggcactttcattgagagttgaacaaaacaatgataccatcccatattacatttagtagttatggtactcacctgaacccaatttattcttcactatactgatcctaaaaagagtaatattgatcccaatgctaaaacaggagatgtaaatctgacttaggcaaccagtcgccacatgaaggatcatactagcaagaaacatattcctgaagatcctatggctgaaaacgataatttaagagagaatgattatgatgatattggagatggtcaccaagacacacatgaggatgatcaccaagatatgcttgaagatgattgccaagagatgcacgttgataatgatgccaaaaaggaggacaatctaaccaatcaaatcatgtaatcaccatggccaggaagctaaaaatagctaaagaaaaattatcattacaagagcaattttatttgttgatgcacaagaaattgggagaatggaagttgtaatcaaagcactaaccgctacaagcagaaccaatcaaacgattccaaaaggtaatattaccgagaaggttgatcctaaaaatcctagaacctatgatcctcataaggacaagagaaaagaaaaggtaggtgaaacttcaaagaaaactgctcaggggtacggttcaaactctaccaatactagtacagtagcggtacatagtgcatgtggtacag

SEQ ID NO: 377825 - DNA, 1709 bp, Cannabis indica
ttagtaaaaaccaaaataacaatattgtttatacacaaacgtcataattttttttaacacatattaataaaataaatacattttttttaatataagaagcctaccttacccaatttgaagctttatatgtctagagctatacaaccacatatattctctagtatactttcaaatactaaaaacctctatctctctctacatctctctttctctctcttcccctaatgaaagagcaaatggtcaatcaagagtgggacttcacacctagctcttcttcatctctacaacaacccaagaataactccaaattgagaatgatttctagctctagtagtgatcatgatcatggtcattccaattataaagccaaaacgacaagtagtaccagtcttcttaacacggggaaacgcagcacacgacgtcgtttcgaggagtcagaatgcgccaatggggaaaatgggtatcagagataagagagccaaagaaaaaatcccgaatttggctcggcactttcccaaccgccgaaatggccgcccgggctcacgacgtcgccgctctcgccatcaagggcagttctgcccacctcaacttcccggagattgcgccggagcttccccgtccggccagctcctcccccaaggacatccaagccgccgctgcaaaagccgccgcctattgtactaataatttatctgcaacgacgtcgtctagtgaagacggtaatctaacgttgtcgtcaccggatagctcaacgacacacgaaacgtcgtcgtttaattcgacttcgccgttattggcagataacgttgacggtgacgatacatttttcgacctgcctgatcttttggtggacgttagtaatagtaaaaagcaaaacggtgagttttgtgcttactattcaccgtggccgttggatggagctgttgataatcacacggctctcattggttgctctaggctcattaatgatcaggattattctctgtcatgggattattagtaattaattagtggtcatgtttttccaaaatttccaaatttgggtgaatttcgggtttagagtaaattaattaattaattaaattaataataaagttgtcaactgatctctctagctagctaaagattttattttgtttttgttttaatttaataattatctctgttctgtgtatttctagaataataaagatgatctgaacttatatatatatatatatataatatttatataaattgtagtaaatattaaaccacgtcttgattataattagtagtatttttatggcttttcttgatcatgatatgaatgaagttaaatttttattgaaaaatatatcaccaataatactgctgtttttgtacggatcgaataaatcatcattatatttacatttgtactttacgtacaatcaaataattgttataagtttaccctacacaaaaaaaaaaaaaaattgttataagttcctacttaaattgagaatatatatatataacctttttcttcttattaatttgattatggtaaatcataggggtgttcatccgatccaatccgcacttttttagttcaaacaacatccaatccgcactaagtgcggatttcatattttggatccaatccgatccgcataagagtttaaatccaatccaatccaatccgcaatagtgcggattggatcggttattttggatcggtacttttt

SEQ ID NO: 377826 - DNA, 8154 bp, Cannabis indica
ttttttttaaaaaaattataaaccgatttattcgagttatgttgggtgggttggaataacattcaacccacccagtgtattttctttggaatttcattgaattattcggattgcagttttggtcgttattttaacaccctttataattattccgaagtagtctatgttgccactcggtcaattacaaacaaaacaatcgcaaaacgaatgatctagtcaaatgtatttatagggcatgctatactgctccacagtgacaaactaagagaaataggactacatgacatgctcagttaaaaatgtgacaccttggccattaattggggtctaaaccccttcatttgtttttcagttggtttaggagggtaaacttatgaatgttgttttcgtggtgtcttcaggatcgtaaacttactggaattcaggaaagcatccctgttgtagtaccttcgagaggaactcaatctgagccaccaaaaaaaagaaatcgatagtggtgtgtggtgaacttttgtaaggataattataggtatgacatatcatatatatatttatttttttgaaatagtaacttaatttagaatattaccattccaaactaactctttgtctaaccctaatgtttttctagcaatactgtgtactaccatatttgcatccctttttaacataagctagagatacattaggaaaaaaagacaatgagttgttaatacaattgataacatgattaacagcaaccctcttagaatctgtttttacattagtgatggacaactttattacttggcaccaaataagagagtatttgcagagcaagagcttcagcatttgttgaggaatatgtcccttgtaaatagttagccaaactagcaatggcttcccctttatgatttctaacagctgctctaacaacaaaagaattcttctgtttgtccatagctatacacattgagttttagacctccaatatttggtggctgccaaaaatgttgatctcttgttgaattcacttgtttattttcctgccatttgtttatttgaacctccttgtatgtaacctgcaaccttcctgcactggaataacattcttaccaaatatcattgcatctctattgttccagatcatccacaataaacagtgtttagaaatcaattcaaacgcatatagcagatattctttgatgtcattatttttgtgtttattatagaaggtttcatatggagaatggttccaaattttcctagctctagaacaatctaaaagtgaatgggtcatggtctcattacattggaataaccttcctgttaaagacatttagacttgatgggaggatatgacaataagatctccatgtgaaatgaccactattttagggggaatctcaaacactccaaagaaaggaccactattttatgatagggttagaagtggaagccgatggtggcaacgaagctgtgataagcagatttaacagtgaaattacccgaaggatcatagccccaaaataaagtataaggttggttagtgtttgacaggggagcagaaataattttttacactagctctttatgaaataataacttagtttctttaagtcccaaaagcccatattgtttatgaagaaggaaattgtgggagaaggggaattatcaaaagagttatatatgatgtatctagtatgagggatcaaatgatcttgaagagttctcatagtttgaccatccccatataaggatttgccaagtgaaagagggcaaatgatctttatttgcatcaaggaaactagagtgattgaaatatcttgctttaagaaggataggccaagattatttagctaacattactaggttaaaatggattggagatctaaatcattaacctccaaagaattttaagtgacaaaggtcaaaccaatattctagtgaactttagagctattaccgaaggttcctcaccaaaattttgccataagagattcagttttgctacttatatcaacatgaattctgaagcaagacgtagcataagaaggtaagacttgtatagcaacttttaaaagcatttctttaacaactttggaaaaggctttatcattccatgaattaagataagatttgactttatccaccaggaactgaaaagaggctttcttagaactcccatagcattggggctatagaaggcttatcatttagaatagcattggggctatagaaggcttatcatttagaccagggcaatgcaacaaaagactatgatcctcctcaagggtattaggataaaagagagttgaggatttgctaaaactaactagctgaccaaaggctttattgtaaatgttaatagcacccttaattgttaaacatgaaatcctagcaactagggtaaataacaaaataacaagtttttgtcaagaagatgagaaatagaaattctcataacatgacactgaccaattacatctctgtttggtttggtttacaaatcttgaggatgatattcctaatcatgttaatgaagagggtgaggtgaagagggagtagaggaggatatgaacatgaggaagttgaaattttcgacatgcatgtaatcataaatgactctattgataatttccttgaatttgataggactgcatctaaagattcatccttactatgggaacaacatttcccttacaagatgtgttattgtcctgagtcgcttaagtggtcagcatcagacgatgaatcaagttatcctcttgataaaaatggggcctcttctagcacagccaacaacgcgtcccgactggaattcctagcctcaccatgtgacagtgaaggaagcaatatcactattgcggatgagtagtacctttgtagcttatcagtttcatgaatctacatccaatcatgcgtatcattttaattcactagtttatgccaatccattttcattatcaaagactaaatatacactttaattatatatttatttttgattatgtaatagaatgtgcactttaatttccatgtgttttgtggggtatgcttcgtggttaggcaacaagatcctcttctcaatggattattgctctttacactaaatctcgcaaacgagacctttcaatcaaacacatgaaaatgtcttttacaatcctctaactcactcaatttctcatttaaattatcaatgcaacacactacacatggactagctagtatatatatagtgattggtaggctcacatagtacagaggtggtaattaacttaactatcaacttagtctgtttgaatgaattaaaaactaaacctaaaactttcatttattacacaatgatttaaagtaatacaaccactcttaacattatgctcatgcactgattattatcataacatcaaaagcaacacgagcaaataataattaagaagttttaatgatccaacatctttaaaagaaatagctcatgagatagtccatattgtttttagcaaataaaaaaaaaatagtcaatatcatgaaataggttataaggttattctaaaataaagtgttcaggtaggggtcgatctcatcttgacgatgatcgcattgtcatgttcccgtttgtgtttttaaggccttcattatgttgatctttttatccttcattattgcgaaacaaatatctactgagattttttttttgagagaatatctaccgagactttgattattggatttctaagaggagtgagtggttgtgatgatgtgctttgcttgatggtggtgcatccaacatgggcacattgccaaactttgcttgaaaatcttggttcatttcatcagacactacaacctttcgagaatttgtagggtggctaagtatagcaccgctagaaccaacatttcttgatcgaagtctaattgcaacaactttcacaactttcacaacttaagtaaaatataaagtaaaacctatgatgttattgtaataataaatatttgggtaggtataaacaacatccgctttccttttttagagagattctttcacaccacataattatatatttgtgagaagacacaaataattttaacaattgaaaaagtcaatctaagtactctttctttgttttaaaagtagtaataaattaaacttataattatgcagaatctactatctatccatcgggccttaaacttatgacatgcctatccacatctaccttaccaaaattcctaaggatgtacctattacacagagggaggattaataaataacagttaactcatatttaccaagtcaaacaagcaaatttacccttcattcagtccatttgagaacgtgaatctagaaactttgtatacaataattttgataggcttctcgagtctgaaaggtccaacaagtttttattgaaatttacaaactctataacgcttctaagcaccacttgtcctttcttggtttaatttttctatcttggacaccatcatcttcttaataatcatcaaggtcaacaaaattatgctgtacttccggctgaacgacctcagtctccttcccattcttcttaggttgtgcttcaattctctcatctttatcaagtacatcttcaggagtgatctgattcacatttgaagccacatccttattgttgtcttttttcttctattgattggttacattttgcttgggtttttggccagttggagtttgatcatttttaacatccttctcctcctctaggtccaccaagcttgggctttagacagattgttcatcgtcaattgattggtcaccctcttgcaaagagacttcagtcttcaacttatcacccttttacaaagagagttcaccctccattttgtcaccttctttggaaggcttctcagtagaagaaactccaccagagttcactaacttaaccacttacctcaacattgctttcatagcttttatctcacacctcaactctttcagtccttcattgttatgggatttttctcgcccaaacaacacaaaatgttgtgcgaggcaaatcccttatgcaagatctgaaaccagaagttattatggcatccttctactctagcatcaattgcttagggattcaaaatgcacaaattaagcaagttatgagaaacaaatagaggtgaaaataggatatataggaccaaccttcaaagttggagtcggaaccttcaaaaatttccatggcaaagtccaagaagtcctcacttcctaaaaagttattatattcgaagaagccaagacaatacataaaatgagttgggctctctattgttttgtctactcgaagcaagtatctcctctcctaatagggtactaggaatgatctaacctaaggaagtagaaatcgaactcatcttgtttgatatggtcaaaatccactggatagggagcatgaattaaatggaacaaggtgttaccttgtctgtaagtgctgccccctagaattttctcgttaggaagtacgttagcaaactgcttcgcaaacctcacgacctcactcagtatcttttgatcctctttgagctccgccatctaaagattgtctttttgcacaaccttctttacttcatccacgacgatatctacaataccttataggacctctcaagttcagaaattattccctaaaaactcggaggatcaatattttggtagttagctattagtccaacttcttagagcttggaagtggtaattaattgtccaacatccaacttctcccaggacaaaccacactaaactttgcgttggttttccaactaggtagttgactgtggccgacaacaaaaacctgtgaaacaggaggaagtgaaataatcgagttcaaatgttttctaatcccagaggattggtaatgaaggggtctagaaatgataaattgaagacaaaaagtttgtacttactcactctctagaagtcgagaagaaaggttggctttctattcaaagggaacccgtaagtgaagaactagtattcctaaacatttgactagtgggacatttgactttgttcctcttcttcaaacagtagaagccatctttgattttatccttcttgcttgggatagattccaactgatagaagaatatgatttctttagaagtaggtttctctttctcttgttccttataaaaaataaaccatcccgccaagagtttgtagctttgcaggattctatgactactaagaaacccgcaaagtagtccctgaggaaaaaatgggctctagcagcaatgtggcccacactccatgcaccaaaactgtccacactgacactgacagtttctgccctcttggaatgcttattccagaataggcaggggtattctggaagccaaatttttcttccaggtccaccaacatcatgtagttgcgaaacttattcgggatgctattcatctcccatgacatgtcctcttcatggtcctcctccactggcgtcggctcattactgccgtcttggatcaagctgttgttttggttttcttccaacatagtaaaatctgaaaaaaatagacaccaatcagttacccaaactaagcaaaatagtaagggtaagagagagtcttccctgataactgcttagagaggtccttgttggaccctacatttggaagcaaattccttagagaaaactcccaaattaaagattaggaacacaactaaagaatacaaaatagaggcactattctctggcaatgaaagggtcctggatagattaccaggttacaacaagatccttagggaatttgccaaaactcctagagccgacaatcatgcaaaacccagaaactttgaaaattccaaatttatcaaattttctacacatggtaatgttcttaaatcggtagcaatcctatgagtctttacgctctcatctaaatgaacatagaaactgccctaaatagtggagcatgcaacttttgatcaaatggtgaatacccagtaaaaaatcccaaatgtatggcatattgacataaacccattatccttaaacttactcaagcaaacagaaatggtagatattcggagaactgagtacttattttttatgccaaaaattaagggtgttggtttttgggtggctggagaaattttcacctcaatatctcagagcttcttcgaaagcttgttgaagtctttttggaagtttgatgaaggccattccaaagcgacaatgaacggagcagcgctcagaaataatttttggcaaaattgtagtaatttattgacaagctcagagttgatatctatttgcttacttaaattttcataagtacgtacataattgataaaaataagtatttggtttgagaaaagaaaaaattttggtctgaggtcaactgtacaataatcgatttaaattgcttgttcaacaatactcatcccttgtttaacgaattgcttctttaaaaagtatcttgctcctcgtgaatcccttttctttctttttattctagtaaaaagtattatgcggtctgtccattagttcttctcttacatatgtatgaaacaccatctaatatggtttggaggcttattaataaggtaaaataaatcattataatatgttcttatcaattcttggcttggctagctcactataacccaattttcattctacttaaaattatttatacagaataggatgaaggttaatcattaatcattatcaactaattattagttacaatacatattattgtataataaattaattaaatgaataatcatataaaaatctaaataaatttatttttttatatataaaaatattattaataataataaaaaaggagctatcaacttattgtgaatggcactttacattacggaaaatatatattataacaaatcctatgtgtcttatattttgttttccatgtcttatttattaaatatttttggtcatgaagtaaaccatcatgatctcttgattatttttaaatacattactacatatacttattgattgacagtacttttcctaccctatttaaaggtgcaatttcttgcatgttaaccatatagaacaattaattcattcccaaaaatgggtatccatagggttactataataagtgttgttttgtttgttttattgggtttggtaattggtacttatgcctctagagctctctttgata

SEQ ID NO: 377827 - DNA, 2174 bp, Cannabis indica
ttcgtattatgaaatgctgcctgtttcagccttaaattatagagggcaccttctttctcccatcttctatttgcaaatgacagtatgttgttcgtcccggtttcctctcaatcatctgaagctatcaatgctaatcttctgctgtatcatcaagcttctggtcaattggtgaatagggataaatcttccattcttttttccccaaacacctctcttgactctcaatcaaggtttaggaattctttgcttctaaatggtgaaggctttattagtaaatatcttggtgtccctcattgtgtgggcagggttaacaattctgtctttcattaccttatttagaaagtctcatcaaagcttaatttgtggaatgaaatttttttctctcgagctggcaaagaaactcttataaaatcagtcattcaggccatcccttcttttgttgtgtcctgttttaggctccctaaatcaacctatgctacaattcaacgtttgacctctaaattttggtggggctctaactctaataagaggaaaattcattggaggaattggtctactctttctgtctctaaattcttagggggtctgggatttcgttctctaattcatcataatcaagctctcttggctaaacaggcttggcggatctggtctaatcctgactccttattgtactcattgctaaaagcccgttactttaagcatactgattttctcaatgccccaaatggctacaactcttctttcacttggagaagccttctctggggtcgtcagcttctcaagaaagggcttatctggaaaattagttcaggccgtgatattcgtatctctgcccctaactggattccccaaatctcccatcctaccatcctctacccaattgatccttccttatccactgtttccttttttgttaatcctgacaggacctggaatgttgaaaaattgaagcactttcttcctgtgtatcaagctaatgttgtactcaaaattcctttggaccttggacttagtgattctctcatttggggttttcatcattctggcattctcactgtcaattctgcctatcatcttgccacatccactgccatcacaagctctccctcttcctcagatcctaacccttttaaggattggtggaaaaccctctggaccttaaatctccctcctaagattaaatattttacctggaaggcttttaaccatctcttaccttgtgctttaaacttattccataagcatgttattccacacccatattgctcttcttgtgggggaagtgcggagtccatctctcatgcacttgttgattgtaccagagcgaagtaaatatggcaacactcaaaattcaaacagtttcatgatgattgtcgaaggctggatataagagatttttatcttcaaagtctctctttaattcaaagggatgatctccctttgctatttggtttactttggcaaatatggaacataaggaattctgctctctttcaaaagtcgtgtgtaactcataatgtgcaagattttgttttaagttatttgcaggaataccaggacgctcaacatctctccactgcatcaccttcgtcaaagcccccctcctcacctgagctggatcaactccttcacgaagatactcctgccttatttatggatgctgctttaaaccccaaagaagctgccactggtcttggtctggttttcacgcacggtctgtctcacattctcaaatctgtgaagatttataagtctggagcttctactccaatttttgctgaagctcaagcgctttacgaaggaatccaatggtgtatgtcttcccagttgaacccaagattcatcttctctgattgtcttaatctggtcactaaggtcaatggtagttggcaagactactcatccttatccactcttattcagaagataagattctccctctccagtttccctgaggcttctttgctgcatttaccgcaccaacttaataacaatgctcattctctggcaaaagcagctttcaggttgcgagatgaagacttggaggattcgttttagtctcctctttcggctgtcttggttcttttgttctatttctttgtaacagcctcatgtttatcaaaaaaaaacatatattagttcacattccatgaagtgagttaatattaaat

SEQ ID NO: 377828 - DNA, 4450 bp, Cannabis indica
tataatagttcacgtagtgaaacatttgcctaagaaagtgatactaggggatcattatactacatgtgaatgtatgcaatcaaaccagcaatgttggtgtacaaataatatgttcttgtccaaaaaaatctatttgggaagcttatgtgacaacgagtcattagcctattttctatctacttccaggaattagaaactatagggtaaaaacctgtaagtatattttgattatacaataattaatattttttgataaaaataaatttaatatttaattaaaggaataagaaagaataaatgaatagagtgaatcccgccaaacagcgaaatagagatccttcattatataggcaaagccattacattactggctgagtgagtggctggcatatctcttaaaaaattgctaaaaatattttttaaaattaataattggaattattattattatattttctcttttgctataaaaaattacttgaatactttccactctgatttcatcttcaccaccaatctttcaattcattctactctagctcaggagaattccagaaaagatggcgagatgcgagagaagggttttgttgctatgcggggattacatggaagattacgaagctatggtcccttttcaagctttacaggcttacggtgtcgccgtcgacgccgtctgccccggcaagaaagccggtgatgtctgtcgcactgccatccatgactcttgtggtcaccaggtccgtttttctcacccccatttttggtctatggaatgctagtaatagtatcgtgaactagtttaaagctaggtgttaaggtaagaggcagggtaatttgatatttcaagataattgaactctataataggaaaggtaataaacaaggttcgggttttgttattgagcaatttttttacaggataggcttgtgtgtgcgcctagtttgctaaggtcaatttattctttattgaagaagaatcaagtgctcttggtttcctttttgtgagttttgttttggccaaatttagacaggtctatacggtttttattttaagtatcaaaactgtgattttgtagctacattacttgagtctttgcagattttattaatatgttatactgcgtgctttgtagctatgtcacaattatttggggtgtcaacatatatagatagtcacaatcacacttaggattttgtagctgtatttcatatttcaataatagctgtatgcaaagttggatatcttattgttgatgcgaacttttattttatgagagttttttttttgttaagcacttagttggtttgtaacagtcaagactgcagatttacagttcagactacttatttcctgacaatcatcaaagctttaatctgattatagaaacttgtttaaacctgttaagtaaaagtggaattgatactatctgttttatggaaatcgccctcttctcacagattctatagtatatttaaagttttcttcatggactgatgagagaagttactacctaccatgtgagaaagagctgaaagattctgtttgtctactgggaaagtattgttgtagattggaaaaaaacattaacagatatgttaatatccttccttagtttttttatattgattcattcttctttgttgcagacttattatgaatcaaaaggtcacaattttgcgctcaatgcaagttttgatgacattgaatttagtaagtatgatggattggtgataccaggaggacgagctccagaatatcttgccatggattcatcagtaattgacttggtgaacaaattttctatttcaaaaaagccaattgcctctatttgccatggacaactgatcttagcagctgctgggttggctaaaggtctgaaatgcacagcttaccatgcagtaggacctgcccttgttgctgcaggtgctcattgggtagaaccagagtccatcaaggcatgtgtcattgatggtcatcatatcactggggtcacttatgaaagccatccagagttcattagactttttgtgaaggctttaggaggcaatataagtggttcaaataaaagaattttattcctctgtggggtattatttctatttattttattttttttgatgaatttatttctattactttgcgctgcgctgctattgcatttatacgtatattagttattctttctactggaaatgcattgggtttccgcgggtacttgtgttttccctcttgtatgggaatggtctgatggttcatgtacaaatcaatgactatctattaaatggttaagcttttccttaaatagatataggtaggtgcttttcatttcagtcaaacttgcaatttcagtatgtcattgttactgaccgtgacttgctttcttccattcatttcaggattacatggaagattacgaggttaaagttcctttccagtctcttgaagctctagggtgccatgttgatgcagtttgccctagaaagaaagctggcgatacctgtccaactgctgtgcatgattttgaaggtgatcaaacatacagtgaaaagccaggccataatttacgttgacggctaattttgaaggtttagatgcatcaagttatgatgcccttgtcattcccggaggtcgagctccagagtatctagcattggataagacagtcattgacatagtgaagcactttatggagaccaataagcctgttgcatccatctgccatggccagcagattttatcggccgcaggtgtcctgcaggtatgcataattctctaacaatgaattcacttattaacttgttaatagttatatattttttctatgtagcgtggtggtataaattaaaaagaatgtcagaaccattacattctataaaagtgcagaaattaattgacatgcttgttttggatatcctttgagatttcgcataaaacatagaacttatgtgttgtgaattttactcttttggttgcacagactctaatctagaaatgaccttatagcttccacattgtgacaattctaatattatgtctttctttgctgtatttgtaggggaggaaatgcactgcatacccagctgtaaaacttaacgtggttttaggaggagcaacttggctggaacctgatccgatcgatcgttgcttcacagatggaaatttggtcactggagcagcttggccagggcaccctcagttcgttgctcagttgatggcattgcttggcattcaagtaacattttaattcccaattgtcatttgggccgtctttatctggtaatatgtacatctatacagaataatgatgtatttaggttgaggttattgtctgtgtatgaataaatgagactatgacactgtttttgtatgccaagaataaatgatattttcaccttgttttttttttagcaaaaatatgttacggtttaccataacactgttgggaatatttttgcctcaatagaaaacaaaccaacaagtttacaagtctatgacaagaaatataagaacacaataacctgagattaaataaggttacaactcaattgcaaaatacacataaaatggagaatatggaaatgaaaagaaagtttacaactcaaaactattagcaacaaatacaacacagtatataaatagtatatatatgaatatataggagatgtgaaacaatctcaacactagtgtataataagggtattactaaatttgaacaatgttttacatttttgtccaaaaacttattactatagaatttctagcaaggtgctttcttgataaaaacaagttatctcaaaatgaaactgttaggtccctatttatagtatttaggaagaatctaactttgaaattcaaatctcattcacctaaggctgttaccagtcgtgtatgagagttttaaggatcagaagaatgttggagtgaaatgtggaagcgtctcccattgactgctttcagttacacaacgttatattcaaaccctccaaatatgttgactaccacatgcatcatttgggcgacatgtcgcctgattcatattttcagctccaatttggagttttgaatctcctttctgagatgttctccaatccatcgttcacatgtgaaaatgaataatcatttgaccgtttctaatggctataaacttctctcacatgctttcataattttcaaatgtaattaaccttttaattacatattatcaaagtttgattcatatgttacaatcttaatttagaatgtaactcctctaatgttacattttatgtgttttattatactatatacttataatataacctctaatatataatatatatttcatctcaaaaaacatataatatatatattaattttatattaatatataatagggaaatttgacatttaatgctaaaaggttagacatggttttaaaatattccttctcactatacattttttaactat

SEQ ID NO: 377829 - DNA, 3884 bp, Cannabis indica
ttttttttttttactatttttcagttagcagagtcagcaaaagctcagttctcagctcgtgagtacagtgatcatctggcactggttcgcgcctatgagggttggaaagaagctgaaagagagcaatctggttatgagtattgctggcgaaattttctttctgcacaaactttaaaagcaattgactctcttcggaaacagttcttttatttgctgaaggatactggtctggttgatcgcgatagagaaagctgtaacacatggagccatgatgagcatcttatccgtgcaatcatttgtgcaggcttgttccctgggttatgctctgttatggtaagttgagttgcatgtgtttgatcttgtatggctttgttcagagtgtataaaataaagttgtctctctttctttgtcatttaacttgctgcgctcctctagtttgttcttatgtaacttaaatcactgtacacaaaagttccaatgtgaattttatgttgggaattgtcataatgaaatttatgtaaattgtcactgtttttattactattttgtatttcccatctgttttgatggtggatgttttcttcatgggagtacatatatataatggttttttttttttatttttcacagaacaaagaaagatcaatagtgctaaagacaatggaggatggccaagtgcttttatattcggtaagttttgttgtcttctactaattatatggtttatatgttcttacatatggttgtatgtgagtggatgtgtttactgactgttaaacacgatacaatttcttattttttctgtgttaaataatgaacttccatcaaatagaattctgtgaatgctggggtaccgaagataccatatccatggttagttttcaatgaaaaggtgaaagtaaactcggttttcctccgagattcaactgccgtctctgattctgtgcttcttctatttggagggagcatcactaggggtggcctagtacgttccctagctttgtttctacatttactccaattattaaatgttcttttgctcatacacaatattaatactacacttgatttaataggatgggcatctaaaaatgttaggaggatacttggaattttttatgaaacctgccctagcggaaacatacatctatctgaagaaggagctcgatgaacttattcagatgaaggtatgttgaattctttcttttttttttcccctccttattatatgatatacatacatacacggggacttgaacccgaaccacttacaaaagtgcagacccatccaacctctcgtgacagcattaattaatagctgactattttctattctatatcattcttatggttctttgcatttgtgtcacgacgttaatgtgttgatgttttccatctatgcagctcctggatccaaagctagatatacaatctcatcctgagctcctttctgctttgagattactggtttcaggggaccaatgtgagggaaaattcgtctttggtcgccagataccaacccctaaaaaggcaaaaaaagagataccacctgttgtaaaaggaagtaacaatggttcgggtggtaataattccaaaaatcatctgcagacattgttagccagagctggacatgaatcacccacttacaagacaaaacaattgaaaaataatcagttccgttcaactgtcatcttcaatgggttagattttgcggggagtccttgcagcagtaagaaacttgcggagaaagatgcagcctcccaggctttgctatggttacagggggagaaccattcctcctcctcaaatgtggatcacatgtcgatgctcttgaagaagaccagcaaaaagaaaagtcagaataggaagtcttttcaagatgccaagtggggctaaatgttaaatggaagaaaataagaatggtcaaagaatgatacgatatacttgatccttgatactatatgcttgagattactggtttcaggggaccaatgtgagggaaattcgtctttgtcaaattggttcaggtaatgctgatggtagctgcagccataagatggcaagcaaatcaaacccttgtgtttgtttgctaggtttgaattgcattacattcttcaagagggtataggaatcagtattatttggggggaaagagatgatatactaccatctttgccggcagaagatggagaatctttttatcacttcccgttgaagtcgcatacttttgacattttgtttttcagttgcatggggtgagggatcgattgattttcttactgtattaggtagcttcttaactttagtatatagtaataatattaggtggcgttacttggaggtaatgaaatggaaatggaaaagaagtgattttcattctatttttttttgtttggctgcatattatttcaatagaaggttttttctaccattttggtggaatgactattttattttgaaatggaaggagatattattttgatgtaatataagaaaaaattaattaatttttttatacattttaaattttattctatttaatttctatttttattcttttcttattcttatacttttatttctcccattctattcttatggttttatttttattttcacgctaacaaaaaccatgtactcatcattatagttatgatctttttctggttatttataactttgtatgatatcataaaccatttgatttgatggatcttccaacaatactaattttcttatttattatagtcatttcggttattgttaggattttttttttctttgattaaacaataatatttaatattgagaatattaaatgattaatgatgaacttgtggtctccaggatcttaaacttcattatgtggagggtcttgttcatataacttagcctgaatagttgaatgaaatatgacgtctataagagttatagaatatagcatttacttttactgcaagtaggagattattgagacatgccacatcatagtcaaaactgagaacacgtggaatacaacttgttaataataggacgaagttaccttacacggcatgtcagtagtcaagggttctaaagcaaccaagcaaaaaaagttaagcaggccattaagaccttggccgaccatgtgtagccggctaaaggaagcatgtctggccgaccaagggaagcttgtaggctaggtcttgagaacaagcttgttgaccaagaatgcctgttagaccaaagaggcctgttcaaccaaggaggcccgacctttacaaggaaatctaaacaacgtggaaaaggctggtcgaaccatacccgaccggcccatggaaggtcacaagccagtagggccctaaaaataggattggccggtcaacttgtgtaaacaactctgaacaggttaacgaattgcgggataggtccaacagtttacaaaaatagggatatacccttaatatattagtcatataatatagggatttaactatcctttttggtagtttaaataatagataaaaagatgttaatatccctatttaaagggatatctttacctatttgaattaggatctcttgtaagccctacactatataaagggaatcagatcactttctcaaacctaagtcattctacatggactaaagagtctccataagtcctctctctctgaatcatcacatttcaccaatgcctcctagacactaagtcaagtatcttcttaagtccttcacaagatctcaccagccttatttgtaacactttgttctcacaattgtaatactgaaaagaaccacaactagaaattataaggttttcacctatgctctgcatggtattatctcaaaagtgaatacaaaaaaggggagtaggttattactgttggaaatattttac

SEQ ID NO: 377830 - DNA, 3375 bp, Cannabis indica
gaatttataattattggtttattctatatattagtttacaaggtatccttttttttagcagtataatattatcattattatttctattgtcaaagctacattaactaaatatgtagagtaataaatgtgcatctacatattattttttgagagagcatttacatattattttagtatagaaagtatgtgcaaaaattattactcaatttatatggtgaagtatatgtagatttttttttcttctcaatattcatattatcttttaataattgccatatatattgctaaactgaaataaaaataatttcaacgtatttttgtcgtttaataaataagtataatattctatgagtggaaaggaaattgagaatccttacacttctggcaactatatataaaaattacaaatagaaggtgaaggtgaatagaggaaagatgtaaagaaacgttacaattcaaattaaagaacaacaatacatataaatagaaaacataacaagtatatgaaaaagaataagtgatggatgtgaaagaagaaagaacaaacttttacactttacacaatttgatcgccatttgttctatcgtaaaaaagtggatatgaagaagaatcaacaaacttttgcacttattttatcgtcattttttaatcctgaaaagaggaggggctactaggtgcgactctcctttttgggtgtaactataagagttccaatgttcaccaagaccctatgtggtgggtctcctccatttacgtccgacatatgagccccaactgaatattaagtgcatgtctgagtacccctgaaatagatgttaaaagtgactaaactagtaaatattgtcctttattaagactcccaaaactaaaggagccacccaaattcgaaatcatgacctttagcttagaaaactacttgtgagtaagcactttgttactaaaccatttaaatgaatgaagtttaagatctcagcggctcagcccaaaaatttattttcccctataatctaaacactaaaggatattatcaatagaaacaactctataaaatttagttttttggtaaatttctaaccaagtgttttgtggataaaaagtagtgtctttagataagatacctatttataggttttagttaaattctttgaatttcatttttcaccaatctcatgattgattaccacacttaggtaggatgtttatgaggttaaacaaaaatattttgcagttacaaatttttcgtttcgagacactttttagtagctcctaactgaagttgaaaaattataatatgagatatatcagtaacatatacttgtgatatatcgcctagaactattgtattatttttctacttttggtttctagaagctgaattgttttaatattggtcccaataaatttcttaactagcttccgaacacattttagcaatccattaattctccataacacttgtaacttttcttttttgtaattgtaaaaattaggtaaatttgaggaagttacaaaatggtaaccaaatttttatacacctcacatttatgttacatgatttgagaaaattatttattttgttacattttatatttaatctatattatataattgaataaataatataacatttaagacttaaataaatgcttcccacattgataagacacaatttttatactaaggttacaatttgtatataggacccaaaatcgtatcatttggacttattgttatattttataataattaaattagtataaaatatatagtaaataagaagattgtaaccgcagctgaagtaatttgattaagaaaaagaaaatgtaattaattaaacaaagggtccatagttgtaattgaagaaaagataagggaaagcatggaaataatggaagtgtaaacgttgaagtttaacggaagatgtctgtctgtaaatgtaatatagtgtggattttattttattttaattaattttttgaaaattataaataaaaacataataataaaacttggaaggaagtcaccatctttcatcgtctcctttgtaactttcttacacgagaggatagccaagcttctctctcttttcatctcacaccaaatatataatataaagcccattttagatgcaaattcttttcctcattcatatcctctcttctctgttttgatacatagctttcatttctacatacatataaatatataatctaattgaacaaacagaaacagtaattactaattggaaaagcaataaaaaagaaaagaaaaaagagggcctctcgccctctaatcttattatgcctcttctcagatcttagattctcatcatttcccatctgggttctcttcatttggtaaattttcattagaaatgcttcgtttttcatagaaaaaagcttctggggatctggatcttcttttaatccaagcatcaatttttgtttttatttttttcttctgttttgttctttctttacaggaatcctaggattgattgtgggtcgatcagtaatagttttgtgaagcctctgatgtttctagattgaatcctaggatacccattctcatatctaactaagaagactatcattcccagtttcgtttgaattatcttttaaggtgcaatattgttgattaatccgcgttaccagaactttccatgtgttagtcagtctagtcttctaaggcaacatatcaaatactgtattccttagagaatcgggaaagggtacctctgattatgtttccttacgtaattctcatctacttacgtgctgccgattagatccggtgtatattactttgttgttgatttataattatattgattgtgtgttgttgtttttcttgagcagaatggaaatggaacctggcaagctctttgttggtggtatatcttgggacacaaatgaagaccgtctcagagagtatttccaggcttttggagacgtagttgaagcggtgattatgaaggatcgagctaccggccgtgctcgtggatttggttttattgtttttgccgaccctgctgttgcagagaaagttgttgtagagaaacacgtgatagatggtagaattgtaagttttttctgctttgaatcgtatcttcctctcttcaaagtttcaaaatttatagattacaatgatactgttttattggtttgcatatcatttggaatatatatgatcgtatttggtgtacaagtttcttatatttccaactctcaaacgctaaggtaatcaactttgatttgttgtatgtcattgttgagaaaagagcaatgcatctttacatatgtgtgtacacgtatcatatgcatactctaatttaaatagaaaaaatgaggctggtgtcttagcaccagattact

SEQ ID NO: 377831 - DNA, 12067 bp, Cannabis indica
acgtacatttaaaagaaaaataaaataaaataatgactgtcatttgggcctgccgtccctacctttatcaatcttcaaagttagagccttaaattgacaaataagattttttttaaaaaaaagttacgaaatgttttccagttacaattttattgttccaaatgataagcacttttctttcaaaaaaaaatatatatggaacttaagctttggataattttaaaaaagtgaggaagaaaaagatatgtttaatgtatgaattgctccctaagctttatactaaagtcaacgcggtttttagcaatatatataaataaatatatatatagatatattttaccaacacagtccagcaaagtattaattgtttggaggatgacttgtgagatttaccaaactagacacgcagttaacagttgtcaaatagtcaaaagtcaaatccttctcatacgcatgaaatctctgtccttccccaatttccgataccataaataaaaaatcaataatttccatcaaaggaaaaaaaataataaatcaatatttttaagggatttttaattttggtgattaaaataaaattcaactaatgctgactcgacgagggcattttgggaatatcgttgatgagtctagctttcaataccgtgtggatcatcttctcccttacgagcatgcaaacgacgtcgttttaatgcagataaatcatgcagccacgtagaatcggaaggtctccaataaatcaaggaaagtggaaattaattaaataataaaatttctgccaatttttgttttaataatgaatatatagatcaatcattatgataatggatgtcagccttttccaatcccaatcctcacacaaacaagaacagtacagagaataacagatatatttgtattagtttaattgcttattttgtttctctgtgcataataataatggcgaagcatattcaaatacgggaatttgacgatgacgatgattgagagtcgaggtgtattggtatcgaatcattaaagaatcgctttctgggttgggtttattttacaattttgtttcaactacttctttctttcggtgtatgaatcacggtttcgatagcgggcacgtggcggtaatatacagtgaccctttttgtccttcactcgatctgattcgccggtgtggtttgactcgtaccatatggtaatttcgattggattattgaataagcaaaaattgttttctatttggattcttctattgttttggtgttcgtaaaataaattgggtttttaggtccaattaaaatctctgcagttgggttttaattttatattgtatttattattgcttttgaatgtttggtcatcgagaatttaaagggtactgacgcgttggagtgattaaagatagattctttgaagttgggtcgtaggaaaaattaaaacgaccttgtagtctcagttatgtgttttttgagtggtcgtgagttctagtcttctgaacattcaagaatttattaggaagaaactttaggattggttctgcagttttaagctgattttcttctttttgtttgatccagcgtaaggggatttttggcatatggactgagattcaacatcagctctcgaggtacggaatgtttttattaattttgttctaaatgatgagaaggagttggttttggggttgaaatttaggagcaatatgagctcccttgttgttttcagaagttgggttctgatgggtgtcaattattagaaaaaaaaaaaaattaaaagcttaggccttttgaagtttttggtgtggttgggattatttgttttttgggttttggtgcaaagatatggcttgctaggaattgtatatgagcctatcataatgcccggagctgtgaggttgtttttacatggaaattgctcacaagtcattgtgtcagctggttggcatggtgaagtcatggatctctggacgatctgagccgactaatgtgtcaagggacttttggatgcctgatgaaagctgtagagtatgctacgagtgtgatacacaatttacattgttcaatcgaagacaccattgtcgactttgtggtcgggttttctgtggcaagtgtacagaaaactcgattcctgtcccatctgattatccaactacatccctggaagagcaggatagaatccgagtgtgtaattattgttacaagcaatgggagcagggtatggttactcttgataatgggatccagagacccaatcacggacttagtacatcacaatcaggattaagtctaggcagcactagatcaagtgaaaccggtaatagtagtatcaatactcctagctccatgccattctcatttggatcttatcagcaagctcaacattgttctggtctcagttctccaccaacatcttttttggaaacaaacacagaggagaaaagcaaaggagaacaaggaaggagtagtgaactttgcaacgatacaggggatctaccttcagatcaacagagaatttcaatgaacaggttggttatttattttctgtgcatattttggagttcttgttataggccttccctacaggttggttgtttgtaatgtctcatatgaaaactgtttttaccaactgcatgcttgaggctgagatggtaatggtttttaacaaattgtgccagaggagctccaactctactgatatacgtttgtgttacataaaacatagcttgtaatcatttttagtcatgtagaagtgacatctcttaaacctaatcatcttgcagtaagtacttattactgtctgatggatgttgtagaagattaataatacagtgaaaagataggtgttgcatttgcagtactatatatttatatcttgcttcttatattgtcatttttcgaccttaatttttatatcgctttctttatctgttgcattaggagtgaggatgaggattatgagtacgacatgtatcggatggattctgaatctatgcattatccttcagtcagtgactactacaatcaagttgagtatgaagccatgaacaatgatgatggaatgcatagagtgcatcctgatagcgagaacattgattcaacgagtttgagctgctccccattagaaaaccaaaattttgaatcacatggcctggaaaatattttaaagctgaggaataaagaggatgaacatgatatgggcgatgaaggcgaagcgtcttcctccctgtatgttgctggtggtgatgttgatgctgaacctgtagattttgagaacaatggactcctctggcttccccctgcaccagaagatgaagaagatgatgaagatgaaaaggaaactggtctgtttgatgacgatgatgacgatgacggtgatgatgtcaatgctacaggagagtggggatatttgcgctcaaatagttttggaagtggggagtctcgcaatagggatcgctcaaatgaagagcataagaaggccatgaagaatgtggttgatgggcatttcagggccttggtagctcaactattgcaggtagagaaccttcctgtgggtgaagaagatgacatacagagttggttggagatcattacatctctatcttgggaggctgctacactattaaagccagatatgagtaaaggtggggggatggacccgggaggatatgtcaaagtaaaatgtatagcttctggacatcgttgtgagaggtaattcaatgtgttacgtacattctaattctgtgattttgccatacatcatctggtttctcatgattgctgcaattcgctctttcattgaataaatactatgagtgctcatagaatgccagccaaggtttttgatgaaatatcataacttgtcatacgcgaggaccatcactagggaactttcgtccacttcatatattatttgtattccatttatttatttgttttattttttattctgattctgacagtaatgttgtttttctagtatggtgatcaaaggagttgtttgtaagaaaaatgtggctcaccggcgaatgacaacaaaagttaagaaggctcgtattttgatccttggaggggctcttgagtaccagcgggtttctaaccacctgtcaagttttgacactctcttacagcaggttaggattgtgtggccttttttaacttctgtagtttgtcacttgctggttgatagttttttttttaaaaaaacagatttttctggtggctccatattaatatagtatatgtttttggcttattatctaggaaatggaccacttaaagatggcagtggcaaagatagatgctcatcagcctgatgttcttctagtggagaaatcagtttctagatttgctcaggagtatcttcttgcaaaggacatatcacttgttcttaatataaaaaagccacttttagagcgcatagctcgttgcactggtgctcaaatagtttcttctattgatcatctctcatcacagaaattgggctcctgtgaagcattccatgttgagaggtttcttgaagacttaggcactgctgggcagggtgggaaaaaattggttaagacgctgatgttttttgaaggctgcccgaagcctttgggttgtacggtatgtctttgaattaaccaaatatttggatgtgcttattttaggaaggattattgaactaaacaggcttcccgaagcagtactttcattcatactgtattcatgttctttcttgtctccatttcagattctactaagaggtgctaatggtgatgagttgaaaaaaatcaagcatgtcatccagtatggaatatttgcagcgtatcacttggctttggagacatcttttcttgctgatgaaggagcaaccctgcctgaattctcattgaactctccaattactgtgacacttccagcagataaagcaacaatcatggagaggtccatctcaactgtaccttattccaatgtcagtgttggtgcaaattctgtggcacataatagatccaacagtgtgcctgcatctgatatatcctcatatataagcactacacaatcttttgacagttttcgtagttccatacccactaattacacaagtttgaccaatactgtatcttcatcctcatctgctctaactgggacagcagtttcagattggaatcccaggaatctttctcctcttgatacgtttggagagaaaaacaaaacgtattttatggaaccgccgcaggttttggaaccttcaacagtcaacaatagcatctctttgatgtgtaacaattccactgtgataactgacaatgtgacagggagtgtggagataccattggaacaagatggaagaatctatatagaagatgattttgatacaataaaggatgagtacgctccatcaccttctgagcatcagagcattttagtgtctttatcatcccggtgcatctggaagggaactgtctgtgagaggtcccatctatttcgaataaaatactatggaagttctgataagcctctgggaaggtttctccgtgaccatttatttgatcaggtgagttcctttttctttctatgctttctctctttgtgtagacccttcagctgtaagttttgacactgagaatcatatcattattcccagagttaccagtgccagtcttgtgagatgccatcagaagcacatgttcaatgttatactcatcgacagggcactctaaccatatcggtcaagaagctaccagaaatgttattgcctggtgaaaaggaaggcaagatctggatgtggcatagatgcttacgttgtccaaggatcaatggctttcctccagcaactaggagaataataatgtcagatgctgcctggggtttatcatttgggaagtttttggagctgagtttttcaaatcatgcagctgcaagcagggtggcaagctgtggccattctttacatagagattgtctccggttctatgggtaatactcttcacttttcataatatgctgtctctaaaaccaggctcttcctgatgtcatttctagtaatattattagcatagaggtttatttgtaccatttgattcatagactcctctatgtataccaatgcagttttggaaaaatggttgcttgcttccgctatgcagcaatcaatgtcctctctgtctttcttccaccccaaaaattggattttagcaatgagaatcaggagtggattcagaaagaaactgataaggtaaaatgatcaaacttttacttattctagattgaaaactaaattagtatgactaattgtgactcaaattaccttgttaataggctgttgatcgagctgagcttctcttttctgaagttctaaatgctctaagtcaaatagaagagaaaagatctggtccaggaatgcatggcagtggcataaaaatggctgaatcaagacgtcaaactatagaaatggaaggaatcctacagaaggaaaaagaagaatttgaggttggctttaatttatgttattttgaagctttagttccagaaatttcatgtcatgggcactatgacaagcattctattaagtatgaaatactaaatagcctaactaccattgtttcatatttgttttgatgacttgttgaatgttgaattagcaataacccaagaatagtagatgtctttgatttagaatttttcacttcctatagttttttactgtgtaagatgaatgtggttgctgtgatggtgagaattcaaaacacttaaatgtgccgaacatttaaaatcatgacaaacttaaggaattcaatatatgaatgttgattttgttcaacaacaaaaaatatatatgaatgttgactttgcttgaatatttgagattaatgtttcctcctacatgaacacaaggattcagaatttgatctcagatattttacctcgtttcttttccatggatgttttttcaggaacttctcctaaaaactgtaaacaaggatgggaaaaagggccatcctgctactgacatccttgagatcaatcggctgcggaggcagttgctttttcagtcttttgtgtgggaccaccgcctggttcaggcagagaaatcggatggtaacggtctcaaagatggtctgagtcgttcagtttctgagcatgaggggaaaattgttgctaatggtgaaaatatatctgacatgaatgtggccgttatgccagggaaaggctataatagctgtgattcctttctggttgaaggaaaaattggcaagaccgtaaattatcctgtaggatttagtagcaatgctgatcaacccaactttgttcatgaagaaccaagtaacgaaaaagaagagaattccaatgtttctccttccacaaacctccttaatcaagaaccaagtaatgaaagagaagacaaatccaatgctcgtaggacgctttcagaaggagaattttctatcaacacaaatttgtctgatacccttgatgctgcatggataggtgaaactaacacaggaggtgaaatcccaaaggataatctccctgcactatctgatttagccgcagatacttcactcgccttcgcctctgtgttttcagaacgagcgaacttagaccatgtggaggatttggatcagcccaagtttgctcactccttttcaccagtttcatctatgatgggatgtgagagcatggaagactcaggtggctggttaggaatgccgttcttaaacttctaccgttcattgaacaagaacttctttgcaagtgctcaaaaactgaacacaatgtttggatataacccagtgtatatttcctcctttcgagactcagaacttcaaggaggggccaggctgcttctccctgttggtgttaatgaagttatcattccagtatatgatgatgagccctctagtattatagctcatgcattagcatcacggcaatatcattaccaagtgagtgatgatggagaaagaccgaaggaagctggggaccttttgtcttcatcatgctctgacacatcaaattttcagtcattctattcttctgatgatttcctgtctgaatcttttagaagctttggatctggtgaggagagcatgttgtccatgtctggttctcgtggtttggatccactctcatatacaaaggctttgcatgctagaatttcttttggagaagatggccctcttggtaatgtcaaatattctgtgacttgttactatgcaaagcgttttgaagccttaaggaggatttgttgcccatctgagcttgattatataaggtctcttagtcgttgtaagaagtggggagcccaaggtggtaaaagcaacgtcttctttgcaaaaaccttggatgacagatttatcattaaacaagtcacaaagacagaacttgaatccttcataaagtttgctcctgattatttcaagtacctatctgatgcaattaaatcaagaagtccaacatgcctagctaagattgtggggatatatcaggtaaatttaatatgatcatgataatgatttctccattgtaatatgtactagtcctcatgctgattggtttatattgacaggttacttcaaagcatgtcaaaggagggaaagatacaaagatggatgttcttgttatggagaatcttttgtttagaaggaatgtgacacggctttatgatctaaaaggatctgctcggtcgagatacaatgctgattctagtgggagaaacaaagttctgctggatcaaaacttgattgaagcaatgccaacctcccccatatttgtaggaaccaaggctaaacgtttgctagagagagcagtctggaacgacactgcttttcttgcagtaagtttttcccatttctgtgtacataatgaacttcaatgtagaatatgcaatctgcattcttttaacccatatttactgcattacttctctgtgctgttgcagtctgttgatgtaatggattactcactacttgttggtctggatgaagacaagcatgagttagttcttgggatcattgactttatgagacaatatacctgggataagcaccttgaaacatgggtgaagacgacgggcattcttggaggaccgaagaatgcttctccaacagttatttcaccaaaacaatacaagaagaggttcagaaaagccatgacagcctattttcttatggtcccagatcaatggtttaatgcatctatcgttcagagtcaatctcagtctgacttgtgtgaggagaactcacaaggtgggatatgagttgaatgatatgatgcaatgagtcattcactatgtacattcaataatttgttccaggattagatccatctttacatgtttttttcccaccatttttttttcttcctattttcgtataccaattcttttttatatagcagtttcatatgtaattttgtcagatgaaaaggaaaattcgtgattatttgtttgaagatgcagaagaaggctgtttgaagccaaggaaatttctgtcaggggtgcaagtattggaaggcctctccaagaattccttgtaggaaaaattatatgttcaacatgtacatgtagttaatatttgtcttgtatatttgtaaattagatattaatgataattattacttctttctttctctgtggctattcttaaattgttgatcgttaagtactctcagcattgtatatatatataaatgcacacaagaactggtttatttctcttcttcttaacatgtctacttagttttgatttactaatgaaaaggtacattaagcgttgtatatgtgcaaataagatatgttatcattggtcaactatttgaagaacaattttggtaatagtaaaaagtgggcaggcaatgattgtaatgtagaactaacgaaattcaaaggtaaagatagtttttgttatacatgctattcagtattcacattctgtaaatgaaaaaggtaaattcctttataacactttggtacatactctgattaatttaaaacgcagttatataaaacatttctatgatcaacgaagtgagttgttaaagccattgcagttgatgtctccttgaaaagctacacctttatgatcagtagggttcaattcagtgcctctaacaaaattaagccatctttcttgaataatatccaagatctccacgtctctgaattatataatataaaccaatacacatatatgaacacttagaaatattattacatatcaaattatcatactagtatattataaggaaaactatatcatatgttaaaaaatttatatatttaccttgaatgagaagattttcttggactctgttcatgaaaacgaggaccctcatcataaccttcgcaaattatttccccactttcatctgtgtagcagattattccattagaccgatcttcaaaaacctgcacctaagaacaaattccatatgagtaaaccatggcttgttttctaataatctttccaacccagttgagatttctactttttggatctaattcaataataaaaagaaaaacttgagatatatgtataattatatcaagtgtcaatggtggcagaacaaagaagaaagaaataaaagagttgaccttctctttataagaagatctgatcttgaggcttggtgctgttattttcttgactggaatgtgtctctgttttagcctcaaaacattaccaaaaggctttatgactaagccagtggactttttggctaataatatatgaggtgaaaattgacatgttaaagccattgatgaactctgttggtactagaataagaaaaagaagagaagatatagaatggggaatgaagaagttggaggtggtatttggtgttgctttaattggcctaaatacttaatagaaaaaatgatctggtcatatgctttctcttaataaatcgattatgttaaggtaaggtaagcacatagccattaaaaaatgaaatacatatattatcttatatataaaactcaattattggaaggttatgtcatttcatagtgccaatatataatggtaaatatatagttgatcagggccccactttgcttatcttctcctacctattgacattacctgtgaaacaaacccaagtcatattagtggtagtgggtctattcacaatttcaccaatattcatactcaaacctttatttcttcttttttatattttttttcttccttccttttgaattttgttgctgaacttgaaaagaaagatgttaattactaaatttgttttcaagctttgtgttcaaaatcttcatctatttgtttgaaaatatacaatacaagtctcttaaagaatcattacatttacaacaatggaaacatatccaatgaaagttagtgtacatagcataattcataaatatatgtatgtgtcgtaagcataggaaaaaatgtggcttaaaatgaaactttacacaatctttaagactttttcttttaaattagcctttgatgataagcagataatatggccccctccattaaaaaattataagaggataatagaaagttaagactataattagagagttggcattttatgtaggagaattaataaaatactgtgtttactttctgtcttctcagctttaagtatttatgagaaaataaagaattaattaattactttggttgtcttgattctactcagcagtggctattcactaagtaaatattattatatgtaagtagtagtacacgtaagacttgtttgttgcatatggggatacctatttattaacatattcttgtggttggattacattcatcaatcatagtcaacagttcgtagaatattataatatatgcactattacatctattatatatgtgattaaagttatagctagttgaatttctattgtaaaagttttttttttcttagttcttttttccaagtaggcttattatcaattatactgatagtgtgtttttctcttttttatttggatcgatggcttatcatatttatctaagtcggttatcatgaacctcatcatcaaataacgaaatggaaaccagtttgggattgatgtaactcaaaaatataatatagagacacttttattaaaa

SEQ ID NO: 377832 - DNA, 2786 bp, Cannabis indica
tttaaaagactactcaataacattaggattaagggatttagctcacctataaataagagagccttcaatcaagtttttctcacttcccatactcttcccacgcccaagtctttttgagagccttggaatttcatcttcattcaagtgttcttcatctgctaaggtagacaattttgtccttttttttcagtgccattttgttttagtttttcttccttctttgtccttttctaaacttttttcaaggatcctagaactctccagaaacccttaaattccatatttaagaccttcaaaaatctaaaaccctattccatgtgagcaactttgaactaaaatttctcttgtaattaccttgaatttacctttccaaagcttaaaagacatttcttgagttgtaagtaactgagtgttgaagtcgtcatgcctcaaatgaagagaagcagaagaattcctgatgaatatgatctccatatgactcagttcattagagctaagcttacagtgcccaaatctaagaacttagacaaggcgcctggtgggaaagtaatggcaactgaacttcttaaagctgtcattgagagtgatgacccaagagattaggctttcaacttgagacctcttgtattcaacaccatctctgaacatcaagtccaattgattagagatgattatcttttcccaaaaaatgttgttaggaaaccacaatctgggtgtcccaatggtttcaagaatccatgttgcagtgcttgtttgagattccatatgaatgcgggtgcttacttgcctttacacctgtggtttatatcaatagcagatttctttggagtttatttctgccaaataaacccaaacaattgtagaatctagtccacctttttcatcttctactgcctgaaaaattggcctgtcccaactccccatgaaatttacttcgtctgtgacttgaaaagaagaccaactggaaaagaggaaggattttaccacttccaccaattcaatccatatataaaaactgtaaccaagagtaactatgacctttaccatcaagaatacttctatacctcagtccttccatcaatacatattaccttctagaagactggcacttttaagagacctgcttcattgattgacatgaagaggagagaagattctatgcccattgaaattgatgcatgggaaagatatgggaggaatttttttactgctaaaagccttcgcaaagtcgggctgataatgtattggaagggagtttatgttgacactcgcttttctgataactcttggacaatgcttcttgaacacgatgaaaaggatggtcaaagtgaaactgtcatcttgtctagaaccgtgatggaagatgaaagttttgcttaaaacaacctagaatatttagggagaatatctgtgtacttagattgagatgatggagaagttacttctactcaaactattccagaaatagtaagggaatcagtaggttgctgatactccatgttcaacagttttatcttgttgtcttcttttcttctgttgtactaaccatttgccttttttttatttgcagacaacatgagttttttggctgctatggcaacctactaaaaaaggaaggttcctgtagcaaaggagatcaaacctccagctgggaagtttttcagggtatccttgttgattattctgctcctacgaagaagaaactcatgaagaggagtagacctgttgaagtttttcctcttgcctaagaccgtggcaaggagaagtctagagttgttggatttgatgagggatctcccattgagatctctctagatgaatttgataatggtgttttgtactctagtttggatctagtggagtagctgcgtgtgtggggctactgacttcgtgccaatggtgatgccttaattggatccaaggctgaaaacattccattgtagaagttaattagctccagacattcacatgttattgcccaaagatgtttcactgatatctttagggtaacaacttttcttgtcttcttttgaactagctttcttttatttatcatcacctgaatttgtcttcttctttttaggcttatgtcagttgtgcttacaccatggataacaaacacaagagggtggttgaacttgttgacgaattctcaactctagaggagtgtgctattgctacagaagaccagatgactgacttgaaagaaaccattagtgctttggagaagagtgtggccaatcaccgagcaacgactcataatgccaaagcttgagagagtagcttgaagaagagtttggctactgcttgaaagaaaacttcagaggttgaagattcttcttgtttgaagcttgaagagaagactttgggtatggcttagttgaggactaagttagacatttgagagaacaagtaaccaaactggaggagaaggctaccgctgatgtcactttttatgatggcttgtgttttgatgtcatctactgtgattggtcatctaatggaggagcataatcattcaattggttggccttcactaagaaagaaatcccattctttataaggtgctatgagcagcgtttcaatgatgatgctctttagaggattggctttaacttgaatggcgatgagccagtggttgaagaagctgcaagggtcaaaagatacaaccccaagcatcctaacattcctcctacttgtaataccctaactagcataggcgtattgttgaaaattattttaccaggatctagatttactagcaagtatgttggattaacaaccta

SEQ ID NO: 377833 - DNA, 2506 bp, Cannabis indica
cttttatagttcaaaataaaaaaaaaatgttaccgagtgcacttatacttttttttgaataaataatgaaaacatgacactacaaaaaatcttacttttagttacaataaaatttataactaaaagtaaaaaaaatttgtgagtaactataaattatcatttatatgttgtgacaaaaaagtccgtgcctaaaagtattagtcacaaaaattacattttattgtgactaaatgtatttttagtaacaatactacttgttgtgactaaaattaaattagcgataacttgtatctaaatactatgttttagtcccaagtaattttttattgtgactaaaagtaatattttgtcacaaaaaaattatgttgtatataactaaaaattatcactaaaatagctattttttgtagtaaaataagaataaaaaaagttagagacataaactgtatctattatatacaaaatgtggttatgtaacgaaataaaaaaaatattatttaattaaaaaaatattacacttaatataaacctaatgtattgcagccaagattaatgtatgctaacttgtggtataattaaatcctctgacgttaaagataagattttgagctcatcactcaccattacgaatttatattttctaaaaagagctatacatcataataaattgtctcaacatatttattttatttttttcgaacaaaacatatttattaactaaacacaattacttctttcacttctttcagcaaaaaataaataaataaataaaaataatacacgaatacttcaattccccaataatttattttctttctcaattataatggtggatgttggatttatatattatgcacagaccaaatatttactgtaagttaaattaataataaaggaaagaaaataagttagggtccaattaatttctgcccaacaatttttttattgtgtaatattactatccaagctgtatagctagctacaatctgaaaattcaccaaactctagtgtttggtggctagtaagtaagtgacagtggtccaagaattaaaagtagggctttggttggtggtgaacaactaagagtgagttactcgtgacttttgatagagaagaaaataaattgaaattcgaagttagaaccaaagccaatataatgttatatatacatatatatatatacatatatttatgttgcttggttggctgtaagcctgtaagtaagtactcttgtgagtaacatggcaccaaatgcgccggttaacagggatgtgtgagctggattttctttgtaactttgtgtggatttgcaccaagaaattaaaaaaaagtgtcaacgtgacagccacgtgcactattcttctacttcatttttccaagctttgcctctgctcttttcacattttcttccatttattctttattattatcattttcaaaagagctcttctttatatattaagacttttggaacatgatgaaagatgtatttaactttcttgttatatattatatttttcattttcctatctatcgatgaatcttttgaccctttcggggctcaaaaatatacatctgtttttattttaaatgaaaatctttcacttttatactaattaaaaactatattacatatattgtgtatattagtacagctagctgtgaggggccaatatacaatattattaggctattatagtaggtgtacgtacacgtaatatcatttatagaggttagaaataatataagttatgttgaaattaaatgcatgtcagcatagacatcaactatggattcgaggctatcccttgattggtttttagtttttacatatatagtttcatgaatgaaaataattcaactgtaaaatagaagcatacgtacggatgactaggaatatatatgagcatgcatcatgcatgcatgcatgcacacggttccaacttccactacactacacacactagttatatcaatttatgctaatattcatcacctatgttcaattaggtatattcttctctacaaaatggcaatattaatgtgtacacacatctctcttatataaatatacatatattattatgtaattagagacttaccatgccttattctttaaagggttgttgtttgtaatggtttttgaagtaatacaaaacttctggttcttaaaatatatatatattaattgtataaattttaattttaattgattaataaatatgcttggattcctaatcaagttggttatcattgtaactgtaattgagcccctgtattaagtatctagccagccatatataatatatagaatggaatttccaccaaagaagtaatatcctatatcgacattattttggcgaatatttctagaaaatcactataataaaatcatattattacaagttattagccgagtatgtatagaaggtgacatatattcagggccggccctgaaatttagtgggtcatagaaaaaaaaattattttgggcccttatttagaa

SEQ ID NO: 377834 - DNA, 2091 bp, Cannabis indica
taattttaataatataaacaaatgtaagggaatgattatctcaccattgattcccattacatattagtaaacatgccattagagtagtgttgtttgacttacttagcctttgcaagtttttgatcattttcatgcagctacctgatataatcgatttatgtgggacaaaagatatattttatcattttttatttgaacaatatttttgtaagattaattctctattttagttttctatcagtgataactaatttctgttagttataaataatttcttttttccatttataatacatatataaagcattacttgtaattaaaccactaagagaattcattttgaagaaatttttttttcatttataatatggtgttagagtaggtttagttttgcaatgttgggtgtccctaacattaatttttttgaagttttttggtttttgaagttttttggcaaggtcaacgctgtgtgtgagagagcgtattaaagtcccacattaactggtgttatttactcaattcactaaggtgaaggcaatcctcccataacaagtaggttttgttaggttgagtaaggcccaacatccttcctaatatggtattagtggcttagacactcaaatccctaaaccaaaatcgattctcttcttcattgatggtgtgaacaagagtcagccaatcattatgagttgtttatgccagagcttgggaatccaggggttgtttaattccttaaagagatagtgtatcaaaatagaccaacttttatatttctttatgagacactttgtgatgatactcgtgttcagagtttgaaacgtagtttggggtatgaagggttgttctcgatggcggcttaagggcgtttggggggtgggggaggttggctatgctttggaagtcaagagaggaagctaaaattattggttattccacgaatcatatagatctcatagcttgagtggttggtaaggaggagaggaggttaactagtttgtatggtgagctgaatatgagtctttattagcacacttgggatctcatatatactttgcaagatcgttcaacactaccatagtgcttgttaggtgattataataatattctttcttaaggagacaaaaggggaggtcggccttaccctacttggttactagatgggtttcaaagggtggtaggtgattgtgagatatatgagcttgagctccatggtcatcagtttaagtgggagtgggggcgaggttaaaataggtgggtggaggtctgttagaccttgattgaacttttttacctcggcttggatggacattttgcactctgctaagctagctttttaatttaggttttgcttcatctggtcattattctcttctggtggacccagtcgtttaggttgggggtaaaggtaggaagattattcagtttgagactgtaaggttaaaagaacccatgtgtactcagattgttcatgatgtatgggagtcttatgctggctagtctattcaaagtaagatttctacttatggggagcatttgttacattagggagctaatattaattgaaagtttaaataaagaattgatcaagtaaggagggttactaaacaatgttaaggttgtcgggatgatgagttgtgtagaatttttgtcgaggtgaaaagaatatggtcgagattatggatcaacattagattttttgtcatcaaagatctaaaaagttgtggcttaaatctggggataaaaatagtaagtttttcatgcaagtgctacttttcgtcataaataatttgatttataagttgaaaaatgaagttgaagaatgggttgattgggagcatggccttcctcatgtgatggatgattatttctctggtattttttattaatctcaagtggattggggggtcatttattgtgtttagccatctatttcttcgttgaataacgctgagttgttaaaactgctcacaatgaatgaagtcaagacaactctattctagatgcatccaaacaaatctccaaggcctaatggcatgactctggctttctatcaaaaattttggtcaattgtgtgcgatgatatggtccaaa

SEQ ID NO: 377835 - DNA, 3995 bp, Cannabis indica
gagtttgaaactagataaatcatgaaaaaatgcattcaaataaaacaaaatatcaaaatacaggtaaacaatataatgttcacctgagtatcatcagcaactccatctccaactgcaccgaagctatctacattcacaagaaccttaccaccgcgttcgcttttccatgaagggatatcaaagaagtcgatatcaatgtcatcttctgagtcctggctttctatgtctagctcatcaaacatggcaaagtcatcatgcagaaagtttcctgcaaccgtataagacgctatcaagaaaccaagaaaagaaagcttaaagaatttatccatattattttaggaagtgggggactgttttttggctgcttttctagaatggttttgattgatttgcataaaatttaatgaaacaatgggttataatttatacatacagattagttttaggaaatgaagtgttttgtccactatatggcttggcttgaaagtacataaaagatgttacattttcaacatgcccacacttaaagtacaagagattttttctttctttatttcatcttcttcttttttgttttagaggggaggtccttgctttacttctcatccaatgaaataaaaatgcaccagcaatagtcctcatgggtcctatttgtacttctctttcaccaagagaaaccatgcaagttgcaattttttatagtgttaattaagtattgatgaacagtcctaaaaaagaatgtgtacaagaaattaataataaaaacttcactaaaaaaattaaagtatgtattaacaaaaataaagtgtcattttggttagtagtaatgtgaatgcggatcacgtttttttaagacatgcaggccacactcctcaacagccaaacgtggaaagaattgtttctcaagtaaagttatgcacaagatagttacagcactatgaattgtttgtactaatgataaaaaagaaaagcacaaaactcaccaaaaataccatatgctcaagattgtaacttcaaacaatgattgctggtctcaattaaactgtgaccaatctctcttgtaaccttccttgccattgccaactctctaatttccattgaagtcgaaaactccccgacttcagagtaaaagtttgaaacttgcaagcaaattgcaggattctcgggttcaagctccatcaagactttggctgctcgtcttcccatcttttcgttcttatgaaccctgcaacttctcaaaaacgagctccacatcatcgtgtcttcgtttccctttgccttaattagcagcttctcggcttcatctagtaagcctgcacggcctaagagatcaaccatacatgaataatgttgtcgatcagggcaaattccatatgaagttttcattgaatcaaacagaatttttccttcttttaccaacccagaatggttgcaccctgctaatgcacacaagaatgtaactttatcaggtttcagacccttatggatcattgcttggaaaaatttaagagcttcacttcccattccattctgggcatatccattgatgattgatgtaaaacatatggtgcttggtgtttgaagctgttcaaagaccattcgagagtgatcgatacgaccacattttgaatatgcatcaatcagagaacaggaaactgcaagatcagattcaagtcctaattttactgcataacaatgcaccattttcaagcttgctaagcttgtcaaagtagacactgataacgctttcagtgatgtcgaaagagtcacttcgtcgattccaattccctcatcaaccatcaaaccaaacatctcaaccacatctccaatacagccacaatgcatcaaagatgtcatcaacgagttacaacattcaagagttcttccttcagcattttcataaatggcaacagatctctctatgtcaccacatttgccatacatatttatcaaagcagattggatatgagcacttccactatcaaatcccattttcattgcataagagtgtatctgctttccaaatccaatattcctggttccactagcaaaattcagtaatcccacaagtgatcgaatcgatggtctgttcccccaaaactgcatcccagaaaatactttaattgaatcaacaagtagcccactattggcatagacccaaaccattgagttccatgaaattacatcttttaaaggtatatcttcaaatgcttttcttgcatcatttaaattctcacaagcagagtataaatcaaccaaggcattggccacaaacacattcatttctacccaaccaagcttaatagcatcacaatgtagctgccttccttcctcctcaaaagatccaccattagtaaaacaacaacaaccacgaatcaaataagacaaagtaaccccattgcactgaacaccatccaatttcatcctaaaatacaatcccaacaacttctcaactcgacccacttcacacaacccacgtagcatcaaattccaagtctccaaatttctttcaggcaattcatcaaacatctcaagagccaagttttcttgccccatttgcatataaagattaataagagaacttcccacaaacaagttcaaaccaaaacccatcaaaacaactctacagtgaacttgaatcccttgagcataaaacccagcatcactacacacacccaatacagaggaaaacgttgattcactctcacgaattcctcgagaaaccatttcattataaaacccaaaagactctttcaaaagcccacaacgacggtacccagaaattatcaagttatacgaaacaacatcataaagcggcgtttcatcgaacacttggagagcagaatcaaagtccccaactttgataaaactgtcaatagctctgttcttggaatatactctatcattgtcgttgacttggcagtaagattctaaactcaaagacgaagacttgggtacgattccaaatgtcgttatcttccgtacaagggacattaacatggaacctcgtcctacccatgtacctttttgaggtatatttaacattggacttgctaagaaagcttggaaataacttcaaaactaaaaatggctgttgcccacttctcagttctcaccgaccaccgatttattaatattaattttaagattaccattaaagattacatctgtttttacacgtaaataattatactcttcttgtggttttaggtttattaaaatgttaatggaacaatagaaaaagaatcacacactacctcttagcttagcttcaaattttcacataaattgatttcggcttaattataaaccctttactctatttgttatacatttctaaagcaagggaaagtttcgtatcaacttattcaaaccatacaaattatccaactctataccatgtctgggtttcttcattaggcacatgaatgaacaaataaagttttgtgagttgtcactcttttgttcagcagtatatctctctattatatatagaaaaaccaatgacacacttatctactttaacagcatctccgattttaggatgtttggtaaggtagacatattatgtggtattagagagaaaaaaatatcattttagaaatttgaatagatgttatgttgtagtattgatattattcattattttttaataaaaaattgaagctaaaaaattattgtatctaaaaattagaatatatattaaattataatgtgtgaaattataattataatatttttaaagagtgttatacattagagtatatggacaattgtcatattagtaaaattgaataaaattggatagaagtccttaagtctaacaattgcaatagttcaagtaaatttttaacggcctaaaaaatttaggtagtataatttagtacatgtcaaagttaacaggtaaaaattctaattagcctatgtaaaaacacaatagagtaatttgcgccataaatacctaagtttaactctcagttacaaataaatactta

SEQ ID NO: 377836 - DNA, 2198 bp, Cannabis indica
tcaccaagctttcgagctaaagcccgtgattgatgaagaaaggggattccgaagacttgaatccaaaaaggtgttgaactaagcatatcgacagtgacagtggatctagattcaaagggagtcatcactatgagcttgtaatcaaaatgccaaggctggccaataagaacgagcttgtgatccccaaaatagccaaattccacagtgaagaaatttggttccttcaccaggacattaatatagtaccgttcaggccacatttggtgaaggcgcttcttgaaagcatcttcgttaaaatgacaattagttgacagcttgattgtaaggaaagcagagggttcttcccctgcatcttctttaggctcataaggtatctcagtgagggaatggattttggtttctgtgttagtgaggttgagagcaaagttgagaatttgagaaagatcctccattgcgaattcaatcaaggatgaagtgaaaaaccagagtagaagtatatgatagggaaggatatgaagcacacgagcagcagtaaaatgataggtaatatgggttaggtaagagtaaactaattggggggatgcttataaagggataatatagagagattgtggagtgcatcagttataaacaagggaaaaagaggtctgggaattgaatgcaaagattggtagtaaaaggaattaatcaagcaccacagagatggaattatcacaatatgcaaaacattaaatgggggtctcttcaagccaggggatcaaagcttgagtgtggatttctgtcagtgccccctaaaatctccaaagaaagcctagaggggatgaaaccttaaacaatcctaggacaattataaaaagtcagggggtgcagagatgtgatggtaattaatttctatttttggaaagtgcgaatcgaattgaaagaggggaagtcggcttgggtttcttcgtattagaaaaaaaccttccggactctttcttcaggtcgtgccaaggtttctttgtcattatgcttccgttgtcgtcgtcaatccaatacttttactgtccaaaaacaactaagtattagaaaaaaaaaaaaaaccttctggactcttcattcaggccgttcgagggtttcttcgtaaccatgcttctgtcgtcgttgtcattgtcgccgacaatcgatgttcttgtccttccgggatctacgtctcctagtgacggttgttctcagaaatacccaatcgaaggatgttggttcacgctgttaacattctcgcacactagacagccatcatcacgggctactccaccattacaaacctaggtctccttcaagcaggtacgtatcacttccaccattactccctgttttatgtgacttctgccattaattttgcttttccaatccttaattttttcaagatccttggaccattaatattgattaataataaacacttataaatccctcattatattataagaagaagacaaagaaaatgtcagtctcatttcttttagacctttttaacaacaataatttagggtaagtttcaaaaaaaaaggaagaaagaaaaagaaaaacaataatttagggttgatatataggaataggggtctgtttataagtctcctgaatagtctcttgagaagttagttcatcgagatgatcagtacgatattagtgtatgaagtcaagtgagaaggacattatatgtataattaattaataatttgcaaatatttatgacatatatgcacacatatttgtcgtttgttttatttttggttatttgacactacttatatataaatgtgggggtattccctacattttatctcctccatgcttgtacattttttttttaaaaaaaaaatggatagtaataatttaaaaattctaacagctatagtacgtaattttaaggaccacatactacatacacattattatattcaatcaaattgatcttcacaatcatttttcatgaattggcaaaaataataatccaattatcctgaattcaataaaggattcacttaatttggtattgataataaataaataataagtactcatctctctctttttgttttctggtggataataataatgattcctttttattgcggaccaagcaaatattaatgcattattttgttagtgcatggtacatttatattagagatggaaattgggcggttaatgtacgg

SEQ ID NO: 377837 - DNA, 2586 bp, Cannabis indica
aatatttgttgtgactaaaactaaattagtgataatttgtatctaaatactatattttagtcacaagtaatattttgttgtgactaaaagtcacattaatttagtcaaaaaaaaaattatattgtgactaaaaagttatcactaaaaataataattttttgtaatgtatatatatatatatataaaattaataatgagaaaatgatacaatagcttgtcaattattttttattagaaatcatatcatttgtttttttttttatcattattaatattatatataaaaggtacacatttggggaccattgatttattttaaatattaaaaaggaataattataggttttgccatttcattaataagctcatcatggtactaattaattgtacagatagagctcttcaattagtcgaattgtcatatatataaagacataaatgatgtattattattatttatattatatatgtatggatatatatatttgttctcttgttctaaaagttttaagatattaaagataacaggtcatagaagtcatggaataaaatgttaataatataccgtggccatggtattcatgcacataatataataatatatttacatatataattattataatgaaaggctatcggatcaaactttcctcccgaacattaatatttatcaaattatgcataattttttttttcgaactattaatattattgaattaaagaatttttatctaattttactaactaaagtttaatttggattaacaaaaataattagttttgtttagtttagtttagagataaaatcatgaagtaatattagagatatatatccctaataaaaaacgatacatttatatataatctaaattcattcatatatattgatattaaacattttagttatagttaattataatatgacccatattttatactcatataaaaaattaggagtagaccaaagagagtacagacgtacgtgatcgataataagtaaaatatatgtgagaacacgtaccagtccgggtagaagaaacagaggaccaccatagtcaccgggccagaaaccatcttgagtttgcaaagtggaataaaacgataacgctcttctcagcgtgattttcactgcttcctcgcttatttcttcttccctttccaccttaactcctcttatgttcatgggcaattgcttattattattattattttccctttcaaactgcaacaaaatcatcaaattataatttatgtatatgtaaataatagaagtacatacatatatatatttatatatacctgaagcctcattagaagatcagaactatgtttggtgtgaaagcgattgagatgaaagttttggcgaagatgttggagttgagatgttgaggagtcatcatcatcattctcatcaaactcccagtattgccttcctatgttctcattcacactcttcaaccatggatcctcctctcccactgaaacccttagcttccacatcaatatataatatatatgtgtatattaatacatatacaaatttaacttctactcaaatgaagaagatatacatatatataagacgcgcgctacatatatatagtagaacaagcagtcttagtagtattacccctgtcacgcacattacgagattaccatactaccccgacattatttgttcttattatattagcatgtatatatataatatacatacatggcattcgtcatcttcataattactataattgagagttgaaaagtcttaacattttgtgacgtaggatatgcatgaattggggaacaaagcctccaaattgataaagtacattgttctctattaaacaaaaaatttacatttacagtattaaaaaaaaaatgtaaaacttaatttcgctaaatttgcagtataaaaatttattaatttaagtttgatccatccaaaattacaatctttttgtttaaagaaaatatcttttaattctaattacgatgatattaaatgatttaaaataatttaaggaaatttggggtaaatttagaattgcagctggactcagtcaatttaattaaccgagctgcctacatatcttctttgtgaaggatcaagccacttgtaattctttaccgtatttttgaatttgaatataagaattccagtagatgaccacttttagaaattctttgctatttgaaaatttggaaaaatttctaggtatatgaccttttatagaattttgagatgtgttttatatcattttgcggtatcagtgactgcacttagtcttagcaactaagttgtctacatatccttttatagaaatcaagtcaaacgtagttccaaaaaggtattttgataattaagagatgaatgacttctttttagaatgccatttttttatggccttaaaattgaattttagtgcacatttaaatttttaagtaaaattactctttttgagatttttgtgaagttaatgacctctttgaattaattttgtgaggtgaacgacttttttaatatttcaaaattaattttgatgagctcatttagaattttgtaccattttgtatggatttagaatt

SEQ ID NO: 377838 - DNA, 2171 bp, Cannabis indica
ttttttttgtatttttacgaaattctacatagaaactcctattgcaactagcactgcaacctaaattgcaacaaaaatcgtatagaaacccctattgcaactagtgcagcaactactttagaaacccaaatcataaatttaaaaaaaagttaagaaaacggagtaattctttttttttcttgtaacatcccaacttctttgccaaaactaaaactccaaaaagaagctatattttattattttaaacaggtagaaaatccggcaattctaacttcaccttccaggggccatggtttcagattaagaaggaccccattgaccagccatggtcgtttttccataataaactgacagtcttcctctgtagcaaagaagaatcccatcactccttcaccacattttttcattctccatgagccaatattacgccatatccccatgagtatctttttcaccactgaagcaggcatatctttgtttcccataaccttgccgacgcatgctttgttaatcaccacatcctcaagggtaatatcttcaaacagttcaagcatttccatttccatgttgctgtctctttccagtagcttattactgttttcatcaatgctgtcaacagccacttccttctcacgtatttcacccattgagagagaaaaacaaacactcaaaaaaagcaatgccaaagaaagatgatcttctggtaaaatgagctaatgtagtaaataactagaagtcatatagactagactcgacctggagccattttctttataagtactgggtccagtttcacgggctcccaacccgttgcctttcggatgacaacacccccatcattgcaaagaaaacaggggcattcatcaaaacggatggaaaaccaaagtttgaacttgttcgtcgtggatttctcaggtgctgggtggacatatggattacacatcctttcactgctggtttcttcctcaaagctgctgggaaggaagaagcttggatccaattcaaatatgagaaactcccttacatgtgttttaactgtggtcgactggcacaccttgataaaatatgttatgtccctaaagcaatggtgattccgaaggctgggaaagcagttcaaatgtatggaccatggataaaaagcgatacagggaggaataattgcttcactatggaaggaaagggtattactcagtggcagattgaggataatggaagagcatggggaaaagaaacctcggagaagaaaggcacctggaaacggcggaaccctactcatgatcggaaaaaagaagggcttctgatgggagacaaaacaccggtatcgggtacagacagtagcagcaatgcaggaatgtccaacgttgatatggcaggtacgtcctctgtgcgtgttgcttctcagagtacgaatgcagacttggtttctttggacagagtggcgggagtatattcaaacaatcaaaaccctattccttttgggcccaactatttggatctccctcggcccgactttgctcaggagactgaagacagaatcccagatattgggcctactatttctcaggcccttgaaattccccactcatggatctgtatgtctcaaactccacataattacccagatgataacccaatcatgtggcccacggacaaccttgaattacaagagatgtttttaaatctctataaaccagatgttattgataagtttagggcccaacaaggtttaatttcaaaccccccagatttatcagagttgattattcatctcttgggcactcgaaaaagaaaggcccatacatggtatagcccaaccccttctccctcaaaatgctccattactgaaattggagatatcgaaacgcccaaattgactgaggaaaaggaactctttactttggagccaaatttgaaatttaatagtggtcaaggagataacactactggaactgcgagaagaaagtatggtcggaagaaaaaaggcttcaatggcggggcaaagaaatcaaactctggtgttaaaacaaggagtaaaaggaagaaagctcttcaagcgaacacatctactccaggtaacttagaagacattctgcagaattgtgtagagattactgtgaactatgttcaggattttggtcatggcgaggaggcagccggaagcatgcccccac

SEQ ID NO: 377839 - DNA, 5196 bp, Cannabis indica
aaataatactatgtttggattaaacagtgtattgtattaattattatgaccaaaaattttattacgacaaaaaattttaatacaatgtaagttgtattatagactccagacccagacccgacccagaccaaggatcgtaccctgaacccagaccaaaccccggacttggacccaaatctggacctgaaccctaactaaacccaaactcggatccaatcccgactcagacctgcacccgacccaaccaggaccagacctgggactaggactagagtcaggaccccgaaacctgactcaagactcagatccagactcgaacccgagacccagacctgacttggtgaaagatatatcttttgactatattattgatgctccaaaataaaggggttgtgatattacctttagtaattgctgtcagaaaattggacaacaacaacatggtgaaagatggtgaccaagaattcaatgcagaagtaatatctattggttgtacaaacaaaccataagaatttggtaaaactaattggcttctgccgatgaggaacaacataggcttcttgtttatgagtacttgaagagtgcacaaacaaatttatacattgatataaagcctcaaaaacttcaataaatcaattatccaagcatgccttgactttttttgactatctttcaaatatgcaaataaatcttttaatctttttccaataaataatgttatgaatacatagaatctaattagttcctcttgttggtacatcctcttagatgactcatacacaacaaaaatttttgattttggactgaccaaaattttgaagactgatcatactcgaaccgatgttccagatcattgcaaatactaaaccaactaagttatctcgtttggcattggcatcagttgaagtttcaattgtaaattttcgatgagaaaagtaaaaaaagaaatagactaaagttacccttttctttttggaaagacttaagctcaatcgcagctgctatcgaagcttagcaggctcgctcactgcatccttcgtcttgaagagttctttcgaaccccctttattcaaaacaccttttttttcgttggtaatggtttgaactcacatggctgtgacagtgaaggtggatgaatacaactatataaacatatattttatataaagttcagtactttgtttctgtgtcaatgatgagtaagaagagtcctgtcagagaatttaaaatgaacaattatatacacagactcaactttctgaatgattccaaagttgtgtccgaagtcaacgattacatactagttactacaatggagcaagaatttgttgctcagataagatgaagaacaagataataacaactggttttacagcttaacactaagactgagactgcgcatgctcgggtttgtgtgagaactcgtaatctaaatggacaaaggcacgctcaatttcaggaagttgttcaagcttctcctgcaaggattcgccgatgtcatgagcctcttgtaagggcatgtctgccggtaagacaatgtcaacctcaacaaagtagtgagacccgaaagtgtaggccctaacggtatcaatgtgtcttatggccttgtggtggttccaacagaggtatgtgagtttctgtaaatattcaggagcagctgatcttccaaccagagagttgacattttcaagaaccgtcattgaccatgttcgaatggtgtacaacgccaaaataatagctccgacgggatccatccaatcgtaaaaataattagcaaggagtgcagcaaagaggccaatgatgttggtgatgacatcaaaaaagtgatcttgtgcataagctttaacaatttcgttactaaaaccgcgacagtaaatcatcagcacgaatttcaccagagtcaccatgagcataatgccaacaacccatctttcttgatctttggtcaagctgaactcaacctcatcagataacagggttcgaaccgactccaatatgatctgcagaccgagtgttgccatgacagacgcaaacacaaggatacccaacggctgcatacgcctttttccaatagggtattgatacggatttggagtttgcattgagaaagcagtaaaccaaagaataaagccagacaaaagatcaagaagtgagtccaaagtcgatgcaataattgccaatgaaccactcctaatcgaagcataaacttttgcagcaaaagaatcatgtttgcaaaattcgatattctgatggcaaatgtctcgcttttcgccaacttatcttgctcttcctttgacattccaggtagaaaaccgcgctctgctaacgcatccatctcgttaaacccctcgagcatttctacctgttgctgatagtactcagccacgttatcctccggacctgaaatcatcaatcaaacaaaccaacttaacacaaaagctgataaaattgtttgtggtttgcattgctatcatctgaaaatataaacacagctttttacacaattcaacttattccttttttcttctcaagcatcatggaaagtaggaatatagtaagaaaaagcaagtgagaatatattccttcctactatactatctactatagtgggactctcaagtcaaacatgatatcaacaaacacaacaatgagaggacataaattgaatgcaacacaaaataaaagccaaaaatttctagtaaccctccctcactcatggtctgtgatgatcaaaaatctatacaaaacaaaacacaatagtaggtaggttaagactaggagggtcaaacatacaataaccatcacacaaaatcagaaagtgactctgactcataggtctaaaagtttctttcgagcttttgaaactccaaaaacacttctgcttctggtggggtaactagcgagtttcaacttttagcgaagtcagttctagtaactttttcagaagcttagccaaacgggaccatagtatactataagaaagaaaaaagtaaaaccccatgtcttatctagcaaaataagagacagaaagctaaaaaagctctaaaattgtataagcccatttatggaatacccctcaataatggaaatcaaacactggaaacaatcaaatatggatattactaccattttattccaccctaaattcttgtagatttgtagtcatagcagcaacaactttagactaattaacaacaaggaaaattcctcacaatcatattcatattcatataaatggaaaagcataaaaaaaaaaaaaagaaagaacctttgctaagctaaaccattagaatatttgagtcacaaagcaaaaacaaatagaatccaatccactacttgatataaaataatcccactgacaatgaatcaaccataggcatattaagacaaacaaaacacaataataaaacaacaaaaatgattactaaaacaagaaataatttaataataaagaaagaatacttaaaactccatagcaatcatggaggccagggggtgagggtttcttctctttgtgggtgttggaaagtttaaagctttcgaagtttaaacgccaagagaggtcgccattggtggtgggttgtctcaagagggaaagttcttcctcttcgtggttgagattcagtagctccatagccattttccgtcgccgtggtcgagagagaaagagaggggttgttaagtgtaattgtttagaaagggtaggggtattttgggaaagtgtgaaagaagctattaatattgtggtgagcaatgaatggagcacagccggagtgagtgtatactatagtgtaccattctcaatcacatcatatctctctccttaataactacaagtttcaataaatatatatatttgcattgaaaatgcaatctttgattatcatttaagctaattaaggaggagaaaggctaaaaggcaacattagtctctagcacatttcttcgtgttaaattattattggtataattaaatattgaattttatataacttaaaaaagaacttttagagaataccgctaactaatcgtaaaacgttatctataaaaggtattgggcactactagtatctaattgaattgcatcaatagtaatatttcacctatcaaaggatattaggtaccatgagtgtcttttattatgtatcttaatgagagagatgaacaattttatttgaaaaaatggcacaactagcaccctccaacgtgtaatatcagtatcgatataattaagtatcagatgccacatgcgacacttttagatggagctaggcaccactagtgtcttatatcaatggtcttttatttgagcatgctaaaaaacaccaatactatctaaatgtgatattttacaattggttagcaatattttctaaaagttatttcattaaattacatgggacttgatacttaattgcaccaatagaaatataattacttaaagggtactaggcaccattggtgacttttaacatttcttgttttatttaggctaattatgaattttgcaccttgaaattttacgtggtcattgctataaagcatctgttgcaccttatgattggtcagtgatattctatgaaaattattatattaaattatataagactttatacttaattgtactaatagtgatatgatacgttggaagatgtcaggcactactggtgccttttaatatttctctttacatgtaccaaatcatgattatgatttttgtcctaaaaattttgacatgtactaaattataccctctttttaagttattaattttttttgaattactgagattgttgaatttattttactaacgtagtgatgtgattgtccatatacaaaattagatcttttgaattttagtatgtactaaattatgtcctccttacttttcataaacgttaggtgtctattagttcgagagaaattttcaacatttttaaaaatttaaaagagacaatttaataaatatcaaaattgtgagactaaaaatcctaattaatttttattttgttactatatctgttttgtaccattcaattcagtgatgaaataaatatccctacctataagcaaattggagagagctcagtttaactgaaaccaaatttcaagaccccaccaccatcatcatcttaaaaaatggtgtggaactaaaaatctccaagatttatttatttatttttgaaattaaatttt

SEQ ID NO: 377840 - DNA, 5737 bp, Cannabis indica
tgacatggagtcagggaggctgtagccctagcaaaaaaaaattatatactatcttatatatgttaaatatgttaaaaaataattatatcattactgattatttgcccccgcacaaatcatttttttcacaattttaccctaccatcttccaaattctccctccgtcagtggagggtcatataaaaaaaaattgagttataattcctcaatatatcgatatagaaagagtgatgaccttaccaaatgagcacttcatgtttttagtatatataaattaattcactttttgtatgatgatatacattaatttatcaaaatagtgagttgcacatgcaattaaatatcttggactttatttttaataccgcaaattattcagaatttaccaataacgggtaagatgtctattataattatataatatacactatcatataaaaaagttgaaatataatttttccaagtaccaaaacgagaaatgtcccctacgggaagagcaaaggtaatgcccttaacctaagcagctccttatataaatatctctctatatatatatatttatataatttaaggaaagttattaggcccttcaattctttcatgcataactgctatatatagttatttaaataaataaaaaatcaattttgcctttagttttctgacaagaaacaaaaactgcctcaagtttgtttcatactccttttttttccattcaagtccaaattttcaaagtagcaagttccatataccttaagatagcgtagaaatggcatttcttcaggaatgagaaacagcagagcatttcccttagcaccttctccacgggctgttcgaccaaccctgtggatatattcctgaaaaaagtaattcaaagttcagcatcagaaatacagtacataatggaaagttgcagagtagtaaatgtaataagataagctaaagatataatgataagcacctttggttcatcaggaggatcaaactgaacaatccagtcctacaggaaatgagagattgtgtcagatatagagttgttatgagcactcaaaagataaaataacgatgtgtgatttatctatctatttaatttagactgcaaatgacgtcgcatctttcaaagtgaatgatgccatggaaatataacttgattgtcaaacataaagatcctgaaaaaggatcctacttaacgtcattttaatttctaccagttagacaaaatctttaaatcttcttcaagagaaatgttataaatccttgatttgcaataattctttttcaagagcacagcaactaataaccacgcaaaatgttgctatacatagaagaagatatggaacaatttgacaaatgaataagcaagaaactaaggaaagaaataaacataccacatcaggtatgtcaagccctcgagcagcaacatcagtacacagcaagatgcctttctctgctttgcagaagtcaaaaaatgtagttgttctcttctgttgcttttgtttcccgtgtatatcaaagcaaggcacctgaatgtatcttagaagctcactatggtatttgacagaattgcaagaagagaagaagaccatcacttttttagacagatttctcttcaagaaagaatagagaagtataaatcttttggcacaaggtacaacacaataaccttgttccagcccttcatttgtaacctacaataccataatttaataaaattagagaactggaacaatatattataagattaacacaaagaataaaaaagatggcaatctatattaaggtcatcatatttaaaatgtttaaaatacaaagttaaaactttgaccttagttctattatcatctacatcgacataatgaggctctgtctgaaaagacaatcgggcaagatcctcaacctgcagattattggaaaaagtataaaacatgagagcattcttcaaaaataatcatactaagtaaccatatgtacaataaatagatggtcgatcaaatacacaaatatacaactacacactacagatatgatgcacaaaccttctgagtttgtgttgccgaaaataaagctgttctcctagtctgcaaattgatcaagaattcagtcagctaaacaccttcaaactagtatgtaaccatatgttattggcacggcacaaatataaacaatgaaatagatgtctgctaagttcaaaatatcccaagaaaacattttgaccaaaaaaatataaactattgccaaagttatcaaccaactatgtagctgaccactatatattcaacaagacatattgaggaatctttatgaaacatccagcattttcaccacatccaagttaaggtggcacttgattcttttgatccttcaacaaactactttagcagttccacaagcaaaatatttgtgaaagaaaaagtacactttaatccactaattcaaatggtgcttaagaaatagctcattcccgtttgtacaagtttaaatactagctaaaccatttacctttggtaaaatcttgagaatttgcatcatttcatccataaaattagcttccaatatcctgtcagcttcatcaatcgtcaggcactgcactccaagaaaagtagagggtcagtaattagaatgcaagatacaaattcactccaacaaaacaacacattgtctgaggtaagattttcaacggagaaaacactacatgtatgatcaaaactaatataacagaagaaaaagttcacagttctggctagccccataaaagtgtcaatgatgaagtaattgaataaatttaaaatagtttgcaatattgaaagaaaaaaaaagacaccaaaacatataaaacgcctatggaagaattcaaaggaaaatttattctcgcaggacctcagctgaatattatatgacagaaattttctcaaaatctaatgatgacaagaatcttaaccaaaaacaagtaatattgttaaaagaacttgttaaacacacatatccaccctaatattattaggaaaaaatccagagtttccactagtggcttgcacaagtggttgttaaggtaggttagtgtcaagccattcaccgttttagcaactcaatcattgcactttttttttggagaaatggtgagatcttaaacttgagcaatcctgaacttgcagatttttccagcaaaaaaatagtaggttggttaaaacttgatgtaaaggacagccctaatttatgaaaatattacattttaacacactgaccataacatagcatagcagaatctcaaagaaaaacacaatataaaagcattttctaaatttgataacaagctttagaaataaaattctgtataaatagcatatgttattgttaccttcaagtttttaaatacaaaaccctttgtattttgaagatgatcaagcagacgaccaggtgttgccaccaataaattaaccccttttactaaacgttctgcttctggtcttctagtggtaccaccaataaccaatccgtgtgtctgtgagtgatatttgagaagatcctttgccacagcatcaatctgaatatttaaaaggtgaatcagtcagcaatgtctaaaacagataaacacacactccaagtattgttaaatagattagtgtggcaatacagtacattctaagtactgatggctgaaacctacaatctttttgtttcagactaagggaaaaaggaacttaacaaaagtacaggaaaaaggcaatttggcgccatagaataaaatatattacaagcttataattcatatggattatcagaatgttccccatgttagcacaaagtaaataatatcatctggaagcccaccactgaccatccatttgattttttaagttcgtagttaataaggattgactattgcagtaaagcaaattaaacaaagtacacaacccaagccactaatgctattgtaataggaaagtgcatcggacacatcatgaatctatgatccaacacagaacagaagttgcatattaaatagagccaatcttccatagcatggatccgaaaaggaaggagtaaagcatcactaacaaataggtatttttacctgcattgcaagttctctcgtagggcaaataaccacgacacccgtaccatttcgtggggtaaagcgagcatgatataacagctccacagccggtattaggaaagcaagagttttgccagaacctgtcctagcagctccaaggacgtcttttcccatcaaaaggggagggattgctttggcttgaatctacatttaaattgaaaacatcaatcctagaaaaactaaaattattgaagatgaaattttctagtattcacgatacacaaaaagcaagaatgacacattcactataagcatcagtgtttgaaatagatattgcagtgcaaaagataaaaataaatttattattaaattttatttcaatatcaaaagctttgaatttcaattgctacaatacgagatagaaaagaattacctcaaaaaaaaaataatgatccactacatgctcacaaacatataacactttacttcttagttcttactcatcctattcgtcaaaaggatcaaataaattttatgagtatccactatccaaaaaatttcatttaagaaaagttagtacaagggtgctctacattaaccaaaaattcactcctaaaaaacctacgcaaacaagtcatgacaaataatgtaatgttataatagaaacgagctaacctgagtcataaactggaaccccatctcctgaatggcctttaaagtgggctcagacaagcccagagaagcaaatgagtctgtactcataatcccatacccttcaggcttcaccttcttcttcttcggcttctcctcgccttcctcatcctcttcttcttctcctccttcctcttcttcacggggtggatttgctatctccatatttaggtgcttcttcttcttcttcttcttcctctcattctttctattctccacgacttcttcaactgcttcttcttctccttcttcttctatgtgggtctcgttcagttcctgggactcggacggttttttggctctcttgcgctttgtcttcttggcatcgtgatcggtagaagcgttcttcactaggtcggcggccatggcataacagagcggctaagggtatcactagtcctaaccttacgttatataaattatatatatagttttaaaaaaaacacacacacaattttctcaataacataataaaatatgggatattttataattcccaatttagggctcggactagtttaccaaatttcaggttcacagtctttagggaaaaaaaaataattacacctgaaacccgcccttatgattaggggtgggcatccgatccaatccaacatttttttcctcatccgatccaatccaattaataattgaatttgaaaaatcatcatccgatccaatccaattagacctcaaaattcaatccaactaattggattggatcagtttttttattggatatccaattacacacctaaattttaatattaacttaaaaacatgaagaaaaaaaatacgtaaaaaactaagtatcactttttatttaagtgtaatacttcataaacatactattcttacaagtgtattgtagataaaagttttaaataattaaaacaacaacttttctaagtaataaaatagaataatgttataaaaataaatatgctaaacaatcaagtgttacaaattcaa

SEQ ID NO: 377841 - DNA, 8064 bp, Cannabis indica
tttaaaaattaaaaaaaattatattagagacaaaaattaaaaatgatgtaaattatttcaattttaaaaatacatttttagaaatacttttgagaaaagctagaagcaaatcctaaacttctccaaaaaaaaaaaaaataaataaataaataaaaaaatttattagaaaataaaattaatatttttatcaaccatctagaataacttttttaataaacaaacaagaattaagaaaataataaaatatgatttattaaatttaaaataattagaaatatatttttctgaaaaaaaagaagaacaatgtttccttttttctatctcaaaaatcttttgcctcatatataatactggaaaattctgcaacgaacctattaaaagtgatgcacttatgtatttctatttgtttcgttatttaaaaaaaacattagttcagttttttatggtcatatacattatagttatttaaaatatcttgcaaaattttgagaaatttaacaggcgaaaaatatggttcaaatagtatgttgcacgcgtgactattttatttttatacgggtgtgaaataaattatttgaacactacattctatattgtaaattattctgagtttcttcaaattttacaagatgtttagataactagaatataaaaaaatagaaaaaaatattcttttagatgtcaaaatagataaaaggtgcatcaatgcatctcttttataagatgcattgtagaagctataggtgtttattggatcacgtccaatggatttggacccaatcgatctaatctaattatttattggatattggattttgttatccaaaccaatccgatccgatccaatagatgtattgtattggattggatcggttccaaccattggatgcattaactgattttctattggattggattggattcatcccatcattttagttaccatttaagttgatttcattaaaagaaaatatgtaataaaaaaataaaatttaaaaactaataatgcaacatacataataaacattagtttagtccaacctaattttcatcatctcataataagacgaccaaaagatataatatattcaatacgcattgacaattttattagcatttaggaagatgagaattaatattttagatctatggtttttttttctttaatctcacgtgttaaatatatattgaatcaattaatatactttttaaaataaaatatattaaatatatcaaattataaatgtattttaaaaatatataaatataattggataattattggatctgttcggtttggttatctattaaatcggaagtcctatccaatatccgatctgatgcgattggattttcaaaatttacattcattctgatccaattaatagtagatatccgattttattggatcagatgattttctgcacactcctagaagcaccttacatataaatttaatacaacatccaaacatttttcttttaagatccagcgttcgaaaattcaatatgtagttagaattatgacttttagttaagatgaatgaaaatataagaatgtgaatgagaataaaaataggaatagaatataatcaaaataaaaatacgtaaaaaaatattttttaaaaaagttatgactatgaatttataaaaatcagagtttaaaataaggagtaaaaaaatggagatgcggggtatcgatccccgtacctctcgcatgctaagcgagcgctctaccatctgagctacatccccattttgttatataattaatttaaataaattaactacaaaatatataaaagaatcttaaagggaatcttcaaaatcacccgcgaagtcgttaggagtaacataacataagagaacagttatgtttggataagagaaaaagaagaaagataagacacagaaacaaatatacaacaccaccattgaagtagaagcatctaagctaaccttcaatggctactctccaactcactcactcttccaaaccttccttaacttccctcttctccctttctccaccccattttccatcttcttcttctcaatctccttctcgcttcattcctcctaaagcttcctattcttcttcttcttcttccctctgtcgtagacaattcattgccgacacagctgccgtttctctgtctttggcggtgccatttcttggatctgtacaaccggctaagtctgaagaatcgctttccgaatgggaaagagttttccttcccattgaccctggcgttgttcttctcgatatctcttttgtgcccgatgaacccaaccacggtcagttctccttctccctaaacttttactttgtttcttattgttgtttggcttctgggaaagtacaggaaaactttaatttccgaaatgtacaggaatatgtatcgtggaagattaattctccaaatctgattagttagttataattagttgtttagttataactaattaactcatttctttgttagctatgggttttaagtagctaattgagtttagagagttggggttgaataagagagacaaaatgtgattgtgggttagagagacaaaatttaactcatttgtttgagaaagattttgggtcgggaggtttgtaaaaacggacttcggtttgggaagtgattgattgattgttgtggtgaaaaaccatcaccaaacatcaagattcaaaaaacacagcaattaacataaacaactcaaaccagagattgaaaaactaataaactgaaaaaatgaacaccagatttttaagtggttcccccaaaggctgtgcaaccccgatttagtcacagtttcatagccacacaggctttgataatctttattcaatctcaatcaaacagtacaaagttcgtccaagaactttacaatcaacacacttagttcttggagctcaaaaacacacactcgaccctctaatgctctctctctctctctttctctctgttttctgttttgggagtagtctttacattagttatcacaagcctttatataggctttggtaaaaactgatattgagggagaatgacagttaggacaactaacttaactgtcttcttatccgagtgatgagttggctgcttaggtggaaagtaacttgatcacatcacacaattgtattgttgattatttcatagtggattgcttgagatgatgaggtgaactagagtagcatcaatttgatgtgaaccagcataattgttttgtgttcttcacgttttctgttctgcattatcgtttctgggctatactgttgcttcatgatcgtttttatttcactgaattaaattatattgttaaccaacttgttgagtctaagtggtgttcagattcatctacaacatgtatagctcaattagtttcctttaagaaatttggatcaattcaagctgtatatgcttctattagatagctagaactggtccagttgaaatgctttaagtttaattgttcttgttcgttatgatggtacgtaggttttcttttggggactaggcaaacacttttggagacgaaagatgggggaaacacttgggctccacgctcaattgcctcagcggaagatgaagatttcaattataggtttaatgctattagctttaaagggaaagagggatggattgttgggaagcctgcaatactgttgcatacttctgatgctggagacacttgggaaagaataccacttagcgcccaattacctggagatatggtaatcctgcatgattgaaattcttgcctttatgattgtatggatatatgacatgggttaggttgtatttccaactgaatggagctagtggttcaagtgcttgattgttgttttttaagcgaaaaacaaaaatcgtatacttttgcaaagttggtaatgggttttgttcattccaggtgtacataaaggcaactggtgaaaagagtgcagagatggtgactgatcaaggtgcaatatatgttacatcgaataagggctataattggaaggctgccgttcaggaaacagtttctgctactttaaataggtgtgtttgtgctaatttgttcctctctctaggttccataagctgtcaattgggttggttaacttaaaggaaataattgaaccgtttaattagaaaagctatctcagtctcagagtcaaaattccacttagacttcagctaaagattgtttgctacagaagacaagatactcattttcgccttatttcacttgcagaacagtttctagtggcattagtggggcaagttattacacaggaacttttaacactgttaaccgctcaccagagggaaagtacgttgctgtatcaagccgtggtaacttttacttgacttgggaacctgggcaggtgagatttttcttcttgatgatactccttcatactatactgtcacgttctttaataatctattaatacatacagtaaacactcttttacattatgaacatcaagcttataattttgtgaacttgggtgatttggaaatcaactgaagcatcatcttctagtaattatatctggttgcataagtccaaggccgtgatttgtaaccttattgcattactattttcagccatactggcagccacataacagatcaattgcaagaagaatccaaaacatgggttggagagctgatggtggtctttggcttcttgttcgtggaggaggactatttctcagcaaaggtacaggggtaagtaaaacaaaagcaaagatatctaattttcaaggttcatagatttcaagatgaatacttaaagaggaaaatataggctccttttttccattgctgaaaaagaaaatactcaactgtgcagttatcggaggagtttgaagaagtacctgtgcaaagccgtggttttggcattttggatgttggctaccgttcacaggtatagaattttaatcacaaactcacctggggctgggatgatgactttgacttatgaaacataataattatgtcctgtcctggaatattcaaggaatgattattatttatataaaattaacaggaggaagcttgggcagctgggggaagtggggtactattgagaaccaccaatggtggcaagacatggatacgggacaaagcagctgataacattgctgcaaatctatactcagtaaagtaagcttacggaacaaccttttatttgtttgttttgtttttttctatctctattagggggagaaacattttgacccacgttttcatagttaatatagacattgtcatgtgaggtagacctacttaaaattcccttattattaaacaccgctaaaactaaaagtactatcttttgaagtgtcggtgttaggtgtgttgcccttttaagttgggtattcgtgttatataggtgtgaaaggtgttgttgaattgttaaacaaaataattcatcatattggttggtactcaaaggtcttgacgtaaagaacctcttccaccatttatgcatctgataaaaaacgacaaagaatatttacccttcttggactctgttccatctataatacacatataaaatagattagcaaccaatagaaggaaagtggagaaagaaaggttcagaatttgataaaaaataatcaccaatctagaagttgtaacaagtaacgaggtagggaaaaaagaaagtagaattgttaagcaactaactatcgtgggacactaaaaagttagtacttgcttaacattacttccattaaagaaagccattaatgtccatgattttttggtttacactacaggtttctggatgaaaagaaaggatttgtgctgggtaatgatggagtgttgctacgatatctgggataaagttgtaattaacacacggtaataatctttcctttttataaattaaagtacacctttcggctatttatttttgttcatcatatctagtgtggtgtcaccttatattttaattatgcacaaccaacaatactctgtcttcacttgattgtgtttaagctaatcaaataaaccccccaaaactttaattatattaacacttggcaaaatctgtgcaggtttggagtaatgcttgcaattttgtatggttgaattttaccaattatgattatatattgcttggttcttggttgtgttgtgaatcaaaatatgattatgaggcaaaatctcatctgtttaataataatataatgtaatttcactgtaaagaatatcactgctacttcaccataatattgtttaaatataatattgttttgggactgttaacttaccaaacccactattcaatttggtctcagatttctaatagcaattgttacataattgacttttattggttagtttaattaattcacatctttatgtctcactaatttaggtccactcatctcctactagcttcaattattttaagtaagaattcagttcagacccttgtttctctttctctttattttttcccatgtgctcatacaattatcaattggagtcaaatagttctccaaatcgtctctgttatgtcttcttattttaattgaatataaagaaagaacactaaaatagtgaagttaaagattcttcaatgatttttaacccaaacacaaaaatgtcaattgttttgatttgagttgaaaaagttgtttgatctgtcattttgaccaaacttagtgaatgagtaagcaaagcgtgtatgagtatgcgagccatgaactatctttgtctccatttcaaaccaaaaataaataaataaataaatcaaaaaacaatctctatctttacctctattactagatgacaaaccgtttgagcaaatatggtacacacagtcacacaacaacaacctaatctaaaatggtttcactcatcttttcaaataacaaataatacaatggttaaattttttattattttaatttttaggtaaaagaattttagtttaatttttttttttgatttattgcatatattgtaactagttaagactatttgtaaatttttataaaattaaaataaagtttaaataattacttaacacaagtataaaaaaataattacgtgcaataaaatatataaattttatttcagtattgtaaattattttaaataattataacttatacgattataaaaaataaaaactcaaaggaaatatgtaaatttagcctgtaatggatatgttacatataatattattataaataaataaaagttgcaaaaattaaaagtgatttaagatttattactattattatgttaaataattaagttgatgcaacatgtctccacatcctttatgtgatacatctgttataattgctctttctcaactaaaaataaagtgatatattttacattgaataatcagttaatgcattaccttattttatgtataaaatagttacactactagtagtaggtagtctagtaaaaaaagtggtatgaataataacttatcaaagaataaagggtcttttccaaaaaaaaaaaaaaaaaggagatacaatttaacgccaaatatacataaatggaattaaattgttttattttacttgtgaaaaattgataagaaaaaaaaaaaagaaaagaaaaaagacttggctgcttcttcaatattgtagtccacaaaagtcaaatttgtaaaagagaaattaggtaagtgaaagtgataacgaaattgaaaattagtttacataaatgattaaagcttttatttcaatactttcttgccaaaaattatttttgtatttgtgttgtatacacattaatgttaaaaaaaaaaaaaaatcaccccaatttattataaatggctttaaaaatgattttttttttccaaatttatattgatggctatcattatttatccctttagctaaaacgtattttaaaaggaattaaataaaatatataaatggtatcaaataaggttatcatttatttaatttttttttttaagaaaaaaggttatcattaaatgaaaaaagatattatatatcaagaaaaaataaaatacttgattcttaaacatacaaaataaataaaaaaagaaataataataataa

SEQ ID NO: 377842 - DNA, 13917 bp, Cannabis indica
ttttggttttatattattatgtatacttttgtatcactttctgacctaatacaccttccaagtaaagctacagctcagcagcttcaatatccaacattggtttatacaatattattatacatttaaatatttatattaacacatagaattataaatatgtgtgttagttggaaaaataatgttggagtaaaaatagtagagagagtattgtcatgaataccaactttttttctgtaattatctgtaaagataattgtaatggatgaggaatcatatataatatatatttttgttttttttaaagtgttgcttattttttaaggaaaatttgttggaatagagaatatattagagggtaatttgtaatatgtggtgcacattatttgtaaatatacgtatagagttgagttgagttgagttgagttgaggggtactaagttaattaataaatgtgagttgtcctatatataatttaaatgttgtgatttgtgtgtatatataatatgtatagtaagttggttatgggctagacacgtagtatttatgaccattatctcacctaaatttcataccaaatcactctagactttggctctatgttagtcatttgctacaataacaaatgttggttatgggttaaaaagatctatttagttggagtgggttgaagttttaatttgatggatcatttctgatccaaaacattcggatacttattagattttagatcagattcgctttgctccgaacccagacccgaatctcttgggacctgggacccgaacctagatcccttaggacttgggacccgaactcgcttgggatctaaacttggacccaggcccagacccggaccaagacccaaatatggacccggactcgactcgggacccagacctagacctgggacccgaacccggactcaagacctagatcatgactcgagatccagatcgagattcgggacctagggcctagactccaaacccggacgagactcgaactcagatccagacccagactcgggactcaaacccaaacccggacttggacccgagacccgaatttgggactcgaacccaggagccagactcgagactcgaacaagacccagacctggacttgaactcgaacccgaactcaaaaatatattataactttacacaatctattaatacaagtcaataccaaacatattgtattaaataataataatacaaaattaaaatggatataaaattataagcttatatatataaaaaaaaattgatcggatcagatccaattcgagtatctaatctagcggggcggagtaggacggatctttacataatttgaatcaagtcatatcatagtcagatcatatccgacccgatccatttacactctaatgtagtacattatatatatataagtttccacactttagagttatggagtagtgatgagtttccaaatacaaaatacatcttgttgatataagtagtatttaattaattatgtagtctcatacttacagaatctcaaaatcatcacttgacttttttcggaattcataacttacctgttatttttttaaagatcataaaattactgcaattattaattattggagtagaggctctttaaatattataacaacaacgattctttgaaaataataacactaatatttgaagtaattaacttttacaaatccaccttttgaatacattattcgtgctaagccccaaagaaaattaacaacaatcaccaatattcaacaaacatatttgatgaattgtctttagtattcacttctttgctgccaataacatctcgaatgaaatgaagtttaatgttcaatatgtttttgaacttttatgaatcatggacttcttcattaagtgtaaatctgatttatctaccaaagtccaaatttgattcttgtagagatatgtcatttcctcttgaatagcaagtaataatttgttactctacttactattgatcgcttcttgataagtggttggtttttaaaacactccaactcttctgcaacaaacaaagcaaaacaagttaagtctacaatatcaacaaatccaaatctctcgagtggagatgaatctcccttctatctcaatctcttgcaagctgatatgattccagtacaccttgagatatttcaatatcaattttcgatgtatttcttccaccagaaatggtgcttgaaacttctctaatcttcataggtatttccttcttattaaacacaatatctctgtgaactatatactaagcaccacaagttataaccattaacatcaaccaagtatcctaagaataaacatttaagaacttttagctgaagtttgacctatttttcttgtggtttgagaaagttaatagcaactaaaagacacttattcaccaaatatcaagttgtcttgtgagaatctctccaaaattgctactatagactagcacattgaacatgcatcccactatttccatgggtgttatattcatcttttatgcaatgtatttcttcacgcacaatcgtcatcaataatactcatgaagtaactaaattcacctaaatcctttactcttgaattgataaatcattaaaaatttgaaccatgtgcacatgtctatttggcatttaacaactattgattcacaaaaacttaaaaaccaaaacataatcaaagtttagatgtttttctttcagaaaaaaatagtaaaaagtgtattgttgattctaaaaggtagccaataccagctcgctagattgacgagatgaataataaatgtaagtatataatttatagagacacaaaatttataatacttcactccccatgttgcgatggtaatagaactacgtttattttagatttttatttctcacgagatggtaattatagaaaaaggctaagtatttaagctctaatttctagtatttaatttaaataaaaatgagccaaggagctctccttttataggtgaaggagacccataaaaatatgaaaaaaaattataaattagagatgatgatccaatggtgaaaattagcttctaatggtgataatcatttttcggagcccagtaggacccgtcgtgggtaacccgaagcttatttttgtaactctcttggggtgaaattttaggtcaatagcttcagaatttcgattgaagtgtgagacatgacttgatatatcattaaaatatcttcgaaacgtaagttaaatcgtgtcaatcggatcaatattgagtgacttatgactattttactgaaggtatttcaagacccaacgaccatgttaacatcataaggcccaggttgacgtcctaaggcccaggttggatgacgccaacctggatgttgggtaagtgtaaaaacgtccaaggggtgcactttaagatgtttaagtgatattttaatatcacttagtctcttgatgttctagaaaaatgagagactcgaaatcttcatttccaagtaagtttcccatgctagaaagaaaaatgcgaagttgtgaatttgacatctctgactttatagatcttagttattgtgaaaaactagacggacggtcgaaacagaatcataattgaaaaataagaacccagtacaccaggccatttgttaacctggcattgggtaccccgttttctgagctctcaagttgtcgttttgatactttcaaggttcttgaatttgaggacggtgtctcctatcctgtttttaaccatttcgggtttaatggtcgaattggatttgacatttgagtgatcgaaatcaaggcaccaggttgattgtcaacctaggcgatgggcctagcaccagatcaacctgaggtgttgggccttatttccaggggctcaagtttgtgattttctccccgagtttgcttaaatcttattattttttatgacagaaaaatgcccgaaacactttttcgagaacttgactggaaacaacctggttgacaatatgtcatcctaggtgttgggtctcaattatggcccttcagaagttccatttggtccttagaaatagtttaatcttaatcttgtctgaaaacagagaagatgcttagaagagttctcaaaaaacatcattagaactgacataggctgagaaaatatgaatttgggtgctaagccatccccaggtgtcaacctaggctccgggccttacttttgacacccaggaagtgatgtttcttctccaaaagtacctatttccccatttttaatgaagacaaagaagatgcaaaagtcagatcatcaatatgatacgaaggtgtccaaattgacaaattgtccacttgggcgctgggtgcccgagcactggatgctctgggtactcaaaaatgaacttgctctgaatctgattctgatgcctcaaatatgtttatgatatgtctagttgatgtcccaatgcaaagttttacccatttacactaagacagtccttgaaacaaaaatcctaattgggaatgtcaacttgggcgtcaagtgaaatcctaggtgctaggtggcttccaagggtgcagcttcgtgtaatttcagctctcggggcctggatttggttgctctatgttttcatggtacataataccgaaagatagtgagttgaaaacgcgttattaaagtccaaaacttctattctagagttcttgaagtcaacttgggtgtaggactagggacccctcccatgtcgacttgctatgacttaggactacttaactctgagatgtcatatttcttgctacacgtcaaacattgatgtctacgtcatcaagactacttttggtgtaaacatgtaccaataagtaaaattaaggtaatattactgcaaatatcccttagtttttaggatgttttcaaaaaaattattttttttatttataaaatataattttaaaagttttaaaattacaaatacgattttctcaacaaaaataaataaagaaaataactaaaaaacaacaagaaatcaacctcacaacaattataaataaataataaaacaacaaaaaataataagaaaactaaccttatgacaactataaataagctagtatacaaccaaaaaagaatatcgaacattttgatgaagtcaatattttcataaaaagtgatttgcgacgtaaatacttaagtttaactctcagttgtagataaatatctaagtttaatttttgacggtaataacacctaagttatatttttgaaacttctgtaggtacctcattgttaaataccaagtcaatggccacatgagagttcttgaccggtctaagtcattaaatttttattttttatttaaaaattcatttaaatatactaataagaaaataacacgtggatattaacttaacaattaatggccatatacaagttaaagcttaatggtttatctacaagttaaagcttagttagttatggtgcaaatttttttaattaacattttttttaagtttttgatctaaagtaaaagtttatattttttttgagtaaaagtttatgattgggaagttggagagagagagagttttgttttgatttgatttgatgacatagttgaaagcatcgaaaatcttgagcctctcctcaacgataagagagtaagagaaacacaaacaaatccaaccaatcaaaccactcatcatcatatacacacacacacccacaccaacaccacaacctcacttcactcatcaatggcttctgcagctacacccaccaccggcttctccctcctccgccaatccaccaccacttcccgcactcgttcttctctccttcaactctcaccctcttccctccgtctccgccccaccacactccctcgcctcggcttcacagcagccgaccctcttttctcccacgccgtcgcctccacgctccgctctttcggctccgccaatggtggtgggactccggtcaggggagttgtctccatggccaagaagagcgttggggatttgggtgctgctgacttgaaaggaaagaaggtctttttaagagctgacttgaatgtgcctttggatgataaccagaacattactgatgatactaggattcgtgctgccattcccactatcaagtatttgactcagaatggagctaaagtcattctctccagccatttggtaatcaatttttgactaaaaatcttttcttttcttttccattcatttgatttgattcactctctaactaattaccagggttctttgtattttgaactataaaaagcttttcttttgcttttgattgactctctaattatttatcagcatttggttgatcttctgtggtttgtgtagctgctaaagttggtttttttaaaaattgatcttatgatggggtatctatttttctcttcaattttgaactaaaagccttttcttttgccttgattcactctgtaattaattatcagtatttttcttttgaatggaaaaaatgcttatttaaccatcaaactcaactactaaaaaaggtagtaaatcggttgaaacagactccatacagaaaacgacaaccatgataaaatatagaagcagtagcaagcttatgaactaccacatcagctcattgcttaacaaaattaacataaacagaaatcaactctgagttgtttaattacttgtcaaaattatcactatttggttcatcttctgaagttggtttttttaattgatgggggtatctatttttctgttcgattcggttgtttttgagttctcatattatatatataaatattaatcaaatgtatgtaccaattttcagggacgaccaaaaggtgtgacaccaaagttcagcttggctcctcttgttcctcgtctttctgaactccttggcattcaggtaacaaaacaacacaactgagacaattatctggattggatttttgtgattgatttgattcaaagttttgtttttgttggtttggtattgaacaggttgtgaaagctgatgactccattggccctgaagtagagaagttggtggcttcacttcctgatggtggtgttttgcttcttgaaaatgtgaggttttacaaggaggaagagaagaatgatcccgaacatgctaagaagctcgcatcattggcagatatttatgtcaacgatgcctttggaactgctcacagagctcatgcctcaactgagggtgttacaaaatacttgaagccatctgttgccggttttctcttacagaaggtgagactcaactacacttgcatatatttcccttttgtcatttagtagatgatttactgatcaggttgttgtgatcttaggaacttgactatcttgttggggcagtatcaaacccgaaaaggcctttcgctgccattgttggtggttctaaggtctcatcaaagatcggtgttattgagtcactactagagaaggttgacattctacttctcggtggaggaatgatctttacattttacaaggcacaaggtcttgcagtaggttcttctttggttgaggaagacaaactagatttggcgacatcactcattcagaaggcgaaagccaaaggcgtttctcttttgttaccctctgatgtggtgattgcagacaagttcgcccccgatgcaaacagcaaggtttgccctccaacaatttcaaagacatcctaatactgctttatttgacattgatgattaattgatttaacctatggtttatgaaatttcagattgtaccttcatctgccattcccgacgggtggatgggattagatattggtccagactccatcaagacattcaatgaggcacttgacactactcaaaccatcatttggaatggacctatgggtgttttcgaattcgacaagtttgctgctggaactgaggtatgcaagaattactttccccttgagctcacttttgtttctctatgtttataaatctatgtattgtattgttgctattgggtgccagtggtgcctaacaatacttaattgtaccaatggtgatacgacaccttggagggtactagacaccgctgcatttttgcatttctcattgtattgacatgaggttttactatttattacagtctgttgcaaagaagctagcagagcttagtggaaagggagtaactacaattattggaggaggagactcagttgcggccgtagagaaagtaggagttgccagcgtgatgagccacatttcaaccggtgggggtgccagtttggagttgttggaagggaaagaactccccggagtgcttgctctcgatgaggccacaccagtagctgtgtgagaaccgaaccatcttattaatttccttttaattattcttgaatgtttttatctgagtttgtaaacaaaatgtggtagagggagatttgttgatgttgttgtaaatgttcattgttgcctattaaggtcccattctcttcttcctctctcccctactatattatattatatattaagaaaaaaagaatgaagaaataactagtctactgcaagagactgtagagttacgaggagagttattctatctaataaaagtgatctttttgccatgtttgttgaatcatgattatggttacaagttgatatgatttttgtttgtggttacattattgaagtagttcatttctgatctaaatgtaagccacaacaatgaaatgagagacctatgattgtgaggtcagtgcatttattgaaagtggtatcataaccttacaaattgtcaatttcgataaacgggtatctatggttaaagctcaaccattcctttttcatttgtattgtattgttatacaatatctacggttcaggtggttcttgtgaaatggacggtagagagaagagcattgctatagtgattagcggtctcatcaaaatttgtgggacgtagtattaaaatgcatcaataatggtttgtcatcttttatagtatttgacaccttaagatactccttagtatttctcgtaaatagaatgattgttgttggtttagtgaccctacatttccatttcacccaaaaaaaacaacaatgactagagtctagagcacaaatattatgcaaacaaagcaaaggatttggaccaagtgaatgacactatattgacagagaaataggcctaaactatctttctaatccgatcgatcgatataatcatgtttttcttgaattattatatcaaataaaaaacaaatgttatttattaggtggcaattggaatcaaaggagcataacattcacaacaacttgagccctttttactttgtggctcttctacttcttaattggttgactcttggtagggaataagactaagggcatcatcaatcaagcatgtcatatatttttatttgagctatatgaggcaagattagtgttgctctacttatataaaatcaatctaatttcgtcacacacatataaactcatgtctatggtcaaatacaacaaattcagtacataagttacaaaaagagttaataaaaccatgatatatgtaatgatatcatgttttgactaaaatatgatatattatgaggtagatttgtgttgctggttttcttggatcaaaggtaaaaattttacaatctaaagcatggtttcaaaacttgacaactaactcattttcttgtaataatacaaagattaaacatagttgattttcatatacaaaattcaatgtgggaaattgagaataataaagagaatatgctggctaaccaagcccaaggtttcattgttatcacccacttttaagaccacagactttacagtgtaccaccacctcactcacacggttcacacgtgtgactgaaacagcctatatatccttctcgaactctcccactcctttgatctatctcactctttaaccaaacactacttttcaaagctctctttctctattgtaagttccaaagtttggatttttctttgttatttcatctgatttttgatctgtgtttgtattgattgttttaataaaactgattctggttttgaagcgattgattgcgatggccaccaagaggagcgttggaactcttaaggagagtgagttgaagggaaaaagggtttttgtgagggttgatctcaatgttccattggatgacaatttgaccatcaccgatgatactagagtccgcgctgctgtccctaccatccagtatttgatgggctatggcgctaaagttatcctatgcagtcacttggtcagtcattctctgccttgtttcagttttgaacttagatctgtatcaatctcgttgaatcttatctctgtgtgtttatcttgatattgttagattaattcccaaagctacttgtttctagtgttttcttagatctggaaaaggttggctgtttgatcagaatcagaattgttttgagttctaaccaattttttattgtttattgtatgaaggcctagcttttttcattcagtaaaaagcaattatgccgggtctcttgatatgttgagttttttcttggaaattgtgatagttctggatagagaaatggctattctattctctagagcttatcttgttcttgtctgtcataattttcttaataaaatcctgttcatcttgctttgttacatgagtacgtataaatcaatgttttgtttcctcatgaatttattattacctttattatttcaggggcgcccaaagggtgtgacacccaagttcagtctaaagcctcttgttccaaggctttctgagctcttgggctatgatgttaagatggcaaatgactctgttggtgaggaagttgagaagttgattgccgagactccagagggaggagttgtgcttcttgagaatgtgaggttctacaaggaagaagagaagaatgatcccgagttcgccaagaagctagcttctcttgcagatgtctatgtgaatgacgcattcggtactgcccacagggctcatgcttccaccgagggcgttgccaagtacttaaagccttctgttgctggattccttatgcagaaggtaataattgatttaactaacacttattaccaacagtttccagctgagtgttttacttatgtatgtaccattttacttggtggttttcaggaacttgattatcttgttggagctgtggccaatcctaagaggccatttgctgccattgttgggggttcaaaggtgtcatcaaagattggagtaatagaatccttgttgggcaaagtaaaccttctcttcttgggtggaggtatgatctttaccttttacaaagcccagggttatgcggttggatcatcactagtagaggaagacaagttggagctggctacttcacttatggaaaaggccaaggcgaaaggtgttacgattcttctcccaacagacgtggtcatcgctgacaagttctctccagatgctaacagcaaggttagtaatagtaagttgggcttggtacattagtggtcattttctatttccatagtaatatgctttctttgcagattgtgccagcatcgagcattcccgacgactggatgggattagacattggcccagactccatcaaaacattcagtgacgctcttgacaccactcaaactgttatctggaacggtcccatgggagtttttgagttcgaaaagtttgctgccggaactgaggtacaacaagaaaatcattattccattgaatttaaacattagtatttcttagtattgctttatataactgacctgagcatgttcaatgtatatccatccacaggccgtagccaagaagctagccgagctcagtggcaagggagtgacaactatcattggaggaggtgattcggttgcagcagtggagaaggttggacttgcagacaagatgagccacatctcaaccggaggcggtgccagtttagagcttcttgaagggaagccactccccggagttcttgcccttgacgaggcttagggggtttcttgtttgttgattccccaagttttcctgttttgcaaaattaatgccagttaaatggttggtttttcaaccagaggatgatcttaattatcctgtagagagccatatagccttttagatcagaataagtgcttttctttctcatggtgtgtttatttatatttttcatccatgaatgaaaacattgcttttttttggaggaatgtatctctttgggaaccatgttttgaactcaacaaacagatcgactccaattaattgatgaaagtatgtttatctttctgcaatggaaaattgcatatcatcattgttatcttttctgctcaaactaatatacaaaagaaactacaacatctaaaccaaacgacatgaaggaaggaaatgatactactcattgaaacaagttccattccatgcataaaaattcgaaaaagaacaaaattaaatgcattgcgatcgcgatgggactcgaacccacaatctcccgctccggaggcgagcgccttatccattaggccacgcgatctttgcttttgctttagtttagcaaatataatatttaaattaaatgttgtttagaaactagaatatattttcttttttgaaaaaaaaaaactagaatatatttagtttatgctttgtattactaatattccatcatttcttttttatcaaatgtattaattatggatttagagacagaattccattttcatgatcaacaactataccatttctttccattgtttctttaataaatatatttatgcatattacatgtgtattatttgtgataatatagatgaatctataatcaaataagcatagtaaattgcatttttaagaacattgctattcagcttcttttctttatttacaagtgatacgttatgattggtgagcgatttcctaaaaggtattctctgctagacaccaataataccttttagtatttctctatttctaaatccatgtagttttctactttttagtagtatttatgaaactatggaagtttttaattagtttattaatttaaaaagcaataaaaattagggctgttcataaagtatctaatttgatccaatttgcaaaatgcgaattttcgcacttgtgcagattagattggattaaaaaatttgaaatccgcacttatgcggattggatgttgtttaacctcataagctaaccgatcgaatccaatccgcacttaattatatatatatttttaaaaaattataaaatatataattttattatattatatatttttttgatagcatatatttattatattatattattctatagtaatataaaaaaaaaagacaaacctaatttctaaacctaaatataatccttccactttctcttctcctatacccagccgttctcttcactgaactcaaacctaaaccaaaattttcttctcttcatcactgtcaatctctgtcgccgttcaactcaccaccgaccaccgaccaccgactagtctatctcttcagtcgacggtagactccactcgctgccctcgccgaccagtccagaacttcagtcgaggtctactccactccctgccctcgccgaccttagacaaagggttatcatttgaaagcagggcttgttattgaaggtatggaagttagacccaatattattattaagcattaacaaagtgctgtttatttctttttctaatattcattcttccagtttcttgaaataaataccatattgtttgtttgatcttatgttcaaattcaagattggtagcccacaagatgtttcaggggtgtgactacgggaggttcgagcctcttctgggcacattctaggccgtatttagttcaaagtcgtcaatttcaatcttgggtttactcttgattttataataaatcagttcaagtagtagacaaatgtcagttcaagtagtagacaaatgttttggagtttagttgtttaa

SEQ ID NO: 377843 - DNA, 3562 bp, Cannabis indica
caaaaagttcattagttggcttggcaaaagttatgtttcccaaaaaataaagaaggattaggcttccgttcgtttgtatcccataatcaagcattgttagttgcacaagcatggcctattctgttgtctcctaattctctaccagctctcatttttaaagctaagtactataaacgtactgattttctcaatgcagaaggtatgtcttttaagatttatttttggaaatagattttgttatttttttttatttccaatctaggttgtttaaaatgagatactatggtattacattttggatatcttaagtttacagtttatagtgcagtttttttaattatatcattataggaatgtggctgaatttagcttgatcgactcactggtgaatgaattgagttctgattaattacataagatataggtgaagaatattggatctaactttcaatattctttttcacaattctttttataggaactacatactgttgtttctattgtgatgcaatgatagtaattataatttttttttattatttttgttcatccgaatttaattaaagactaaaatagaacaaatggtttttgtaatgcttacggtgtattccttagtactctatttgaccaaagattctaattgtaagtcttttaacatttatattgggttaaatgtaacatacttacatatatataattgagttctacgcatatttattaattataatactgatgattcattttaatgataagttgcaattttattaagagtttttttaattattttaatgagtatgaattccttgattgctgactttattttagacattataattttttatttctttattttcattccagagggtgatcatcctagttatgtctggaaaagtattatttggcgacgtgctttacttacaaaatgattgcgtcgtcgagtaagaaatgagaatagtatccatatctttaaagatccttggctacccagaccttattctttctaccagtaacaccagcgggacaaaattatgaaatgtttgttaaagatcttatgaaacaagaaactggaggttggaatttttcagcattggattctatatttaatcgggttgatcaagagtgtatttgctctattccaattagtaagttctcaaaagcagatagctagatgtggcactatacaaatgatggtaattattcagtaaaaagtggttattgggtggcttcaaccagtgattctgtagatggttttccctctagagaagtcttttcatcttggtggaaaagtttctgaaaattgaaattgccatctaaaatccttaattttgcatggagaggttttcatgaaatattacctaccacttgtggcttaaaagagcgaaagattgttttacagtcgacctgtcatctatgtggttttgataaagatactaatagccatgcgatttcctggtgtagtgcttttcgacaaacttggaaactcttgcactttagttttattgaaaatgtattagtggacgtgagttttcaacaagttctgctgagagcttcagatgtgttttcccagtcagattttgagttcttcactctttcggcatggtatatatggggtgaaagaaatagtatctcacagaaaagatgtgcaacatccaaatgtgattctttcaagaattaaaattccttcggatgagtatcatcagattggaaaattacctatatccacttttactaaaggctgtaattcggctgctacatggtcagccccacctattggctgtttcaaattaaatgttgatgcaacaatcgatagccatactcaaacgattggaataggagttataataagagattcgagtgttctatagtagcctctctttgtaaatcattaatgggtaattataattataatctagtaaatttctaaaggaaatcccctccaatatatactagataattatatatatatttctttatattctatattatatattttacttgttataattttttaattttaattagttttattttattttattattactatcatgagtaaaagattcttgttgttagtttatcttttacaggttttattttctcagagtgttgatgttttgttttgtttttcatgttgtttctcagttatccaagcagagtgtgcggctttacttgtagctttggactgggctcttactattggtctatcattacattttgttgagtctgattgtttagcagttgtaaatgcattttcaaaattctcttccttccttaatgagcttggttccttattagaggatctagctagtttaatatccagctttcctgaagtatccctaatccatgttcgtcggacagccaatggggctgcacatggattagctcggcatcctcttcgggtggatagaacactagtttggtttgatgagattccttcctttgtttggagtttcttaattcttgatgtttgtatgacattatgatatctttttcaatgaatttattcattgttacaaaaaaaaaaaaactgcttcccattatctaaaattagcttgtaaggaatgccaaaccttcagataatggctcgatacacaaactcgtgtagttttgctactgttattgttgcaaaggcttcaacctcagcctatttggtaaagtaatctacagcgaccactgcatacttgactcctcccttgccctttggcagttcgccaattagatgtatgccccaaattgtaaatggccatgggctgatgatataattcaaattgctcggtggtttattgatgtatgtggcaatgcgttgacatttgtcgcatcttttagcaaaataaatcacatctgcacgcaaggtgggctaataataacctttttacatgatctcagggctaaagagtttccaccagtgtggttaccgcatatttccctgtgcacctcatggaggatgtagtcgcattcatcaccatcgatgcacttaaaaagtagctggctaaaacttctgcgatatagcacgtcatcgtaaataacgtatcgagcagcttaacaatgtaatctcttggcttgagcttatcgtcaagaagcttgccaattttcaaatacttgatgattggattcatccaagtggtttgctcgacaacatctatctgtctaacttcttctcaatcaatcgtgggttgatcaagtatgtccacaagaataacattgagtaattctacttcttgagttaaggccattcgggccaaagcatctgcatagaagttgtaagcacgaggtattatactaacaataattttcttaaatttagataacaattcacaagtataagcgaggtatttatatagccaccctcgtcaagccaatccattgacctgacagaccacgatctaggaatcattatgggcttcgaggtactcgactttcaattcaagtgcgagttttaatcccgcaattaaggcttcatagtcagcttcattattggaggcattaaacccaaatcttaaagtcgcatgtaacaccctaactagcataggcgtattacatgatttttaaacatgctgtgcag

SEQ ID NO: 377844 - DNA, 6346 bp, Cannabis indica
tcatagactgcacgtaacacttatcaagagcaatatagtcgttgcatgatttagttcgtgatattatttatcagatttccgtttttttttagtttttttgagtaatgtgcgtcgatttgctaatgagacgtcgtatgatatagctaaattttatcttaggatggatactatattatttggcgagagatattcctgctcctatttatttgtgaactctctcattaatttatatcaagagtcgttctctagaaaaaataataataactattgatgtgtttttttaataaccttgcgaaaaaaaaagatgtactttcttctagtccattctgatatctcaccaaaaacagtagcctcatttctctcacacatggggtgacactcgttgtagttgtctatcagcatatcctattctacgccacaaatcttgcttacaatgcgcactctcctcacccttaggccgccaccgtccccatgcctctcctccctcactccttctgcttttctctacagctttaggcccaataagcgcttctacttccttacgccatgttcttctcttaaacaaaccaagaagcagactcttcagaagaacactggcactcccaacagtcctccccagagccaaaaatggctctttagtgaccccgagtccgacaaagacgacaaaaatagcggagacggggatgatggctccgagggggacactgcgcttaaagggaccattttggctgggttgttgctggtgggtgttgtgggtgggtttggcgctgtgggttacatctacaaggaccaagtcaactcatttttgactcaattttctacttttattgaaggtaataatcaacaaattgtgcaccctatcaagggtttatgctaattttgtggttgattttcttggtcggtgttgatcttcaatcatttatttttttacccgattctgttgaaattcttcaatttgggaatgaagtggatacaacattgactggattttgagatatgtcgatatttttgaagaaatttttgaagtggattatggatttaatactttggtattttggtattgatttttaaacaggttatggtccagctggatatgccttatttatagcagtatatgccggacttgaagtacgcatttgatgctcattccttaataatctctttttaagcattcatccttttaagtgtgctccatttgccacttgttttgaatatttacttaagggtctcatgtaaatacagtgattgatcgatgcactttaattttcatttcaatggtgtcatctgaatgtaagtgatttatgtttttgttaggttcttgcaattccagctattccattgacaatgtcagctggtcttctttttggctctttaataggcacaatcattgtctctatcagcggaacagtgagttagtttctcctgcaagttaataggaattataactactactcctgccacatgtgttctgacgatttggcttatatattgttaaccctttccaggtagcggcaagtgttgcctttctcattgctagatattttgctcgcgagagaattctcaaactagttgaaggaaacaaaaagtttcttgctattgacaaggctattggagagaatggcttcagagttgtaccctgcttcgcttaagccctttgcttcctttctctttgggcaactatcgtttatggtttgacatcggtgaagttcgtgccttatgttttgggaaggtctgttacactttatttccttccaagagaaatgctaaatacaccatctttcacattttctcatcttaatgatgcatggcattttcacatcaattgtatatttgcattgaattagtagagttccaacagtaatatgtgtaaaaaagagagttctcttagcattcttcaccttccaaattgtacttctcaagtattgaaaatgcatattatgaatgacacgttttaaatttgtggtgtgagggtatatttggtgataagccttcactgctacattcagtataagaaaccataattggagggattgacatataggataattaaggaaagatttgattgttcatcatagaatcattgtgattgtcctatagttagatatatttggtatgattatgagaataaatttgattagggtgtaggggaatgggtacaactgcattttgtaattaagtactagctcaagaggaaaactaggtctctcaaatttctttgtcattgatagtttattctctaagatctctgttattgaagatcactattgtggtgtatcaagtgatattggagccacatatggaggcacacgtggaaacaatggaggaaatggtgttatggtgtaaaggaacaatattgaagaaattatctacaatggagcaaggggtttctacattggccaggtagttgtttgaccaattcgttaatacctaggaggaggtgcaattatcatttgatgtggtcaaatgggcaaggatatcgacagagcgaaaatttacctaggttgaaggaagcaccatttattcgtgtggtctacctaagacattgatggtgctgagatgggatacacaaacatgattcaatggtcataattcagatggttggatcttagaagtagaatgctattttcaactcatcataacacataagagttggaaatgaaagttattgttcttgaagatgagggtttgatttggtttcaatgggagcaccaactgtgaccatttttgaattgggaagacttgaaggcccaagtgattcatcattttgaacctcttggtaggatcaatgtaccgcaagttcttggcactcaagcaagagaccaccatgaggcatcatcataattgcttcatgtcattggtattgtacctagaatgaatatcaaagcaagtgctggagttgaggtcgaccttaataaaatggttacaatccgcgatggggtaaaggttactacatttggtccaatggactttgcccaaaaggtgggagcaaaatttcaagcccaatataggcaccaatttagtctcgacaaaaattgaaatccaacaaaagtgagattgtgggttgttctagttagccattgctttaggatatttattcttcaaaaagtttacattatagaaattaaggaggccttggtttgccatgaggaagtgagagtcaagcaagagccactcgagttggagaactaagtggtcatatgaaggtactatgaaataagaaggcttggtcatgaaatgatgattgagcttgggatactatattggttgtgctgtataggttgagtaaacacacccatttttattccattgaaacatccatctactacttgcattgtcacggagctgttctaaaaagaagtgattggtttcaatgggataacaaggtagattatttcaggtcgtgatacgtttgtacaagccatttctggctagagctgttccagttgcaaggcacagcctcagcacttcatatcatcctcaaacgcaggccattggtacatcccatataggtactcagtgagacctcaactccctagagcaaagctatttacgaaaaatcactcaaccctatttccccattcttatggcctcctatacatgctatcctatttaagctcatccaccacctttcagtaagatgacccatatatgctctttatgtcctgtatcttattaatatccagtgtctaggcagagcaacaaacattccatgtttctttggaccctttgaagcggtctcttgcattggggaggtggcttatatgctagtgttaccagcaccatctaagttgcactcaatttttcatttttctcaacgctcatggtgtactgaagtcctcaccactgctgcttcatgtctgatttggagcagatagttaaaccagcagaggtgcggtacgcataatgttacgttgatcaaacggaaggacttacccctcttttaggcaacatgggagaatacagcaacttacaacagcagtgtccttaatttcaccttgaagacaaggtggctgagcggggtgatgacacctacgaattgcgtaccgaacaataattagggaataggataataagtaaagatttgattattataaatcattttgattgttttatagtcatctctttttggccaagtttatgagaataaactagatgagtattttagataacaagggtatggtatttgtttgaactaagataatgaggcatggttattgtttgaaagtaggtcttttgcgttttgctgtgttgtgttaactttttttttttgttttgttttgaacaagtgttaacttgttttttattttaataaataaaacactcttattctttaaatctcttgtttcctatttcaaattcactattgtggtgtatcatttgactgatttgaatatcagtttccatcttattttggggatggtttcaaagtatttaaacatgctgtgttatgacaaaatgcagttggttggggatgcttccaggaacatgggcttatgtgagcgctggtgcatttgggcgagcaataatagtgagtggtttcggttgttcaaatgatgatgaatataagctaagaaagttggatcaaatttgctgtatattttcatctttcaattttcttatatactgtgaattaatatttcagcaagaagagtcagaggttggtttggtcagcgggaacggtcaattattgacgttaggccttggattgttagccactgctttggctgcagcttacgtgacaaaacttgcaaaggtactacttgttttgataaattctttaccatagaataattagaacttagattagggctagtatttaacaatcaaagaatactataattgaactgaaaatccaggaattatttcattaactgttcattcccgtgtttatttactcgtttgaaacacaattctatagaacttggcattgggagggaattgcttgtatatatatatatatatattttttttttttcgctttagatattttttcagaatggatagtaacttgttctaaatgtagcatagacggttgaaaaatattgcatgttgatttgaatttgttgtgtgtatatgtattttacatatgtgtgtgtgtatcgttgtacttgtaggtatagttgtagttaacaatggtatataaggcttatgttgcctacggtactctactctcttcaatggagaagttcccttgttagaatttctcacccttaatgtcgaaaaaagtagtacataaaattatccatatacattaattagtttctcatttagtagattttttttacctttattggatatttaattatttcaatacaaagcccctaaaataatgtcaatataaagcagcttcactatccatttatacatacagttatttttggagtatttttcctttttgatgaaagaacattgagtcaatgattgtatgttatatttatgtgattctgtagccgtaaattttgtgtttatatatgatatttgcatattgattggttgtcgttttcatttgtgttggcacaggatgctgtaaaggatattgagtaggcacgggggcctttgcttcccccataaagtgtacagcaatataattaaacttagaaattgcaaaacgaatcactgccatgtaaatcaaaccatttgattctaaacatatccaatgatgattacgggttgggaagtgggaacatttataatttattgtatatttatttcatattattcttagaataattagaataatttcatggtggtgactatctttttgtctttatactatacatatatatattttttaatcatttatctatgacttttaaaagtcaacacagtgtaatatgtatttgtttgtagcttattaaattttttatgtttttttaaaaaagtagacactaaattaaaaaaaaaattaacaaccgattaaaattaattttatcattcaagaaaataattatttaaattattttttttgtaccaaataataattttccacgtgtttaaaaatattatttcatgtaaatttttcattttttttttttgagattttattacaaacttcttctaaacatatatttttctcatttaaattattttctatgaccaaaacgattatgacaattatttattttgttgaaataattaattagtgaaaatttttcttatcctaaaataagaaaataaaaagaggagaataattagaagtggaactaagataccataatattttacaagtaataaattttgacttatataaaaaaaaacatgtaaaaatgtagatgaacaaacagaaatatggtatttttgaaaaagagagaaaaaaaataattaattagaggaggtaagaataaat

SEQ ID NO: 377845 - DNA, 6656 bp, Cannabis indica
ttgtaagctcttattttcagaacttgataacatgataacctagttttcactttgtcagataaaataagagagctctttctaatttttttaaaattctttagcttctctctcttgatttgtgccctataatgagagagtacttttccacacattttaagtcagtactcaaatatagtgtggacgattgtgaagaattttgtcacctaaaggagaaactaggttcaaatcttgatcatactttgcgacacaaaggatcaagggttagagatctgaatggaaggagtcattatattctgctgccactaatgtaagattttctataaatttatatctgtttatttcattgttttaggaaatttatatttaggatgttagattatagtcttataatcaaacatacatgttggtaaatctagatcctggtaaaatatttccaacagaattttctttgattccaaaattattcttcttaaaacttttgttgagaaaccaagcataattcttagccaaaagagcaaagtttccatccgcaaaatattcagacaaacttgaatctttactgacttcctccttatgaacaaaggcaaccctattttcattcttgtcttttcctaaatctttatgtttcttgcccttactccacctttgcaaggtcatctcatagttttgtaaggaactaattagctcatctagatcaagagcttcaatgtcctgaatttcctcaatggaagctacttttgacatgaattttttatgcagttgcccaagaacctttctcaccagcttcttattagagtatacctttccaagagcgtaggactcattcgagatatcgcataatttagcatgaaactcagccacggattcatcctctttcatgaacagattttcaaaagctttagctagagctcttaatctggctttctttacagcctcgattattccttcatttttaatcttcaactttttccatgcctctttagcgatctcccaatttgagatgaccttcaattgattggtggagactgcattgaataaagcatgaagagcgtttgagttaaagttggctctttccatctcctcaggcatccactcatttgttcgtttagccttcacaccttcatcatctgataccgtgggaggtgaccaacccttagctatcgccatctagactctttcatcaacgatctttaagaacactatcatcttagttttccaatatggataattggctccttcaagcataagaggtcaagacgtggaacctccttcacgtaacatctccatttcttattgatctacacacaacacaaacaacaaattcgttgcactgtaggatgaatcctgaagtggatcagttttccaaaaaaacaacaagcaacaacttcgttgcactgggagatgaatcttggagtggatcagtttttcgaaagcaataaacaataaaagaagaattgaaacactacagaatctaatcaagaatcaatcagtagcaacaggatctcaatttctttacacgaaaaagttagctctaataccaattgaaaaatcgatctaatcagatgctactaattaaaacaatgacattcaatcacacaatataaaacctagtagtttcactacaaaatttcaaggattattaaaagctaaaatgcagaaagtaaatcaagataaacaccatagatttacaagtttcaccagtcctagcaaaacattctaggcatctagtgcttgggttccccgaaccaaggtaagtaacctccaataagaatcaatatcaagatacaaactccagtgtgtaaatcaaatgtatgtaaaataatacagcaaagattcttacaacaatttaccctaagatcttgattaaccagccaagattcaaatctaagtccccttatattagaagacaagctcctcttgctttgattgagctaaatcccttcaactatgactctgaactcccttcagatgaaacaacctccattatcacttcatcacagaagcttgaactcttccgcaatggaggaacctggaagaaagaaagaagaagaaaaagatttctgccctagcagaaaaaaatctctatgaaagaatcaaatgagtaggaattggttagaatattcaagaatcaactatatatatcaccaactcacacaaaactgactttgacagctcactaactcattaacagatgttcaagatattttaacataaaaatgctaatctgtcaaagctaacctataacccagtaacagacatactcagatagaactattgactatccaaatggcaaaaaatttataatttgacatacacaaaaaaaatataattctcacaccctcaaaacctataaaaaaatttacttttatctaagatttcaaataattttattttttttagaggactgtcattttataaaaaaagaaattatgaaatcgaaatatatgttattgctcatctcgatttgtaagatttatgctcatagctatcaagttttaactcaatataattttagattttagtaattagaaaaaatgtgtcattgaaacctctaaaaaaagaaatatagaaaaactaagaaaaaaaaaaaaaaaaaaaaaaaaatctacttccaaagtccgaaaaatgattaggtacaccactcactatccaaatagttattataatattaataataataagaatgatgtcactagtagaagagacatggcggccagaggcacaagtagacaataataggttcaactactaattcagagtcagatgattggccactccccaaaagtaagaaaaactggttcacctacccaattcaaaataagctcaaaagcttgatctgccagcctagcctgacaacaaaaagttaagttcaacaacccatttccattccaaaatagcgttataagcactattcatgtgtacttccaccaaagcaagatatgctcttggatttttgccaataataattaaccaaaaaaaaaaacttgtctttatttagtttttctgggttcacataagttcatacataaatacatcaaatcaaacttgaatccaaattcaaactaattaacataaatcaacatacagatgatcccccaaattttttcctgcttccaatcaaagccaaaatatcagagcttatacaaccacaaccagacactttcagaggcccacactttttttttttttttgattttttaggaccatccctaggttggtgcggcaatgagtggtggctgcaagtgaagtttggtggatagctctataaccaaattttattactaacaaaagaaaataaaaaattgccaaccagaaagaatatgtgttttgtctagaggctcccagaaatcaagcgttgacttcccatcctcctcttcctcagtctttctgcaatgatgaaggccagctcaagagattgggatgcattcagtcttgggtcacagtgagtgtggtaacgagacttcaggtcgtcgaaagtcacagttcgagaccctccaatgcattctgttacattctggccagtcatttctagatgaattcctccagggtggcttccttcttgatcgtgcacatcaaagaatgctcgcacctcagcctgtaaggcaatagagtaaatgaataaaagatgtaaaagggtacttttagagttctaacaagtatatgagacaattttctgggatctcaaccgactttaaccacctaaacttatctgctctatttcacaattagttaagatacttcagtacgaaaacttataatgacacttcccgttaattaggattatctagccattctaccctctacctgtaaatcatgctccagtaaacacttgaagctcttaaaacaagaatagattgttaactattactgtactatggtatcgatagtttcattgtttcagatggtgattataaatgataggaaattgagtgaaatcttacaagaattgaatcaaagggacgtgttttgagtccacagggtgcacttatggtgtttccatgcattgggtcagacacccaggtcacaatttgacccgctttgcggacagctctgatcaaatgaggaagcttgaccctcatattctcagcacccatcctacagataatagtgatccttccagccttgttatcaggattcaagatttcgatgaggttaactagctcttgcgggtccattttgttgcttacctgaatcagaaaagaataacaattagcaaatttaattttcacagtacacaataaacagtagaacaagcaatggtagctatatgatatatcaaaagctagactcaagacattcaacatttttccttcttcctttttgagaaaaactcattaaagagtactgcttctgctgaagacttttttcatcatataaaagtcatggaattaaagcctaaacaataaatgagagaaaaacaatccagaagaattgcaattaaagcagtagataaacaaatcacaattaccttgataccaaggggatttgccactcctcttagaaactcaatatgagcaccatccagttgtcgagtacgctctccaacccaaagcatgtgagcagagcaatcatagtaagatccagaagttgaatcctttcttgtaagtgcttgctcataaggcaaatgcaaacactcatgggaagtccagaattcagtttgtgtcatgataggatggtccactgtaagaccagcagcgctcatgaatcccaaggcctcatcaacccgattggccagttcgtgatacctattaaatcatccaatcaacaagcatattagaaactggattgctcatacaatcaaatgaagctttcatcaaatcaaaatcataattaaaaccacaatcaataaacaaattgacttttgacttttaatagtcagaacagttaaaaactatcacaaatgtgtttgttgcatacatacctatctccctgttcgctgttctcagcaaagtcaagattccatttaggaaccctctgcattgctgcatatcctccggtggcaaaggcccggagaagattcagagttgctgcagattgagtataagccctgatcaacctctgagggtctgggattctggacttctcatcaaaggcatcaccattgatattgtctcccttgtaactaggcagcttaactccatttttctcctcgtaaggtgctgatcttggcttagcaaattgaccagccattcttcctacctgttacacacaaacacacattcttaaatacacagctcaaaagtacataattttgctccaccccatatgaaaaacaatccaaaatccactatttccaatcctcacagcacaaataaagggcaaaatattgaaacccacctaagacaaacaccatcaaatctcaaatctaatgtccccaagtcaaaaataaaaaaaaataaaaaaaaaaaaaaaaaaaaaagaaccaaccttaatcacaggcacttgtccaccgaacatgagaacaacactcatctgaagaagaattctgaaggtatccctgatatagttaccactgaactccttgaaactctcagcacaatctccaccttgcaagaggaaagcgtttcccatggcagcctcagcaagcctctcctcaagggtcctggcttcaccggcgaaaacaatcggagggaaagtctcaatggtcttaagaacagcttcgaggtcttccttgtttgggtattcagggagctgcaaagccgtctttgtcttccagctctccaagttccattttccagcgggcggcgccaccgcaggcttggaagaaactacggcctttttagacggctcagcagcgtgaacggcggagattgttctcctaccatggttggttttcttggttgggatgatagagaaagagggttggtgagattctggggtaggacacagagaccgggcattgcagagtgaacttgaagataaagtcgaagcatttgacaaagccattgcagaaagctctctgaacctttttttatgttcttcttatcttactcttaagagattgaaatctagagagagatataaagaagaagaagaaaaggtttgaagaggtctgacaatggtggtagagagatcaagaaaatgtgtttatataatggtttgaaaggggtaatggggtttggtggaacttgagcagtcaaaacacaacagtggaggcggtagtagttggtaggtggtgctaggaaagagagaaactcagggagaggggtattttggtaaataaagagtcacaatagacgtagacttgagaataaggacattttggtaaatagacaaagagagagatagagagacagaggcattacctaacatgatcacctaccaaacccctcaaaaaagacctaagaattggtctctcatatgctttccattctcacataagtttttttttaattatatttattagtatttattgatttctctatgaaaccaaataggttactacacttgtacaagacattgtcaccacatttttaatgtatgtcactattttctatttaacgtgcaaaatttagttaaaacttgtgttgtggatatataatatctattataagttggtgtaaattttatattaaatttaccttaatcttataatgggagattactctaaatattatttttttaacttttttttaatttacggtttgagtttctaa

SEQ ID NO: 377846 - DNA, 3790 bp, Cannabis indica
tccaaattgcatgtaaaacaaaaatacataaaatgagagccaattgtacttgatttattctactaactcatttattcactaccaacaatattgttacagtactttaaatttataggtctctcaaatcttcaggatcaatacttgtggccactattggactcctgacaacatatttaccagtttcctctacccaactcagtgagcctaaaaccacttctgctttcaacacctttggaccctccaaactcagcttgtaacttaacttatcatacttcttcttgaaaactagcttcattggctcaaccttcactttcaactctttcatggcagtaactttcacactataactagagttttcttttcccacattggtcaatgtccttctgaactccacaactttggaagtggaaccaccaattccattaaaataagcaataaaagatgggtagttgagatccgaagacagtggtccaacacaagtgtgattagactttgttatgatttgaatctgttttggtgtgtatttcattccacatagaagcttaacatagtcttctgatgttgtatcataaattagtccaggatcaattgccttgtttggttgaataaggccagaaccagtatccaaacccgggatttcgaagttgtcctcatcttgaatgggattttgggtgttgtccaatgggttggctgtggtcataagagctgatctaatggctgctgtgctccaatcaggatggactgatttgatcagggctgcaactcctgcaacatgaggtgcagccattgaagtgcctgattggatattaaagtcactgaacaaagaccttgattgaacttcagccactgagcttattggagaccaggctgccaagattgatgagccaggggccaagatatctggttttaacacatttgggcaattcagaaatggccctctagagctatagccatccacttttggagctggttttgatcccagtactgttttctgaaactctaatcttccagtgggatttttgctatttttgatgtagtttataacagtttcaccatcctttaagccaataaaagcagctctaaatgagcttctggtataaaaatcagataatgagtagttacttataaagacagctccaaacactttagcagactcggccttctcaacttgatcacttatactcaagttgtctttacatacaacaatcttgtctctaactttcttaatttgattcaaatctgcacacccatctaagaaaacaaggccaacttggtgttgagaagagtttccgggatacaatgaatcgaaattgatttgaaaaccgttccccaaagtcaatgttcctttgaaaactctatctacagtaccagctgctactgtggttatccatggtgctgcattgattactgtccctgctcttgggccaatgtttccagctgaagctgaaacaaatatgcctttctccatggctgcaaatatggctattgccatactatcatcctccaaactataatcaccatctcctaaccccaaagagagtgacaaaacatcaacaccatctcttattgcctggtctattgctgctagaaaatcagaggtgtatacagagtttctccatatagttttatagattgccaatcgagctttaggcgctaagccactggcagtaccggctgcatagccaaagtaagacgcgccttccacataaccaccggctgcagtggaagcagtgtgcgtgccatgtccatctttatctcgtggagagttcatggtgattttaaacttgggaatgttagctaaaagacccttgttgtaaaatcgagctccaataagtttcttgttgcacaaggaagagttgaattgttcacctgactcacatttccctttccatctagagggcactgctgtcattcctttgtcactgaagctcttgctctctggccaaattccagtgtcaactacaccaattatgatgccttcgccgaaagatgaagctggccataaaccagaagtggggtttaatccaagaaacttaggagtatgtgtggtgtggggtttaaggagatgatctggggtggaatgaatgtaaccaggagattttttgagtgcttcaagctcagaaggagtgagtgttacactaaatccatggatagagtttgtgtaagtgtgaatgagttttgagttgatatggagttgggaatttttctctgatatggtagaaagagtagacatgtaccaactttggtgagttgagaaggcttttggcatagctgatttgtccatgtgtacaatataggtttgtgactttgctgaaactaagtaaaagaagaagcttatggctaataagattacactcactacctccatattgagtgaactagccatggctgaactctgacttgatgatgaaacaacactagctatttatggcgttaatatctcacacttcagaataagggaatgaatgaatgagaggtgttttggaccataaggggaccaagccaatgggaacagaaaaattatgaatactttatcagcatgaactattccacttccccaccttgggaaaaataatggtacggtaaagttaatcaatcaagtgttttatttggtcctagttcttcttttccagttatccacatagtttagtctttattctttattttgtcatgattaagttggaagtttacagtggattttggttgttcaagcatgttcatttttctgtctatttattcctcattttatgtgtgtcaaatttcatagcaataacatctgagacttgaaatttgatgtgggaatgaatgattgaccaacagacatgcattgttttggtctctttttttcttagtgatagtggaaactcattgagtgtctttttgttggtggagtggcttagcatgacaccacaaattattgatcactttatatgcttaaacctatgattaaagtagctaaaacaatattgacacattatctactttcttattaatatccaaattcaaaggtgaagtaagctaatattatatggtactaataaagaaaacaaatcataaactatgattggaatttggaaacttaaaactatactttcattttaaagtcatctatataccaactttgatacaagaaaacttgatgggcacatattatattagactagtttaatggtaataactaagggcttaaatctttcaaaaaagaaacaaaataaaaagtagtcagctttgaaagagctttatttagtaccaaattgtgggaaagaaagatactgatttagtgatttcattttctttatgagatatagcatttgaatgggtggaaaggaaggacctaatattgaatttgattatatggagataagtagggtcctttatttaagacttccatttcaaattcaaattttctgagatttatttgttaattgaaggcctaaaactctttagatatcccatcattagatatgcaattctttatactaacaaaaactatataagcagtctccaccaaaaaatatctcaagagagttagctctctcaaaaaaaaaaaaaaaattgtcacactttgctccaagtttgaaatttgccaaaaaatttcatgtttaaaatttgccaagctaaccaccaccacatatttggtgaatgaatttgaactaagaaaaacttagattcacaaattaaaaatatcaataaagaaaagagaaaaattacattttccaaaatcattttatggttaaattttaaaaaaataaataaaaaaaaaatatgagaaaaatagtataaggtaact

SEQ ID NO: 377847 - DNA, 3308 bp, Cannabis indica
tatgttatttttattactgttttgatattatgttggtattatttttctatttttatgtaatatttttattgtttttatagaatactgtaaaaatatttttaaaaaattaaaaatataaaaattttacaaaaaaaaatattttatgtagttatccttttttttactatatccttgagttttaaaatagtagcaagtcctttcaaaaaaaaaaatagtagcaattaagttatttagttttgaatgaattttttaaaagtattttggatcattataatatttaaataaatttagaattttgttaaaaattagaggctgatttagaactaaagaggtatatgctaaaacctcttaataatatattgaatatatagtacatacatgtgttttaacacgttgaacacctatgatgaagatatagtaattcttcattcattaaaaaaaaaaaaaaaatagaaaattatttgctctattggaaactccaaccacccctaaagatataaaagacactaatttgtcatactaatgttacacctttttttaattccttaattatactaatttattatttattttatcttccatgaaatgaagatcacataccatcttcttttccggaaaggttacttagtggggttcttcacaatcacaataagaatttgataaatgacatttttcttcctttttaacaatttgataaagtatgcactttataaattgaaattggtttttataattttataaaaatattaccttgaccgcaacgctacctaaatttatttatagattcttacatattttaatttaataattactattaatttaatttaatgcactacctcatggcatgcaatatatgcatggcctcatgaacattagtatattgcaacacaaacaacacaactagctgtctaatatatatgagcacttgcttcaaactctcacaacgtatatatgcgcttcttacatattaagatgtttgttgttgtaaatcattattccctctatatatgttactatattttagaacctaaatattccaaacccattgtctcacattaattctagtccaagtcatgttatgtaccatatactaattctctttatctgaatattttagattaatttgttacaaccccacattcttttctgcacccatttgaaggtgttactatatacacattaattaaaggaaaacaaacaatgaaagcaaaacacacctactatacaacaatacaaaattaactaactttacacttcattttgcataattagattttttatgtaattgaataacaaaagaaaagacaagtttttcaaaaagtttcccacacacctccatatcgatttctaaagctagcaaaaagagaccaattgtgaacaataagtggtagcttagctaagtagtaaatgtaaatgaaataataaaaagaagaaaaggaaaaaagggtttttgttatttcaattcccaaaaagtgagtccaccccaccatgtctaacaacaataccaccatgcttaacaattaataacatacctttcttctctttgaaaccctttttgtgcttcttctttctcatcaagtttagcatcccaaaacccctctctcccttcttcactaagcaaaatttacttatatatatataaaagagcacatcttctatacatatatatacctctcaaatcaacatcatcatcatcatagtaagtactatattattatcattattaagagaagagagagagagagagacaagctgagagaaataaaagagatagagaatttaattatgggagctgattggggacctgtggtggtatcagtggtgctattcatcttactttcacctgggttactattccaattaccagcaagaacaagagtcatggagtttggaaatatgaacacaagtgggattgctattctagttcatgctgttatatatttctgcatactcaccatcttgatcattgctattggtattcacatacatgttaactaataataataaattagttataacatcatcatcatcatccaatctctctatatttatatatgtgtacatctttttattatatactctctttttatttttgttgagatccatatatttgaacggccaacttttatcaaatgttttctgaattctgtgttgttgtgtgttccttcttttaattaatcagtttcaaatttgtagagagttagctatagtcagaaactattttggcgatactaacatgaaattaataatagtttgttctaaagtttgtaacaaatattaatatttgtcaattataaaaaataatatatagtacatcatcatagtgtatgtatgcataatttatggcaaaaattacttcaaattcccaaattcaaagcttaacacgtgatgagagtacgagacaccgacaaaatcacagtctccaaaatcttttattacaatatataaaaacaaaaacttgaagaaaccgcccaattagttttattaatgtgattaaccgtttaatttatgtgagaatgcaagtctttttatgtaattattatgcaaaattaaaaagcataattattaattagcactaactttctcttgagtctagactaattaatcgaaagaaataatgcagaaatacttgtcatgtgggtcagaatgtacatgacatgacacaactaattaatggccatgagtgtgatatcatatattaacatgtccacattttttaggccaccaaaaagaaaagccacagtttttgaacctatttttaatctgaactcaaaaaagctgaactatgatgagtctatgaattattgaatgaacgcaaatcaagaaagactaataaagcttttctttctttatctatataggatctgaactaacaaacaaaaaagaaagagctcatattacaacttgaaacagagtacagagagttgtgatatttagaatcagaaaatacaatcaaacactaattaaattaacaaacccagaagaagaagttgagattgagattgagatcagccagtgtagatatgtacgtgtagggccaagattagaatggcataaatggcaaagaagatgagtgtgtgaacagctatggctttgccgttggttttcatgctaccaaactccatgggtcgactgtggcctggcaactggaatagcaggcctggttgaagcaacacgaacagaacaactccgatcagtactggggcccagtctgcctttcttcttctatacaaagaacaaagaagaagaagaagagtaaagtagtagaaagagagatagagagagagagagagagagtgagagaagaa

SEQ ID NO: 377848 - DNA, 3380 bp, Cannabis indica
aaaataaaataaaaaataactaaggtggacatgtaatttccaaagaatatcagtctaatttagactgtaatctcctagcaaattaaaagctgacttgcaagagaaaattcctgtattattttccctgccaaattctacaatcttcaagctatttacacacttggatgctgcccattctttctagacagcaagttcactcagtaatctctctatctcctaaattcatgaagaaatgcaagtaccatgttactgaagacctactattatcaactatgaactctcaaataccatgctgcttttagaactttatcttgctaatgcaggaaatcaatgcttcaaagcctccaagccagaccaaatatcctcccaaaaaagaattcagtttcaaacatcccatcatccaatgcctcattttccaagaacttccattctaccaaatcatatgctttttcaatgtcaactttcaagactacacctttcttcttcaaatgtttaaactcatctacaacttcattagataccaaagccatatccataatctgcctccctgagtttctaaaattgtctcgaccaaacacctctcttaacctcatagagacaacttttcaaataatcttatagacttgttaccaaactaattggtttaagatcctttatattaaagatttatccttcttaggaatgatacagatgtttcattagtaactcaattaatcactatgttttcttcaagctcagcaataacttataatgaatcatctttaaaccaatccacattctccttataaaccgcattaggccttggagctttgtttccatcacacttacaaacgacctcttcttataatttctcctcttttcatcattccaaccacactgttttactatggggaaaaccactgttcattccaatccctcaaaacccacaaagtaatcatgagtcaatctgcatacaaagatttatataagtccaccacatcatcttctatttcaagtttccaattctaaaatggttccaccaactttttcatttggaaacgaaattttttgcccttctagcatgaaagagcctcgaagtgccatcaccatcctgggcccattagaacttagatttgaactttatagtccgctcctcgtctatcaattgagcccattctccttttaccttttctctttaatctttcaagagttgaatccatctacctccatattcttcacagtcaagtaaaactcttggattcttttcaagtgttcttgctcttttactctccatttctgcaaaactccactgcttcaccttctgcttaatgagctcaaacattttcatggacatataactttcccaaccagtaaaattgctctctcaccaccatttttgaaactccttaaagaatttatggtgtagccaactattatcaaacctaatagggatagaccccaattttgtggtattgtgtccaactccctagcaattatccgaaatagctctaacctacaaagatctcaatgaattacttctaagaaaacgtctaaacttctacctttgagtctccttgttcagttgcaactcctccaataatcgcattgccatgtctgtagtcactataaccacataatcagaaagtcttgttctctcttatatctttactgagcctccatcaattgttgaagtcaacatgaataccttgtgttatgttgtaaaattccagcgacagtttttgccactattactacagttgagaaaatcaaaacctagattccgtccacaaccaatggggttatggaatatttccttcccatgagcaatgttcatgtgacacaaatacaccctgccttctgaatctcatgagttgcatggatttgctactctcataaacaaaggggagagaatagagcattgttaaggcaacttctaattagataaattcaaattaatttgttttttggattaaattagtttcccgaactagaatcttttttagtactttgataagataataatttccttctaagatggttctctctctctctctaatttcctcttttgggtccatctattcttctaaagtatttctactgaacaccgccctgttctaagggtagagaagaaaaagagaaggtggaccaccaaacgtacaaaacttaaaaactcaagttgttgacccaatgatacaagtttttctcatatctgaaacatggcatgaagaccttctaagatataatgcagaacgtgaatttcaatataataaccgtgcaaaaactaaaaaatataaaatacaatatacatacatattagccttcaaaactaactcaacaattcaaaacccaaggaagataagtcatcgataatataggtactctttctctaattattatgaaacaagaatgcaatccctggacagctcagtctgaagaatggaaatgtataggcagaaagaaaacaagagtaatagaaattattatgaagatggcgaccgcagacaacagggacattcaaacgaaaatgtggagggagacgggatttataaacaaaatttaatactaaaaatagcagcataattgataacaagaattttcctttctcctttttaataatcttagagaaaaccttgtccaacaataagagaaaacaacttactctccgatttttaattttttgttagatctgaaactagacagcatctcaaacatacaattacttcaactaattacttcaactaaacaatagaaaagtaaataaataaactcacacacacgtacactaaaaattcatactttatcactttcggaatcgtgctaaccaaaacagaggcttaactaacattttgcaaataggtgctcaggataaaatattccgctaaaggaaaaatctgaaacacgtacattaaaataataggattcaagtgaattagagagtgtaaataaatttgataagaagttaaataaaattagtgtacctaagaacgcgaagctccaaaaccctaaaatggcagaaaggggtagaagcaggagagagatgcggagactgtcgtgaacagagaagagagagactgaaggtccttttttcgttttatttatttttcttatgaaactaaaattgaaaaatcggaagatgaggatgatgcatagtataattaggcgtgttccccaccgcacctaaccacaccacataaaaattgcagtttgaaatttttacagcagggttatggtttgtatttttatcaaatcgcgccttgcaatgtgaatgattttaaatttaataatcataatttacattatatcgcactaatatataataaaattactaatttttctaataagatttgagaaatttgaaattccatgcttaataaaacaaaaaattagtatcctaaactaat

SEQ ID NO: 377849 - DNA, 3263 bp, Cannabis indica
tttgtggcactttcgatagagaattcaatttggcaccatttctattttctcctcttgttcgctcgtttaaaatcgcagagattcacgagctttgttacctatgcattgatatacctaacggtagacttgataacatataataagtcctaaaatatataaagatatcaaaatatatatatatacattaatggacgaccttactatatatttttataaaaaaaaaatattaattttatctttttgttttttgaaaattatataaattttactttaaaataagtaattaagtaacccaccgaatcatccattaatttccaattttcaagtgttctttcaatttcatagtaaattaccaaaccaaccacctgtaatttcgggaataaatttccaatttcactacagctcccataaaaattttcagtcgacataattaaatttcagtctgtcagtcacagtcgataatggtggtagtcatatgggccaccctcgccatttaaaattttattgttttttaattattattattattttttaaaatagagatgatgaagacgtgggtgcgatttaattttaaaaatcattactttattggtattgttattattaatcttaaattttaattttgttttatcagttgaacaacttgttgttaaggttaggttcctctgtcaaaagacccaagtcgtgggttcttggaattattataatttttaattaacttggttgattcaatcctcaagttcagtccaaaatctcatcttcaccaatccaagagtatcaagctaaggtaaaatttaaacctgcaaaaagaataaccacagtaatagtatacaacaaaataataataagaaataagtaattaaattataaagaaagagaaatgagcttacttgatacacagatctggccagaggaagacgaagaacacagtacatagcttaaaccagatcaaaccctacaaacggaacggaacggaacgcaacaaggaacgggaagggacgcaacacggaacggaacgggacgggacgcaacagggaacggaacggaacagaacggaacgaatgaagaaacgacacacgaaacagaacccaaacgaacaaatacgtgtttgaacaaaacgtatatggaaatgaaactaaatggaatggaattatgtgctgatagactgtactgatcgaatgaatttcttaagtgttttaattatttggaattgattttgaaatgtatggattgatgattgttaggtggagattcgttcggtccgaaagctcgtcgagccaccattaatggcggtcaactagaaatgaattatatatatttttttatatacagaaaactattaactatagatattatttgtcctgtataggatttcggtcaccggagtacacaaaataaccaggtccgtttccaaatcattgcgcatgtcagatcacaaacgtatgccgccttaatctgatgccatcgctactgccgccgcgcgcggctgaaatccgttcaccaacaccagtggttttcggattctgaagcctccgtcaacaggaaaattcggagatagaccactaaataagtagctaaaaggctacaatttcatacatgaaagatcgacgagttttgtttttttggttttgaagatttcaacataccaaatcagatcaagagccttcttcttcacctgcttttgacatgatagagagtcggctcggccttggtcggaagtcagcacgcctcttctgatggtgcgacgaaggacgaatcagagccgccaaagcacgtttcaccagatcgccttcaacgcctccaatcctaaccaaagaattcgtcatggctgacctgcgagcgttgagccggttctgcgcgtaaggagtcaccgagtgatgcgacgtgttgttcccaaagcctctgtgtagactacaacggaacgcgccggggtgagtcgaaggggaacacagacaagtcttcttctgaccggtcgcttgacgcctcaccacctgatggttgttgctcatactaccacgcggcgccacggcaatcgaacggttgggagaaatcggacggtcaagagcgaaccgtacggacgatgcggaagacgacgcgccaacaggttaacgcgcgttggggaggcggcacggtggaagaagtcggaggaacgggatgagaaactcgaactggatgatgcaaaagctgaggaagacgatgatggagacgaagagtaatgagagaacagaatcttccggacgggtgagagggaacggagtaccggtccgctacttcttctagaagaaaccgccatttttttctgttgaaatttaggagagagaggttgaaaatttaggagagaggaaatttcacgaaagagagagaagagattttttttcttttttttcaaaagctgcctttggctgcctaattcggcaaacctagcttcacacaagccatgcatttatactaatttttgaaagagctttgcgtgaagaaggaggggttgttttctcgcgatattttcgtgaatgggtctaaagtaggtttattccgatattttgcactcataccctcgcatcttaacgtatttatgacttttcttttattccattttccatttttctaaatattttaatatttagtccttcaaaagaattttattttttccaagagtccttaaaaattattaaattaatataaattgaaaaataaccctaatcacagtcaggttaatttcttcaatgaaaaaagaaaaaccaaatagagtaattaataatcctttttcacatttttaaacggaaataaggaaataaaaataaccaaattaaatgggaaaaaatcaatcaatattctattttaattttcaatgattctctatcacatgggatataattaatgccactacctaatatagttctctcttggttcaaacttttaaaatgaaattgaagagaaatgtatataatatgtaatataaaaatgatttaatgcacaaatacaatggacaggagatgtccctaattggcaatgacgtgcattattttaaacaaaaaaggaaataatgaattgataagggacataattgcaaaaacaattataaagaaaacaaaactgaaaaaacaatgagactaactcaaccacaggttgccggttgaggttagcttaaccttgggttaagattttccgtttgagggaatccaacggttttttaagaaagctatgtgcgagagagaaagagcctatatgtgcccaattttaaattctgaaaaataattaaaaaa

SEQ ID NO: 377850 - DNA, 4220 bp, Cannabis indica
gtacggctgaaattatgctctgcaaatatacattttgaacaatggactataaaggaagctcttgtatattgaactccaaatcttgccccttatgattgaagaatcacaatagtaggtgctaacttattattgtgtactctctttcagctcctcttgtgtaaatgacgaaggaaatttctctgaattctggaatcgtgatgatgaagcaagtggttctgaggaagccatatctgattctgatggtatatcatattttcaacaattttaattttgtattttgtggttggcaaatagaaagaaataaatttgtggaaaaaaaatacttgctatacttctatgatcctgttttgtacattcactggcagatggtattgaagttattaggagactaggccattcaaagttgccaaaaaaatctggatttaatgagaagatggatttcttgcaacgtgcagaagaaaaatattatgagagcaaacatgagcaggtttgcttcgatagataacattttgtgttagtttcattcgaagtcggaatttcatgtctttttccttttctcgtctgagccttctatcatttgcatatgcattttaaaaatcaattacttaaatatgctactacatatacataggtgatgattttaaagttatttactctgcatatatatgtttcagctagctaaactaaaccgttaacttattctaaattttgttttcctgctctcaacttgttcttattactggatgaagagcaataaacaaaacaagaatgctgtatccgacagcctgagagagtcaagtaggcaaagactattaaacgctttcaagcaagctcgggagaggcttggtgacataaagtacgctcataactcatgcacatatttcttttttgagtcctgaaaaactttcaacttaatgtattctattccttttacattgttggtatttactgttcaatgtttctttgcacaggcatcaagtggaaacatcagccacttttctcgaaaacgagtgttacaaaaaatatgggaaaaccgggaaatcattctattattcacaagtggcaagtactgtgaggtggctatcaaccacaacttcagttgagctaactgatcggcttggtgccattgccagttctgcatctcaaccagaaacttcatctctagcttctcctactttggatcagggtcatcaagaacacaccactgaatattttgaatcaagtgttgtacctgaaactctcaaatgtgcttcaccaatagaatgtttttcttctcctagtgcaaagctgccagcaattccatcattttcagagttcattaacagtaaaaaggcaaaggacaagcaaccgagaccgtcacctggtggagttgagaagaattcagagaaaaggatgaagttgcaataggctgtggttttgttaatttctttataggaagggtaatagtgtaaaacactttgctgctttgaatggagctggctgttcttatcatatagtgcatgaaattaacttcaaaacttttgtttcccaaaatttatttttcttctctttctaaagaaaatgtaacgaatcattgctgcactttaatttttaaatattacgttgatgattcacatttcctcatttcaggctaatacgtctatattagactcaccttttgttaatttatataaaataataatttatatattagtgtaaattaagatattaattatgaaaacacattgagtgcattactcattagtgtatagtcgattattaattcatatactaactgcgggttgtttttttctgaaaaattattattttataaatttagccaattaatttgatttagtgttgaaaccaaacaaacagaagtataacttaatcgaagttattaatttatagatgctatatttggacaaaactgaactttttagaggactccacattttattttagatttttttttctaaaaatatttactttaggagtattataatattattctttttatataataaaatcataacgcaatatagtgcaccaaatacaatataatattaagataatataatgcaatcttaaccaaaaattcagtcaatctaatacagttttacatgccaaacgagccacaagccccaattcagtacatagtctcctccatcaatattacatggtgtgtctttttagactcctagtggtctccactctccatttaatttcatacagcaaaatccacactaagcagttttgagtggaaacttcccaatgaagtcggaactgaggcttcccaagtaaagatgatcctcaaactcaatagctgttgtaacaaacctcatcacctttccttctaaatcatcaaatttcttcctaatctttccatcagcagccacattcaccaccgtcgctttcccctccgcgccattcactagctctactagttttggaaacgttgctatgaatttcttcagtgccttaaacttgtggacaaactccagcccttcattactagcctgcatttttcataaacaatcacatcacaactatgatggtaattaaaaagctcaaaatatagttttatgttacctgaattaaagcgatccaaaaagacccgtctggggcaagattgatgttgtcaggtccaccaggaaggttttcaatgaaaatatcagtttttcctttgttctctcccttgagccagtacttaaggcacctgaatctggtcacaaaaacgacaacgtatcattaggtaaacaaagcagtcctctcttgaattttagtatgaccaaaaatgatcatacatcattatcaatgaaacaatcatttacttattgtgacatgacagcatggtacatgtttagtcttcttattcatttactagtgttcatgtaacaattttaccatgtgacttacttccatgattcacagaccaccagataatcttggtcctttgagagagcaacaccattagcaaaccccaaatcatcaagtataactgaagttttctttgatgatggatcgtacttgagcaattgaccatgtggttttgcctcaagcacatctagataccagttatggagtccaaacttggttgatgcaacactgaaatacacactaccgtccgatgcttcgatcacatcatctgcaaatctaattaaaacaaaccaaaatctcaaactttgcaggctaatatgctgataattttatttacttttttacattaccatttctttcccttacattgtttaaatagactcaaagtgtatatgtatatgtacgattttggatcattaacataagaattttccctgataaaccctgtggccgcagagtggttttttgatagctctataaaacaatcatggtcccaactactatagaaaacaaaaagagtgttacatctccggccccaggatttgccaagttgaagagtgtttgtttaaatttaatgtagtctactagataaaatgagaaactaaaaactcaagagcaaaaaactccaactacacacgtgtatagaaaagtactgaaggagaaaaacgacaacaaaccatgatgtatctatagcagtagtaatcggtccctaccccaaaaaaaaaaatttaaataaataaaaaagattcccttttaaggtcttattattagctaaggagggctgcaggtcccaacaacacctccaaattgcgattggccctattgttgtgtgtcgtataataagaatttggcatggcttgcacatggatcatatcaattgatcacgcggtttagttgtgtcgttttctattcttggatagctttaaagagtcttacttactatttctctctcacacacacacatcttaccttgttcaaatagtgtttcacttcttactcattccatgataaggaggcagagttttatctataccattggccaaaagaactactatttcatattataaagacaagaaacgagtaaagctcagttgtcgtttactgataagggcaaaaatgtctgctgattgtttgaaacactctgtttagctttagagacgccataactctttcggaagtacctccctaaattggcttgtctgatttagttgcatatgtaaacaatggtactatgctttagtagactttttgtacatatcatgcgtattcacttaccttattttggacccgttaacatgtgaagtgactactaatacgccattttcaccaaccttaagcaaaccctgaaaatcaaggaaaac

SEQ ID NO: 377851 - DNA, 2968 bp, Cannabis indica
tcatcatataaaaaggggtaagtatcttgaagtgacagggaattttttcactctctcgatggtctaaaggaccctgctctgagcgatagtttatgaactgcaacatgtttgatctttttgttttactggtatgtatggcaactggcggctgtgagggggatttgaatgaaacagtggatgatattgtttccatgacaagtaaaatgggggttagtagtgaggaggactgggaggagaatgaggaggctgcatcctctttcggtgaacaatcgttggtaggaagactaattgcaaagagggaaattaaggagtcattgttcaccacaatttttagtcgaatgtagaagggaattggaggctgggaagttaaggttttagaagaagatgaggaagattcctttgttgggattacgttcaaaaacagggaggaagcaacaggtattctcaacaagcaaccgtggatttttaatggaggattattattgttggaaaagtggcctagatcaggtttgtggagagaagccaggttagacatggtcagttgttgggtgaagatgaaaggatggccgattaaagcttttactcgtgccaatgttgtgcgattgggagagatggcgggtgaagtgcaggaattgcggtggattaatgaaaatcggatgtttttaaatggtttcgtgagaatgaaaatcggatttccattgaaacagagtatcttcgtgggcagatatataccttgtggtgggaggaaattctggattcaattaaagtttgaaagattaccaacactctgttttgcttgtggaatatggggacatgaaaagagagagtgtggaaaagaagttctaatggaggtttctgaagatggattacaagtccctaagtatggtcaatggttaaaagatgatgatccaactcctcattgttttagtgcatttcatcagattcaagctgaagcacaggagcgtaatgggaagaatatggaacaaggaggggcaagcagatcagaattagacaataccaccagacgttctacggtggggcagccggcgagcagtgatgttagaatggaggctccgttgacccgtagtcacgtaactgttatgggtagtggtgtaggttgtattgctaaatctgcaatcgtgggaggtggaaatacaactacttctatgccaggtggcaggggtgagaattgtggtaatgttggtatattggatcaagtgggccggactgggaatgttaattttactgagcccaatttattgggccaacttatcaacaattatactactaaggttaatagggctgccattagtgaatgtgatacgcaacaggggggggggtcgatcattgaagggactgcagagggaactgagagtgaagctaagaaaaggaaagtggggggacgaatggtgatactgaagaggagaaggctcaaagggcacttcttaagggtaagcaaattcttaatgatcagggggcaagttctttctctgggggagtggatattatgtgtggctcgggcgagaaggggggcaagtcgagcatttctgggactaggaaaaaggtgtcaatcaagcatcgggcaaggactcatggcaaaggaagggcagtggctattagggataatgatggtgggatggctaaggacttggttggcttggatatgattggagtggagcagcaatttgtcttcggggcataggatatcaatggaacaaagaatgtagtgactaacactgaggtgagtatttctgagtttaatgatttctcatctcaaactttgaatgatgaagcggcgagtcttgctcaacaagaccgccgagagcaatgaaaatgataagttggaatgttcaaggaattgggaatccttggacattgcgtgctcttcagtcccacatttgggatcatgacccgagtattatttttctagcggaaagtaagttgacgagattacaggctcagaatttatgtgttactttgaattttgggcagaattattgggcagtggataaagttggtttaagtgggggattattacttttatggaaggaggagttgggtgtgagagtggattcaagttctcctgggcatttattagtaagggtggcgggcaaagatttttttccttggactcttacttgtttctatgggcacccggatgctacgcaaaggaagttctcatgggaactattaagaaacattaaggaagaagtagttgggctgtggctgtgtgtaagagattttaatgaggttgtgagtttatcggagaaggtggggggtcgaattagaagcgatgtggcgatggaggactttagaacggtgattgatgaatgtaggttgattgatttttgttcctctaaaacggatcttacatggtgtaatggacataaggtgaacccggttatggagagattagataggggactatgcaataaggaatggttgccactttttaatggcgctgatgtattggtgttggattggtgggaatcggatcatagaccgttggtagtagatatgccgatcgatttggatagggaacggtgtggtcaggttaaacggaaaagtcgcttccactttgaggaatgtgacagtcagtcgtcccgtgatccgtaaggggaaacactgggtaagctgtgcaatctcacaccgcctggggaaggtcaagtgggatgattctgaggctgtgtaggtatgggactacacagttgaaaaagggcttaaatggattgattggtactacctatatcaacaaggtgcatcttgttttccggtagcccatcacgaaagaactccacagttaagcgttcttgacttggggaaatttcaggatgggtgaccttctgggaagttttcccaggatgcgtgcgagtgaagacaaagcacgctggaaacactcgtgttggtctgtagggtcagtcatcgatccaggaagcagctagagtgacgtactcgtgtataagagcca

SEQ ID NO: 377852 - DNA, 5974 bp, Cannabis indica
aatatatcaaaattaagttaaataaagcaatcttaagcaaaaagtaataatgattgaataaaagaaaaatcagatacgtaccagagccatagctacacggaaaaacggatcgctaggatttcagatctgagcataaaaaaacaaggaacagcaaagaagtaataatcaatacataagaataaaattgattgataataaagaaaaacaagtatagagattgaaaatggaagaggaaatggagatgaagagacctgaatgagcaagtgtgcgagcgttcttccgagagcagagaaagaatagtgtgaggatggtgttagggtttttgtaggagagaaagctcgatcatccttttaaatattcgcttggaccgggtctcggtgctccaacgcctcaggcccaatatcataattcatgggccttcattttcatccaagcccaacactacttggcacgtcgtttgcaatatataggagacataacgacatgtcgtttaaaggagggcagagagagtaaaagagagagccagcccgatatacttcatgggccttttttcattttaatccaagcccaacataactggcatgtcgtttggattgagaagagggaatacaaaacgacatgtcgtttaaaggaggggtagtttcggtatattcagtgaaactccctccctgtaagagagaaaagagagagagaaagagagagcagcatttaaagatttcaggggaagaagaagaagaagaagaagagtaataaagtatataagtttttgggaaattgaagagaagaagaagaaatcgtaagagatgggtagaagggcagacgaagaatacgactacttgttcaaggtagtattgattggagattcgggtgttggcaaatctaacctcctctcccgattcactcgcaatgaattctgcttggagtccaagtcaaccattggtgttgaattcgctaccagaactcttcaggtctcttccattcttccattctatttctttggatctgcctctctctctttttctttaactttctatttttaacaaaccttttttcttattattattatttggatctcaattctttgcttacttcatctcgttttctcgggatccaacccgcaatttatttttcttttttctttttgaatgatatgatcataacatttcatttctatgttaaagttttcttcttttgttaattatctcattttctcaatttttaatatggttgatttgtttattgtaattaatttctatttaaagattggaatttggatcccaaatcttggatttattatcttgcattcaaatacaagtctaattatgaaagagataatccagccattgatctgtgttttcataattggccactgtcaatttcattaaatgggcaaagttttgaacgaggatatgtgattgtctctgagtgtgatattttattaagttgatcactctattttgattacagtttgccaaattgggctaatattacttaagagtgtgtaattgtgtgtgtgtgtgatttattaatttttattaggttcattgctctagtttgccaaattgggctaatatccaagagaatagaatggctacataagagtgtttgtgcatgtgattttattgatcagtctatttggaatgtagttttactaaaatgggctaatttgccaaatgaggacaggacatatgggatttcagaaaggaatggttaacttagagacagaatatttatgtgtggtttttgtttaggttgaaggaagaacagtgaaggctcagatatgggacacagcagggcaagagcgatacagagccataaccagcgcctactacagaggtgcgttgggagctcttctggtgtatgatgttacaaagccaactacattcgaaaatgtgagcaggtggttgaaggaactgagggatcacgcagacgccaacatagtgatcatgctgatcggtaacaaaaccgatctgaaacacctgagagcagtggcgaccgaggacgcccagagttatgcggagaaagaaggactctcattcatcgaaacgtctgcgctcgaagcaaccaatgtggagaaagctttccacacaattctatcagagatttacaggataattagcaagaagtcactatcttcagatgagccatctggtggtgccacaataaaagaagggaagactcttgtagttgggggtgcacaagaggccaataccagcagcaagtcttgctgttcttcatcttgatttcattacacaaatttttcttttcatatcgtcttgttggttattgtttattagtttttctctatttactaaatatgttttggtcatataatattttttttgttgcttgttgtgaggattgataattatttgttcatgaaagaatattatacaattagttttcttccttttgaataggctgtctaaaaggcctttctttcatatgatcatcaattgttattgaagttatattgtttgaatgtgcgtgtcttttacgataagagcttatattctattaattattaccaaatatttgttaaatagaccctttgtatattaaataatcccccagaatccttcccttttatggattattttggtacacaaaagcatataatcgaaatttagttcaaataatttggtgtctttggtttcttatctataaaactttatccaagttaaatgtagaaatgttttctaagtgagatattggattgcttgaacaattgttagagatgagatgagaggatctaagcagacaacatttaacaattcttcaaagatccataacataacagggttcagttgagtctacgtagtaaactgttttacatggttttgtgttcttttataacagaacacaatcttcactttacataggaatggctaaccacaacaattgctattctgctgaataggctgccctttcatttctacagttccagttgacttgctaccacttggttgactacccattctgcataaaaagtttcaaataagagttagttcagcacaaatatttagtatcaatttgcatgagaaggcagcagttgatgggatgttttactttttcttaatctctgcagccatggttaagaaagcctgctctacgttgatagagtctttcgcacttgtctcgagaaatgggataccgagctcatctgcaaatgcctgcacagttcattcatttcagcacaaatatgaaacaccacagttagaccttaactaggaggaagtagctagtaataatcattacatcggcttgattgaaaaacaactgatatgatatgctttacaaatgtactagtctagcttttttatcatagcaggttggtactaacagcatttaagttggattaagacagtgaaaacattaaaatcatcttcagttaatgagttcctaactccagagaacaaatctttcatgtggttcgagtatgcttcttggaattcactgatatcaagcaatcacaacatgcgtaaacatagtgctgctagcttgatgcacccatgatcgtcgtctatgttcaattcatggacaaatttaagtgttcaaagattgtagaagccgacactcataaagctttccactcgagcactaaaacaactccaacaaacaaattgtgggggaatgtcggggagacaaggacccttgcattgtacgcaagacagtaaaaaattaaaaacatgttcagttaatgagttatcaactccagagaacaaaatcttgagtatgattctggggattcactgatatcaagcaatcacaacatgtgtaaacatagtgctgctagcttgatgcacccacgagtcatctatgttcatatttcatggaaaattttaagtgttcaaatattgtaggccttcacactcccacaattttccactcgagcactgaaacaaccccaacaaactaattgtgggggaaaagtagtctgggatgcaaggactgctacaaggtccccttgcattgcagccaagacaattaaccgtcctcatgataaaacaataaacaaaagagagaccattgtattgttcatagagtttgacaaggtgtagtgttgtacctttgctgtttgagtgtccacaaccttgttgtcgaccaaatcacacttatttcccacaagaagcttgcaaacactttcatttgcatatctatcaatctcattcaaccattgcttgacattgttaaagctttccatctcagtaacatcatagacaatctgtttcaaataactttgtagtaagtgaagtaaaccttacataaatcataatttcaaaaataaccaataacttcctgattacaatgatatctgttgagagagacttgaataattatgaaaccaaaacaaattcttttcccttatccctccccaaatgacaattgacaatagttgctcacaattatcccatgtgctcctcgatagtagctgcttgttatggttctgaaccgctcctgtccagcagtatcccactgaagaagcaacacaacatgttaatatttcaacaagaattgagtgagctgcactcaaacagtgaagtgtagcttacttatggcatatcaaaaatcctttttgaataaaaaaaaagaaatgggattataatgaaagcaaaagaagaacaataccaaattagtgaaattgattaagcaatagtattacatatttatactaactaggcaatactaacaattgctaattagtccctataacttttcatgtaacagtcatcaggcagaaacagcccaattagaacaactgttcaaaaaataaagaaatcaacttacaatttgaagcttaatagtcttgccatcttgctccacagttctgattttctgagaatatttgtgagaaagaagaaggcataaacaaatattgagttaaaattaaatcaatacgcacaaaaagcagaacaagtgtaaatgtaaaatgtaaaatgtgggaagaaagaaagactgacaaaatcaactccaatggtgcttatgtagctgtcaacgtaagaatcatcctgaaagagacaaaattggggattaaaaaccctaactttgttttttattagagtaaacattgattgagtaaaagatgataataatgagagaaattacagcaaatcggagaaggaggcatgattttccgacggaggagtcaccaattaggaggagcttaaagagataatcgctgaaaatgaaaatgaaaatgatcaaaagttagagaagaagaaaaccagataatatgagataagatagtaacacttactattcattgctcatgttgatgatgattttaggatttcaggatttgggattttgaagaaaatggtttggtttgaaatatgattttgatttgggattttttttttatgttatggtaatggaaatggaattgggaatgtaataaataatataagaggaagtaaagtttgtatttttataagaaaataagtgttgtgttgggttgggcagcggtggtcttgtattttaggattgcttgctttgttggtgcatcattcatctcccacctattcattatctattaccctacttcccatttattattactattttgagaattgttaaaaaataatattggtctctagcaccgtcttagtatctatttttaattaaattttgggtcttatataatttaaaaatattactaactaattgtatgatgctatttatagaaaatgttaggcactattagaatccaatagtggtgctcatcaccttccacatgtagcaccctatgattggttaccgatattccctaaaagttattttgttaagttatggtaaataccattttggatcctgtgttttgtaaaagttaccaattggacaatctattttgttaaatgacaaaattgaccttgcattttctaaaatggtacaaacaagaccctgaatttatttttggtcaaaataaaatttcattatatttaaaaaaaagttagtcaaaaattaaactcagggt

SEQ ID NO: 377853 - DNA, 5625 bp, Cannabis indica
cttcaattgacaaggtgaataaacagtaactctatcaacttacaatagaacgcactccaaatcctgtctggatgcctcacaatagaacatgaacttctcttattgatgaccaagctaacactaaagttatattcaaatgtaactccagctctttgaaatcatattaacatttatctgtccacataaatcgctactttttcttaactagctttgttgatagtgttgagatcttgaaataacccttccattttgtaataccaaaacttatctaaacccaaaaaacattagttccaataattttctctgacctcagccaaatcctaaccaattcaaccttaccccgtgtcgattatgatcccataatcactgtaaaaccatccatcgatgttatccctacattgtttttgataaagggtacccaaggatatcattagcatacactatgacgtgtgttttaagaaaattcttaattatcctaatcatcagatccataaaaactactagagcgttggttagttcaaaaggcatatctagaagttcgtgataatcgtacctactacttgaaatgctcttttctaagattctcaatcaatgataacctttgaatttgatttcaccatcaaaggtccatgtttgagtttacaactcaaaccttggttcaacactaccatggccaacaaaatcaagcataaataacttctactaactccaaataacttaagaaagtaactctgaatcacccaaaacttgaatagaacacaactcaccaaaatcatgtttaaacctagcttaaatcttaaaaattcaaagagaaaggaaaacttagggcttaccttgaatcagtccatcaatacattatgaatcctagctgcaacaactctaacttttggtctgaattgaagaagaaaattgttgttttccttggtattctaggtgaccgacccaataggagagagagaagaaattctccaattttttctaatttttaattttgagcaataataaacttaaaggataaaatctatcttattcagcatagccttatacaattaaaggattaataaaaatccttttgtcactaaagacaaactagggtaaaattactaatttacccctttgcttcaccatgaagtaacatgtcactctaagggtattttggtccaacctaaaaaccccgcatagtcccaatgtaccaaatgtgtattcataatgccccactatttctaaagtatttaaccatatctaaattactctataagccaactgtcgcattccactattaccaagcataaaacatgaaattcataaaaatttacataaaacatataatgaatatagcatctgaatatatctccgtaattgagaaaatatattcctaaggcctatttttgacaataagctctaaaatctactaagtggcacaaaatcacataataataataattaaacctcttaattatatgctaattcccatgatttaactatgcagtcattacagtaggggtggagtcttgcgctttggagtcacagatgtgtccttcctggggaagacaagtctgtccagactctcatccaaaacattagcaccagccgagtccttctagatggttccctccacgactaatgttggcaaatcttctacctaagttggtggatcgagatggcctatttaggttgcaccactcccggacatagttggttccttagaatcctctccagttgtggcaagagtcttgtctaccccagtgagagtttaggaattagaagctttggtgctagcctttgcgggaggagaatatcccaaatgtcagatgaagaagaagtagacaaaggcttcagcttgcgggtcatgtgggctttagtcttgaccttcccttttcctttgaaggccttcgtccttgccaggctctttgtgatcttatcactagtgacttcaacatttttgttttaggagtatctgtaagcatgatgaacaaatggttaacaagccaaatttaaacaataattccaaaagcacaatcaacatacaacaacatattcctgggtacaaccattcagcgagcagctataaggttccccgtgagcaaacaaggtcatgtcttcctaaccgatgaagttgtcgtattatctgaagtgtgggaaagacatggtcataaatgggtccaccctaatagtatctagagacaactctggattgctagggctcctaatgatctcatctaccctatctacgaattcactcatggggtacttagtgtggtctaaattgaaaaagtatttatgaaacccccttggtccatcttggatatgcgatggatatgagaagtatggaacacacagaaaggtctgtcacctcttccagaggtactggttgctggggcgccctcatctgggtacactacaacatacctctcctagatcacctcaacctttgtcaaaggatttgggtggcggagcaaccaactagcttccagaagcttgtcctctcctattgtcgtgggtacgtttagtatgtctgatgagacagtgcgagtctaagtacctctccaacttgtagaaacccaccttctcgtagttggttctcatcgtttgaggcttcatgccataaaaatagagaatctcctccagagtgggcacctcaaatttgtgaatcttatagaatatgtaccatctagtgaagagtttgtaagctggaggtattagctagaagggagcgattctgatcctcgcgataaactcgacgaaatacatcataagagggagatgtgctccactaaaaatgagggcctagcgataaactccacgaaatacatcataagagggagatgtgctccactaaaaatgagggcctagctccaaccattgaacccatcagtgctaacggatgcatactcatctgcaacagataacctatgccacatcaatcctggtatgttacaaagattggcttcagtggcatacatttctaacattcaatatgaacggaagcagttctccttccagtccatttctcaattgggacttttgaatgcttgagcgagaggcggggtcttagcctccccctttcctttggattccttagctatctcagatggagttgccttcgggatagtctccaaggtagtacttagctggagttctgggacgggaatcttggtcagaatcacaacagtggccacttcctttgtagagacaactgttggattttctttgatttccacgaccttaaggtggaattcctgatttaaattcataattggaaagacgaaaaaagagaggaaaacccaagcaattagacacccactatcctaatgacaaattgggtgtcggggaaggcttcccctaaaattgcttggagaggtccccactggacctatcactcccataaatctatttttcccaaacatctcaaagcaatagatcgagaatccaaagaaagttactagaaaaaaatctaatgtagaaatctagaaattaaggccatttggagtcctaagaactccaaatgggcatgaagaaaatacactagcctactgttcattctaaagctcgtcatgcctaagttcaaaccataattccagaatcctagtaacatgcaaatgtctacgaagtacggacaaccatgcccaaactatccacacaatgttagcaccctcatggctcacaaaattttcacacaatccagtcttagaaatgaaattctacgggcaacattctattataaagacatgcaagatatcctaaatttagcttgaactgagcatttctatcttagatacaaaatagtagatagtcaaaaaagtattggagtacttacttactatatgagtcgagaaggaaagattatcgtggaaattttcccaagaatgttgaacatagtcaattacacgatcgtagccagcctgagcgtcaaaacttttattggtttagggatggaacggtttgaggtttaatggccctgcatctggaaaatgagttgaatggagatttagaaattattgaatcaagcaatcgagggcctcttgcattcattgttgaagatgactatgaaagggaaattttctagaaaattggaagttctagtttgaaattcaaaaatgggtgttttgagagtcagaggtgatgaaaaagaagaaatgggcttggcaaatctatttatatttcaaccaagatccctgtgatttgaattggacgaccccgatctcttcttcgaaagagttcactttgatccgatggatgggaaaagatggcatttaaaactagcccatgatgttattcattataacacacctcgagtaccgtaacataaaaagagaagtcattttgattgttctgccatcattgcaagttgcaacttcttccaaaaaatccaccctcggaatgcacgtgttgccaacaactacattaaaggtgccacatgcatgccacgcttgtggtaccttcaatttatggccctttaattaatgacagctcatgggatacatctgcaatcccagcagtcaccatgtgtcaaaaacttatctttaagaaatgggagaaaattgcaagctcccgaatctcggagagccccagaagcttgggggtaaatattatccatgtttctgagcatgtgacacgtgaaaaataaataaagggactagcctcataaccctgctaattaaaagtccccattacaatcctgccacatagaggcctcccagagccaaatatgaatcttgacgaaaagattgacttaggcctgcttggtcttgtcctagtttctcagatgtcatagacataatgtctctcacagacccggagtggtccaaacatggaagcactacccagctgataccttgatgggtactcgaagggcttattggtgatatctaccacccaagagtgtcccagacatctacccttggagtaacttgattcatctaatgacaattataattattttgacagtttttgtcctgtgcgtccaggcatggtagtgcgtgcacattatccacttttttttccagacgaaaatttcagacctctacttttaaaggtgaaacctttaggcgacacatgccctctacttttagaggttgaacctttgagtgacacgtgtctaaaagtacaaatggtccccaattgtctaactgcagcacacacgagcacaattatttctaaggaacccaataatcagatctcatttttgtgtgtaatttaccccattagtgagcttttagcagaaatccttgacaggtcatggacatgtccatacatgactctagcatataaatacttttctattttcatacgaagggaggggtcaatctaaatagctgaagctctgccaagattactcttcgtcttcttcttctttaagaaaactaagagtacagaattaatgtttcatgtaaaacattaacatcaaacatgcttttagaggctaatagacggaataacatctgaaccacataaaaaactctccatcccttattttttacatttgattaattttttagttctcaaatatctagtttctgaaaatctcggtaaataatattaatttgttatgtgattgttgttaggttttatgccctaaataaaactccatttcaatgtaatctattttattcaacatcaataaag

SEQ ID NO: 377854 - DNA, 705 bp, Cannabis indica
cttgaagcacaacaacattatttcatatataaaactttttctcagaactctctcgaaaggcaacttttcaaaatctagagatattgtcattcataatgtgatgtagttagtctacttcaaactgctttgtttaacacaatggacaacaatttactaaaaccacttgaacaagatccgaattttgatctgcttctcttgtaacacaatttcttattttcccttaataaggagaacctttaaagtttaaatccatgaaatatatgaaggaataacatcatgaatataacaaaaagatgatgcacaaaaacaggtgtacttagattgagcagttcagaaatttttccatttcatattcagatgctaattgctccttttgaacaggagagatgccaaacccatcctccatccaggggtcatagagtgctcgggtttcttctgtaccagagatgccagacctgcctgcaagccttggccgaagctcatttcctgcttgtaacttgttcctaaggacctggaatcaatgcaaataacaatcttattcgtacattgcaaacatgggattctaatgtgatgacatcatttacttaaagactataaagaaagacaaaaagtgatacttgcaaacggtaaaatcctcagttcagaaaactactatttttcattctttttcttctaatctttcgtcgcacaagagccgtgctaaac

SEQ ID NO: 377855 - DNA, 647 bp, Cannabis indica
ttatttatttatttttttaaaatcatgattagcctaaattgatttatcacttttgacagtgttaataaatggaattgttgttggtaattatgattgtttttatggtaagtaaaattagttgttaaactctctcaaccgaaacccatgaatgtagaacattatattaactcatttatattattgctaattaactaccaaagttaattttgattggattcttgatatgtgttatgcatgagataggcacatcgatagggtccactgccaaacaacaaaggggttgtcagtgggaaccacaacaagaaccaatgaaagtggtttggggacctcatcacctcaccctttctttcctttattactttctctctgactttttattatttatttatttataaaattaaataaaattaactctcatcaaaagataaaaataaaaaatattaattaattatgaaaggcatgaataatgaagggtgtgaaagactgacctgccatctccatggattgaagtgttgagggtggtcaaaaagcaaaggatccaaatgcacggctgcaatcaccggaagcactttccaaccacatggaatgtcataaccttatttcaaaattattcaaacaaaaaaataaataaataaataataaatcat

SEQ ID NO: 377856 - DNA, 7766 bp, Cannabis indica
agaattttaaattgcacacatcttgtcctcataatgatgaataaataatttttttcatttaaattttatataaaggatcaaagaaatgagttagtcttagaattttcattttatagtttttttttttggcaaagcatacaaaatgtaatttttcttttttaaaaaaaatattttaatgggaaaaattaaaaaatatggaaaaaactatttagggttaatctttaagataaccaaagagtaaccagttacttccttagaataaataattaccttgtgctgtttttttttctaatttttttttttaatttttcctttaaaatctatattttttcaaaatcatatatttgtacaatttgtatacataccctataataaaataggtaattatatatgtattttgccagggatttaaaaagaaaaaagttcatttttcaagtaagatgaatatttgatagggttctaacaacttttgttgttttcttgtacttatttttgagaaaaataaaaataaaaaaggtaatgacttaatgagtaaaacaacctttgagttaagaaagaaccaacggtcaagtaaacttggcgggaaggttaactgttttttcatttatttattaatatttatatttgaaccaaaaataaaaataaaaaataggatagtaagtgtgaactgatttaagttttaatggtagtaagtgtgggccactcttatttggaattttggggtaagcctctcacaagcaatctcttaatactactttcggtgttatttttggactcttttttctctcaaattctataaataactttccatttcccaccatttctactctactctactctctctcaccttcttcttcttcttcatttttcatatttataaccaattctggatgattctgccttctgggtattttaataggttccaattttggaagttctaagtagagattgataaaaaaaaaagttcactttttggaggtttgactgttgactttaagcaatatctgtttctgggtattgctcaaaatttgatttttctttttagtgttttgtttgttttgggatatagtattttgtggggtgtgggggtgatttaaaacaatacttgtactgcatttgtttttttaaagacaatgattgatctgttgtacacaaggaacatactatggaaatcttactcaattcttggtaagaaatcaactgtttctaaaagcttttacttttggattttccaaatcttcaatagatacagcttaggtacttagctaaaacaaacactccaatcaagtaatacaataatctttccaagtttgctttcttctcaatttgcttatattctattatacataagaaaatctgttaattagttagtgagacataatatgaccaatatgggaggagcatcactgcctcctggttttagatttcatccaactgatgaagaattggtgggatattacctcaaaagaaaagtggaaggactcgaaatcgagcttgaagttattccggtcatcgatttgtacaagtttgatccttgggaattgcctggtacttaactaaattttcaatcttttaagtttttattgaagctaaactaagtgcattgttttttagtactactcatgtttcatatgttttttgagtacttttctttttatctcatcttttgggacagaatgtgtttcaaatgtccttccttttctttaatggggccatggttttttttagtacaagaactgtaaaagcaaaagttttagaaatctgatgtgtaaagctatctttctatacttgtagagaaatcattccttccaaaaagagatatggaatggttcttcttctgtccaagggacagaaaatacccgaatggttcaagaacaaaccgagctactaaagctggctactggaaagccactgggaaagacaggaaagttgtgtgtcaatctggtagtgtaactgcataccgaaagacccttgttttctactgtggacgcgctcctttaggagaccgaacagattggatcatgcacgaatatcgcctttcagatgattttactcaaggcgcgcctagttttcatgtaaaaattcctatattttcattttgttttaacttgtttagctcagaaaactgatggaaattggctgcagggtggctatgcattgtgtcgagttgtgaaaaagaatgagaatggacagaagctcaatgattggcttggagaaccgaaaggtaagaagattggaagtagctcaagtaatggtgggcttattttgaatgagcctttgggaataaactctggtgaagcttcatctcatgcgagtcgatactcgagtcctataatgtctccaaatgaagtgactcctgtatcagattttgagccatctgtgacacaaaccaaccctgcaagcttttgggtctcaccagacttaattttggattcatcaaaggtactaattagtctttttttagtgaaagaactaagacatttttaagtactcaattgtcttaatttcggtttattacaggactatccacaacttcaagcagccataccagattactttggacaatatgagtgtccaagctcatcaatgacaccatggcaatcatatcatgaacacactgagatttcacctagttcatcatactcgaatttgaatggtggaattgaactttctgatacaagttacatggatttttatggaaatgaagttatggaatatgaaggttatggccagaccaactcaatgagttatatgcaaccattctaataagcaaaaaaaaaagatgtcattttgactcttttccaatgcagagtgtcaaaattagcttcaatttgcagaaagtctatggctgcaacaacaccatttgatcattttagcattaaccaactgggaagatcatgtactgattcgtagagaaatcgcccgagacaacgcattttaaagttggttcttggtagtagtagagaaaaataatgagtataaactccttcaaatctattaagctgaagtagttttatgacttatgcttgtttttcttgtttttctttgttcgaattaagctgcttacgtatcctttttgttctttatttcggttttatgtgtttttttcactttgtaccaggtgaaatcacttttatcaatttcatctgtagttggtttttggagtaaaaaactaaatgatgaataaatttgtcttctttgcattaaagctacaaactttttgcatataatttcttatttcaatgaagaccaaactaaacatattctctcttttatgtaattttgggaattcaatcatttttttatcattctttttggtggggtcttgtagttgttgagcagctattattaactcaactttttgtagaactctaaccaaagattcttactgtggtaatgtgaagtgtgaactgaaaatcagtagttaatttttctttttgatctttttaatgaccaaagtagagttgttatcttcaatcactgttaatggtcaaaaaaaatgttcaaagattatctcagactgaaatatattcccttcatgattaaaagtttttaaggataaaattcacatttttagtgttgataataagttatttggtacaagtttaaaattattttcatgtgtttggggggtcactggttttggtagatatatcaaagaatcacacttaatatgagtatcttaaacatgagattaggataggaaagagggtcttgtcaaggtttacatagccaatatttatctttctatagccaaataaaagaaatgaataattagactttttgacccttaattttttttatacaattaacttgtatctcttttcatcatattctatttaatttatcattaaacgaataacacaatagatgatggtcgatagataaatacaaagtatatgcctttcattttattttttacattaaaaaaataaaaattattattattataaagaaacggcctttattctaacgtaaaaatagtaaaaaaaatatttaatttgtaactatttatcaattattatccactactttactcatttcgcgataaaattaaataaaatataattgaaaaactatgttattataaaaattatattttaaaaggtattattaaagagtcatatactatatactatagaagacacaatttaatattgtaaaaaatttaagagcaaaaatgttaattattcaaaagaaatcctcatcttttggtagcaatgaataaagtggataactaagctggggtagtaagagaaatgtttattattatgggaaagaatgttgattattaattatatgttaacaagattaagataagcttaagtaatttaatatctaaaagacaaaagttatataagaaacccttcacacttaaataggtttggcctttggcctttggggactacattttcatagattacataattaagtaaccatatagaacttctaatttttctttaagaagaagcctttttgaaagagttgtgtgtataagctagttttcaccttttttccccactaattagaataaataagatttttcccccttaaaactcttttaatactctaattactttttctcaaatggtaaaaaattatatcataaatatcccttttcaattacattttgttcattaaaaaaatgatttatatggtcattagctaccagtataatgataatataagtgtatttattgacactaaagatataaacattaacattaaaatactggtatatattttcaaaattggttattaaattgttatttatgtatatataattcttatctagacttgagaatgcttcattagcgttacattagtgttaaattagtaaattattttaaaaaatgaacagaatattctaaaggtgaacatttataacaatttttataagtcacctaaattttagacaaaactttacaaagaccctaatttagagaagaaaaatagtacccattaataataattctttattttatatatagcatcctctttgggagcttgtgaagaatctacaaacaagtgccactactctactatatattctaaggttatgcacattctgtcaaatggaacaaactacaactttacttaagacttcaaaaactaaaataaaaccctccctaaaaaaaacaaagctatattatggaaactaaaaaagtgtttatgtgaagcacttctattagaaagtggccactcaacatccaataagtgatatattttttgtatttggccaaagctttcaaaatgttccccaccccattcattcttagtttactttgtaaaaagaaaagaaaaaaaaataattatttgataaaagagacttcacttcactatagtgactactttatcttcttaaaaggcctatattttcactcttttaatgtgtattgagtatgtgattattcttccacctcccctctactatttccttttcaaaaaaaacctcattttcttactaataattctttgttgaaagcaatgggaataagcgcgtgacacactttttttgttcactaagtaaacaaaaccaacgagtatggttcattgaaaatgaaattaggaaacaaaagcatcaacacaaagatagtgaaataagttgtcatgtattgttaattaatgaaagtatgttgattatagttattgttatatgacttttgaaggagtactccaaaatgaaatgaggcatcaaagaagtgaattgggtaatgagttatatagctttgtgatgctttggaaatggaaagttgtgtattattggtttgtctttaatacttttgaaaaggtttgtgtaccttgtgttcacataagacatttctttacctttcacaacatatcaagcttattatagagtaaatttagattttagtgtacttcttttgggataatttaaaaaaaaaaaaacaaaaattacaaaaatacagttgtacgaaattttaaatatttttacgatttttatgattttatttacagaaaatgcagttttttgatatatattttatgttgtgcttttgttaatttattattaattttttgttagttgtatattatattttttttttgatgttattttcttaatatttttatgtagttttcttattagttttgtgttgttttaatagaatactgtaaaaatataaaaagaatctttgaacgtaaaaatataaaaattttacaaaaaaatagtacttaatgtaattattcctaagttgtttggtgtccaaaaaaactctaattatatttattttattttagggcaaaggtataatcttatgtttaaaatattgctatgtagctggaccgatcttgagattttgtgagtttctttacctttcacaacatatcaagcttattatagagtaaatttagattttagtgtacttcttttgggataatttcaaaaaaaaaatacaaaaataaccaaaaattacaaaaatacaattgtacaaaattttaaatatttttacgatttttatgattttatttacaaaaaatgtggtcttttgatatatattttatgttgtgcttttgttaatttattattaattttttgttagttgtatattattttattttattttgttttgatgttattttcttaatatttttatgtagttttcttattattttgtgttgtttttacaaaaaatagtacttaatgtaattattcctaagtcgtttggtatccaaaaaaactctaattatatttattttattttagggcaaaagtataatcttatgtttaaaatattgctatgtagctggaccgatcttgagattttgtgagcttcaagaaagataattttattgggctttattaaaaaaaatattcagtatttttaaaaattactaaaaaatatatattttttaaaaataaataaaaaaattagggcccttaattaccttagcctaagattggccctaactcgtaaagacataatcagaataacacattggttcgcgataagatcatgtggttcggttgtttacctaaaatattaaggcaaaccactcattttctactattgaattatggacttgtttggagaatttgaaatgatgcttttgggaggatatttggattcactctattgagaatgattgcaaaaatgcgaccataccattcaaaataagacgagtattttggaaaaaatttattgttaaagattttcaacatttttatttaacttgtgagaggaataaaatggctcacacttatgatttttagagtttatctataaatgtaattgaacattgtattactcatattattaaagaggttgaattaggggtgcacatgggttgggttggctgggttagaagtgttttaatgggccaacccaatgactacaatttgaagcagctataaaccgtttaaattttttgtattatataacccaaccctactttgtacaataatttagggatgggttgggttgggtttattgttagtttctatatcactcataaaatatgcaacaacaagattcaattccataaataaacatattacatataattataagtgtataactatagatctaaagaatacctttgttgattcaaagagaagaattcaaatggcggaagcgtaccttaattcatagatagtgatgatcttaatccatcttgtagagataatctttgtggtgattttgggtaatgatcttccaagaaaacaagacttagggttttctaattttctctcttgatgggggaagatgagaatagaaattcactcttgtttcttggggaccact

SEQ ID NO: 377857 - DNA, 7558 bp, Cannabis indica
tgtagttcttactgattgtggtttagtcttcaatagtcttccaatggaatttcgttcatttttaggatctaagaaaattgggttgtgtttgttttgcaggatccatgtatcatggttctcctttgctactctctcttcttgggccactcacagtgaaaaggtatcgctctagcttaacctgcttgtttagacttgtggttactgattaacttcaggttttatactaaatttcattattgtgtctgattcatggatttgacccagttgctaaatatgacttgattgtattattagtatttccatggatgattataatttattgttgaattaattttctggcaacttaagtttcataaattgaacaattctatagtagaagcagtttagaatccttgtgaaataatgttgaattgattcaaattttatgcccgttcataactacctctatcatacgcattgtttaatgacttactgatttttttttttttttttgtttttttgtttgttcttcttcttcttttctgtcaaatttgattgggcggtacagaaatggaggacaacccaatcatcttttatgcgggtaagtttaatctttcacttttccatcttcatgttcattttgatttgctggtgtatatagcttatgtttaaatcttacacatgatatcatctctatcactttgtttgtgtatgttctacatgattgattgcccattattaaatctaacgtggatagcattttgaatttggtgcttttgtttggcttggctatacttctattgtcagcacatgtgtaacttaattaattttgtttattcattggctttagaagccttaagtgagcagagaaggctgcaagtgtttttcctttatttctcttaccaaattaatttttctattctcatttttcttttttaacttacatttattatatagctggtagttgatgtgagagcatgtttggatacagtttggtatttgtgattgcagatgttgtaaatgcaatgcttattcgagctattggtcaggttctacagacttcatataatcagcgtttgaaatcactaggccttgatgcaatattcaaaagatctggtaattactagtttataacatctaaacatatttcttagttgtgttgtgagtgtttttcttgctagatttttattgctatggatggtgtgaacatgtatatatgaagtttcctacctccaaaatattttaggaaggaacaatttcgaagtgaagtttgcagtgtgagtttgagtttttttttggaattccatgaggtttaaatctgatctttagatgacttggaataataatatgagagattcgctttttgaaatgcctcagaaagaataactggaatattttttgtgtaacctttggttctgttctcattccctgtgagtaatttgatttgtttcatgaaaattgtagtaaatttattaatacgcttatataatttacacaatttaaactagtctgctaaaccttgtctctcctttcccaatctcattatctttctttcacaagctaagaaattatggtatcttgttgctttcagagatccttccttctcgagatattgctgctcttgtctacttatggaatccttatacaatagtagcatgtgttggtttatcaacatccccaatagaaaatatggctgtcatattgtctctttatggagcatgtacatgtaaggacttaaaagtgtttttagactatttctgtacatggtttatttaataaataattagttttccagaacagttatatgtctaaacacagtactaaatcatttaaatccctactaattattactaatggctgttttgaatcctcttatttgctatattttaactattgcatatcttctttatattctgatggcccacaggtaaagctccgttagcagcttttggatgggtcatggctacacatctttccctttatccggtgattctagttattcctgtatgttgtctattgtgctctctttttttctttgttattgcaaatcttgcatttatgacctgttggttcttttgttcaatacagtatttggtaagtgtatgggaatagtataacacatgtaaatgataatcaatactttttttttccaaggtaattcttatattaggatatggtcctgaaactcctcccagaaaattgcttaggctaaggaaatatggcaaaattgaagatgttccctcaagtgatcacagccgtcaaccacgagaagcaaagaagcagcaagaccaagcctacaacttttcttggagaccagttgtaaagttcatagtatggtctatgatatggttagtctatgtgatagttctatgtggtctgagtgttagacagtatggtggccttgaagagatgtttaagaggtatctactatatcgcagaatctcatcttgtatgactggactaccattcttattgattacccacatccataaattttggaatttattgtcttagatttaaccttatgatgtctgttttttgcagaacctatgggttcatccttacagtgccagatttgtctccaaatataggtgtattatggtgagcctcaaactcccagtgttaaagagtagaatatcctacttttgaggtgtgagactaatatattctatgatatttggatgcaggtacttctttgctgaagtttttgattttttcagaaatttctttctgattgttttccacatgaacattttgttcatgatatttccgctggctataaggctgaatcaccgcccttgctttctggcctttgcgtatattgcaatctcttcaatgctaaagtcttacccttcagtgagtccttctcttttgtttcaaggttttctattttattgaggtcagagctttcctttcatgatttaacatcacacacagattctccttttattttcattttacgcatgacagagggtgtgaatctaagatattatgcttaaattttatcattgtctatgggttgtactagccaattaatgaaagatgtcttctagaatcatatatggccagatgatcttattatataaagtataagtaacggaaaaaagcattgcttactcatatgtcattagggttgtgcattcattgattgtttatattacatcttggaactctaattacaatttccccttgtcatttctgtttgaatttaggttggggattcagcactttaccttggtttgttgggattgtttgttaatgaactagcaggcaagttgatacttgttacataattgatcatttttattatttcccaagtttgatattgcttcgcattttaaagtttcaatacatgataaacagatatgcagttctcatttttcctcttctgcgcttatgttggggtttcccttctcagccctgtgatgcacaacctgtggatatggagggtatatataatcaatctcaattttgctcaaaatggtcaaataaataatttatcatggcttaactaaatgtgcagggaactgggaatgcaaatttctactttgcaactgccatggcttacgcttgcttgcaggtcctttttaatcctcttgaattccatttatttgatttattctcattccgtcacacttacgagagaagttgaaaatgtgagatggttaaaatatagttgctacaacctataaaagattggttgagcatgtaaggcccttggtttgatctcatgagatttttgctttctttaattataaatgaaaatagtaccagtttctagaagggaagaagccatttttatatttctatgagaagctctacggcacccatgattcctagtagtgagttgttggcacattgtgcgtaacaaatccttattaagtaatgggtttctaacggggccgccaacttacgggccaggcactatgtctcagttaaaatatttgaagaaatatgtatggaaatgtttgaaactcttgccttttccagcaccccgttactgatttcttattgttaaatctgcagatagttttggtggttgagagtgtaagcgctatgctcaatcatgacaggaagttaacaaagctattaaatgcaaagtatcaagatggcaagtcttgagcatcttttttgaccatacaaacttgtcgaacaaagatgatccttcagagttcataccactgataggttgtagcactatgctggtgttgatcgccaacttattaaccaacatactcaagcaaaagtttttaagacaacttcatggatggaaagctgatgcgtcctcagaaaagctttccctttcgacgagatcatttactatcagcactttgatggggtcatcactgaatttagggatatagtgattacacaacaagaactagtcgaatttatttaatttttaaatactgatttagaagaagagaaagttatgaggaagagacaagttcatattgttttatctttattaaagaatagcagagttcattttatgcaggtccaattttcttgtttttgtccttcgtcaatgcttgttttgttttgtacttattattcttgcttaaaacattgctcagtgatgtttctgataatgatccgaactgttgcttgcctggttaacaacaaatacaatagtaataggaataatgtgttttagtagtgaaaagggatgatgaagggaaaatttgtattgatgaaatatgattcacacaatcacaactctacaggtttcaagacagtgggcctctcctattgatgttaaaacaatcagttcaagtatacccattacaccactcaacacacacacacacacacacgcataaacacactcatcaagccaaaccaaaagctaacaataaacacaaaataaatatttcaaattaattatagtgagttcttttactttcagtgagatttttcacttttcttagcataagtgaagcgaaccaagaatctaacagtttcattaaatgcccagaaaaaagttggagtaaagtgatgcaaatgatggtttgttttcttcatatgattttggtggggtctccatgcttaacaaaatggcaataggaaagtgttcacacatcagccaagatttttgacttgcaattgtgctacaaagtaaattcacctgtcgaatattttgttgactcccaagtactagtcttactaaacataaatgccccaatactcaaaatttccagaactagttcccccttaaaggtcactcattggcattgctttgtgggtttgctttccatattatcaactagcatatctctaagtcacaagggtattaataatttaaaacatttttgttttaagagatgtttgtgttgttgatgtgttaaatttttgatgcagccttaatctatctctctacttccttaatttgtaaaaaggttaagttggggattaagcaatagatgactctaaattttggtccagggtcatgtgccttttggtgcaatcaaatggagtttttgaatgcatgaacttcaatgagttttaattgttttacaaggcatatttaatatttaaacccactagattggtcaagttccctaaggctgtggctgaccatatatcaagcttgcttagctacacggttcttatttatttattacataataacactataatataaatttacatattgattggtacttgtacaagaagtcaaaagttaataattttatatttgttatctcatattttctattcattagacataacaatgttctcttgattttatctaataaacttttgaatagtttaaatggaaaagaatatgtaaggaatttagggtacacgtgaatttggaggtaaatagtttattgtttatcttgaaaccgtaaaataattttataaaaaaggacaacaaaaaaatgtgaaatactttattatatggggtaaagaaacgacaatctggtagaaaattataaaaaaacagggaaaaaaaaattaaaacccatttgtgtgcacttttgttcagctactattaatattatttatggaagggatatataggtctactatagtagtggaccacttgatcatatcatatacgtacatatataactacaactatgtgtacttctcttatggttaaagctttgaaccatgttaagttaggcaaaatttatcttaaatttagggtattagtctagtaatacaacttaataaaaataatgcgtttaacaatgttatagaaatctctagattttattctgcttcctttagggctttgtcctgttttttcctctggcctgttctagatccctctcgcccttaagctaatcatcccaaatctttctctgcacccataattcctgccttaattgcattctgagcttccatttattgttttgattttactgtttccccttacatttattactccacaggcttttcttggtgctcgtctcttgctcaatcttttccatccctctctctgccatcgtttccattcccaaaggtgttttggtgatgatgaggcctaacatgtgaagatattgcctacagaagatcgatagttgaattgacttgacatcttttttctttccaagatggctcttccatttcatgtatcttcacccatggcatttctatttaaggggccttcattttcatagctgctacacaatcttaaattatatccatttttgcactttcttttgtgtatttttctgcttagcgaaaatggatagccttaatcttaatattactcaaaatgtaaccctcatcgatgaagagagtcttattgacgagtttgatcaggtatccctaggttcaggatcttcctctgagtcatatctccttattgtcaaaattcttaccactaagtctcttaagccaatctgggttgaaaaagctacgatggaggcttggactctctgctttcctattgaattctctgattactattctggaatgttcttggccaactttggctgtgagggagataggcatcgtattcttgaagatcaaccttggtatttcaataagtgccttatgctttttgctaatcctgaaggattggaaacccttagttctgattagcttagatatatctctttttaggtgtaagttcaccatatcccgtttaaaaacaagtcctttcaacttgctcagtttgtgactgaggaagttggtgtccttattgagatttatatactctctcactttttgaataatttgggccttaccttcaaattaagattttgcttgatgttagttgggattttatgctctaaatgaaactcattttaatacaatctgatttgttatcaataaaagattagaagtcatttaaggttaaaaggaagtttcaaggttaagggttaatgtgtacaaaatctgttaagttctaaacatatagttattcacaattatagtgatgtcaacacagtggaatgtgattgtgattatatgcttcaaaagacaatgtccctgattcatcagtacactggatttacactgatgtgataatcagcgataaattgtacttgcaccttggataagtgttatgctctttccagaacattggcaaagtatgctagttttggatgtatggagtata

SEQ ID NO: 377858 - DNA, 5814 bp, Cannabis indica
ttttttatgtatattaaattttactctattctcaatcctctctgtttttgctactcccaacctaacagctttttaataaaaaagacatacaattgctcctccaccaagtaatagttgcacatgcagacgacgacttggcctcttccaagatccttcagttttggaaactctaattgtaacaactgaggattgaagttcagcaacataatgtgtcaacaaaaattgaccttcggtgaattcatatccatcgtcatcatcttcatatagaacacctttagctttccctgtaaagagaaatgatcttctatgaaaatgttaatgaaaaaccttatctgaacaaagttgaagttaatagcagcatgtcaagctgctgatataatctatactattaccgtggtataagcaacgcataacattcttaaaatccaaatcccaaaataacacgtataccctttagaaaatgttgaaagctagcattatacatatggtgttttttgtaattcaacatagagaacacatgtatttacatctgtctaaaacatcttggatagaggtttgttcctagaaaatctagactcttgtgatatttttggttcattgaaatgggcttttgaatggagaagtcatctgaaaagtaataaacagaagtaaattaccatgttcatctaatgccacaataagtgacagatcatctgatggacttgcctcgccaacatgctgatgaggaggaccaaaaggaataattgctccaccttgcaaatacaaagctggtaaatcctacaaggacaacaaaaacaaaaagtgaatatacgaagacaaggaaaatcacaaacaagaaaattaataaatttggtcctacataccgggtgtgaatcatcaaaatcaaaactcaaccagattccttttggtagtgtgaactggatattatctgtttgccggtcaggtacggtactaatcatgaaacacaaagtcaggaaaaaaagtccacaatttaattatcaagaacagtcaaaactttcctgatggacatctctttgaatattatatgaaaggtgtaaaataaaatatcagcaggtataacaggagtttcttccatacacacatccacagggagtaagtgaataaactaattatacaaaagggagaaatgattgtaaggttgaaaaagagaattattgagaaacgacattcaactggacagaaatttcagtttctcgtcttttcaaaaccacatgagatctccaaataaaatcggtacagcatgttatgaggcatctgacattgggtaatattataagaaatattattaatataacatgggaaacaaccaaccatctagaaggcagaattggactgatgcatcaaggaccactttagtctcattataataaatgcatgaagtgcaacaagtttcatgaataaaagtaactttgtagaagcacacaataagatcaacaaagacctgtcacactaaatttctgtgaaaagaaatagaaaccttgaacagactagaagtgggccaagcagaaaagaattctccactttccttacactaggatctttggtatctacacaacaatacacagatgttagccaatattagaaagagaaattttcatccagttccaatgccaattaaacattaaacaaagttagaagttacccgcaaaaaaagtaggactggctactggagtaccaattgtatgtgccatgtagaaaagagtgtatatatgtggaagaaggcgatagcgcctaatcaatgcaagtcggcatacttcttcacactgatgaagggaaatgaatttagttcataatataggtggtgagaaaaattagaaattatttctcaagggaattgctgcataaaagaaaatggcataaaggtcactcccattcattggggaaatgatcccaaaatatctatatgcaatagatacataaattgcgctaatatgtagtaacagacatgcatccacatgattcatttgttggattcttaacaagtatttataatccaattctttttgacttattcccacataaggctgtgacttataaccacttattgatgaagaatacacttaacatgcaacatgccacaccagaaaaataaataaaattgagtcccttctctgtttaaactagactaccattgttgaatgctctacaaatcattatttagctgagatattgtggtacgtattcaataacaaacgagcataagagcgattactatagtctataggttaagactttgaatatcaaacctcactgccaaaagaccatggctcatggtcagtggtgcccatttcggagtgcccacggcagaaagggaacatagcgcctacacccatccaccttgcaaaaagcctaggagttgcatttccagcaaagccaccaatatctggcccagatagaggctgaccactgagtccctaaaaaatcaaaggcacaaataaaccagagtggatgcagtaattggaagaatgtactgcatgttgctgtgatgatatcatgtaaccttcaatctagagatttcttacagttgtaaagattgttggaagacatatgaaactctttagttactgataatattatgtaaccttcaatttagagattatgttattattacgtcaaaaagagatggacaaaacaatgtcaaggctagagatttaaatgttgtgaacgataaaaatatctctacattcaaagtcaattttgtaattctttattattattttgtaagagagacaatactattcaactacaaaaaaggagacaaggtgttcactttggattacaacaacaaccatcatgctttaatttatattcaagaatcctcttaaaccaagtattcataattaaaactaatgaaatttgatactatcattatttcaaggatcaacaagtatccaaatgtttaaacccacagcagtattcaaattttagttatcctcccacaccaaaatgaatttgaagtacttttcatctttctcttagtcaagttgaatgagaaacatttctttgatttttcaactataaaaaacgtgacataatctggcataaccctacacacacacaccaagaaagaaaaataaaaaggtaaaaagttcaataaattaaattacaacaagaatcatccaacagaaataactataaaatattgtacattatggaaagcattactgatgatatctaatgcaagttgtaaatataatcgaaataattcagggcatgaatgtgtgctacaaccacttgggtagcactcactcctcaacaatgagagcaggatgctgaagtaattgtacatcaccaacaaattacatagttgatgtggaatcttaatgatacactcccttttaaagacaacgtccatggcagcccactctatggcgaactattttgggcttttccacagatcgctttttccacaatgttagttactattactagaaggcgctgactctgatcctacctttacaaatatttgagtacaacttcaaaaaaactagcctatgagaagagtgtccaagtagttatgaaccccaccatggatgttggcttaaagcatgtgtattgttagcattccacattgactaactatgagattggttggtactgattgggtactgtccactcaaaggctagtcttccgggagtggttcttaaaaagtgattgtaacaaatgtataaaagcgaacactctctagtatgacctacattgtggaagagcaatctacgataaacagccatgtatagtgaaagcccaaaaggggccattgcaaagtggcccaccgtagagtggccattgtggatgttggttttaaggaggatatagacaactaaattccaaaacaaaattagctacatctcttcatttaaacatgatactacaaaagagaaaataattattaaagagtgacgctttggaacctttttttctttttcatgaatttctttattattattattatcattattttattttgaaaaatatcattactgttattattattaaatgacaatgtagactaaatattgtgtaccaattgaagaaccattgaaacactcatatgtaggtgctcccaatttgacagattgtctcctgtccatgtggcagcatatctctgactaccaataaacccagctcttgtgaggacaaaaggccgcttgtttggattagccaatttcataccttcattagtagaccttgccataagcattccatacacctacatttttagcattttccaaggataaaatttagagataatttatttagtacaatagtaatttatacagcaattatacgataaacagtcaaaaataagtgtcaaagatgattatggacaagatttgagtaggacccaacctaaataaataaactatgaataacagaaaataactagaagcatttattgtctaaaccccctgatagatttgaaataaatattacattgtgataatgagaatgactctgagaacccccaagttcatcatcacccctatgaacattgctctcgggcattgtttttgtaacaacctgaaaaataaaagaacaaaaaaatgtatcaagattcaagaccatgcaaggaatttaaaattgcaatttcaaagaaatttgcagctaccttaaagacagcaggttcattcatatcattccatataccatcaacaccattggaaatgaaatctttaactaaattggcccaccacatacgcactttctcctgtgtatagtctgggaaaacacaaggtcctggccaaacctcccctgaaacactcattaagtttatatgaaactcatcaacaagtcttccatcatggaaatactgcatatcttgtctaagcagatttttctgaaataattcctttcaattattttatcaaaatgaaaaggaaaaaaaatcataaatgaagacaattaaaacaatgtaaaaattcttccaaaacaaatggaggaaatcacttcttgtaacattaaaaccaaatactattcttaatatgaagagaatatacctatgaaaggacttccatcttgtttcttaatccatacatcatccttagagccactttcatagacagaataaccatcttcctgcttgatcccagggtcgagcatccaaattgctttgaaaccattgtcgtgaatatcttttaccaaagaattaggatctggaaagcgctcctgaaagtttcagcataagaatgttcctggttagaatagtatcaagtacatcatcagataacagttacaaatagtactcatatcagcataagtagcacttttagagctgaataagcaaacaatttttcattctaaactgtgcattagatcatatcagaatttataaattatattatcaaaattacataaaatagaactagactaacaaatttttttagctaggaaaccaatatgtataagtgagtttacagtaaaataaaatactatctgcaaatagcatttataggagaacatgccttatcaaaagtgaaacaacgaaaaccatccatgtaatctatgtccatccaaatgacatcacaagggatacccttctctcgaaatgttctcgttaactgcaaaaccaggacaatcaataataatgaaatgaaaaacaatagacttcaaaatttgaacttcctctccattgggaataacaagagtttagttttctgattggaggtcaaaatattgtactacttgacactcataaatgtacagatcactaaaggcaataaataaatgtttgtgaattcctggcacaaaccgcttagtcagaaagtaagagagaaaaagagaaaatttaattt

SEQ ID NO: 377859 - DNA, 1673 bp, Cannabis indica
ccttaaggatacgttaaggttttttgactacgggtttcctctgccataagtgaggtccctaataattttttggggtggtctgattttgacatttgtctctttcctaaattgttttatacataaactttattatatatatatataataggaaagaatgctggagaatctttcaaaacgcagaagtagggaggtgagtgaaaaaggagaaaaaggaagtggattggataaagttcactgcaaaattgagatagaaaatgaagtcgcaattaaagtaagaaattgtaaagtgaggagaaagtgagtggagacaatgatgggagacttatgggtcttagttgaatattctcaagttcttatttagcgatgtgtatagatcttagaggcttgtgactggttggagataaaaaaaaaattctgacctagaaagagcgggcattgtgaattttagggagatatcaggtcctgaaagtcctacattttgtttttctaatacgatcattccatttttatctacattgatctgctctttattaatctgtttttttatggaagtttttcttgttgacaggtaaatttagacatcttcctgttgtagaaaatggtgaggttattgccttgttggatataaccaaatgcctctatgatgccatatcaagaatggagaaggcagctgagcagggaagtgcaattgctgctgcagttgaaggggttgagcgtcagtggggaaacaacttttctggtttgtagaatacaattttatcgtcataaatggcatgagatgcaaagaaatgtgccctttgtcattttgttgcatggaaaggattaaaccctgatatttacatgaaaactgcagaaaactggctgactgcatttctctcattttctttattttctgaacacgccatccagacattatggagttttaacctgattaggtcaatttaatgtgtgagtttgattggttaattactaaacatttaatgcattatagatactgttttctccagggtttcatcattggaaagtcattgttgggaagagaattagcattaagttgtactggcgaaattatactgtttttgaagttttaatactggataggagtcctttctcttttaattagcactttctatatggtaaaaatatatgtatacacaaaattgttttgatctcagaattacttgtaatagaaaaaataaaacttctgttctctaatgaaattataaacatgctgtaaaagttactctgtgcttaactgtcacatattgcaatattttgtagatctcttattattcgggatacatacttgtcataatctgattaactttcgacttctgtttctcaaatttattgcagctccatatgcttttctagaaactctgagggaacgaatgttcaagccttccttgtcatctatcattactgaaaataccaagtatgttacaaagtttattttctaaaatgcagctctgctgagtaatgctgtttactaagttgtaatttttctagaatttgtttgtcgttaccaaattttgtagctccatgtggtttcagggttgcaattgtatcaccatcagatcctgtctatgttgcagccaaaaagatgcgggaatttcgggtcaattcagtcattatagcaacaggaaacaagattcaaggaatacttacgtatg

SEQ ID NO: 377860 - DNA, 9467 bp, Cannabis indica
aattgctttttctggacatggaattgtagcatcacttaacgcctaattgaagaaaaaatcaaataaagaaaaaccttggactttcattccttggataatgcaaaatgatttactactgctctgatggcatttagatgtttatgtattagaatatagatgactagatccctttattaacaatggtaaatcatccacagcacaacatcaaaagaatcgagcttcatcgtctctagactttgtcaagaatgtatcaagtggtatagactgttgacttatccttatttagtgttattaagtgtgattacaatattagtaactcatttatgtattctgcatgttttagatgttcattcctatccaagggttttattgacacatattccattgtatcgacgggatttgacatattgtgggcctaatcgcaaatctccagttatcaaccaggtattgatttatctgttctttttctttcataccatttatgcaagtagagtgattgtgaatcaacactagaatttacatgtgtctgattgttattctcttttattactatttcagcgagtgacgcgcactgctgatggagaaataaggtttgattatttttgttgtttttctacaaaaatgtgcacatgaaagagtacattgagttggtgacctcatagatgctttcgaattgattttcatttcaaataaacaggtaccagaattacatttccgaggagtcatcagacttcttactggagttgatcaaacctgtaagtactttattctttttttgtgcatgtaagctggccccggtacaaactttaggcagatattgaaacactatagatagacacgcagaaaactatagtgacctcatgtgcaactatggtctcaacttgtaatgaagaagcatgaagtaatttattgattttagatactttatactgtgtccatgtaaaagtttatgttcaagttgaggaatcattaacatgtacttcttttcaggtacttatcttgtcaggtcacgatcatgatcaatgcactataactcataagtcaacatccgggcctgtaatggaggtatgcacccactttattcggtatatgtaactcttattgtggcgtgatatatcgctaacaatagtctgcagcacactgtagggactgtaagttggcagcagggaaacctgtacccttctttcatgttgttgtctgctactaatattgtactttcaaacacttcaagtcctgatgaagcaatatcaactcagctgtgctttcttccaaggcaaattttcatttacatatggtaactcccagtgttaatttgtaaaaactatgaatgactttatgctttaattgacttgttcttaaactcccatttgctctgtaatatgtcaggtacattgtactatttacttttacccttcttgccctgctgctttggccaactagtagtgtgagcttgtggcaaagtttgagcaatttttcggggtacggaaaacaaattctcagtggcttgcttagtagaacaaaagagaaaaacgaagatctagactgcgagtacgaaatgatctgggatgcagaaggatcgatgcatttagttaagaaagcctcaaacaccactctagtagcacgatcaagcgagatgaatccagaaaggtgtgcttgtagttagttttttctttctcaatgtgttatgtttttaatctagtacttgttattttaagtaatattttgttcttgatgtagcaggggtagcgcggtaattcggccaacagcaagaaaaaatacatctcaagagtcagagatctctttgagtgtggacaataatgcagatattggagttgatcacatgacaaaattaccactaaggagcaccaaatcttggagaaagattgtgatccaaagattgttgcgcacatttataatgctctccatcattgctgcagtgaatatacctctttacatgattttgcttttcaaggactggattgaccaatgatgctagagttcattgaagattcatacatgtgttgcttcagtgggtttttttgcgcagccccccttctactgtaaatgaatatttatgctataacttttgcatctattaagctagtaaaatcaggtgaatcacttgttggtgatatgggaatttgtttttatgtgtttacctttggggggatggactgtggagagtggggtgtgtgtgagaaagagaagtaaaagtataatgcagtcagttgaattttgcagcaaccatttccagtgaataaagtctaattctttacaatttaggattttattgattttatgcatccccattaataaagcttgtttatttcaatttgttcaagtcatgcttttccaaacatagacacggacaaaaagtttcatattttgtgcttaaagatggggattaagagatacagatcatttaacctcttcaaattttccattgttatttaagttatatatatatttaatataataaccaattttattactgtattgtcaaataatttttaatattaagaaagtagaaaaatctgctttaacaacttaaattatccactcagcatgattaaacttactcttattgaaaattttaaaataattttgtgatagtaaatctctcagtatattattaatgagaagacaaaatatatatacttataatttacaaaagatgaactcatttattcatttatatatcttaatgcaaaatccagttatatttttcaatcatcaaagtgatttctgttttttcttttatgaaaagtgaatattctcgttaaatcaacaaacacaaattaaattgatttctcatcacaataagaggtaagtattttaataggaatagaaatttaatccatggggtagggacccgcaagtacctatctgtgatggggcagagtcgaagaatatgactccgatttcgatcccactccatttagaaaagtaccaatcttttgtactatctttaaattattactattattaactactaatctttaaatgaatcttacaattttagaaagaaaaaaaaacaaaaaactattttattaaatgggtataagggggagccatctcgtgctgtcccaccccatttacattcctaatcctttgatctaattaggtactcgtgcagcctggtggttcgagatggtggattttttttttttttttacttttgagaaaggtaagattccaacttgagagataccttttttgtgaacaaaaaaaatgtaaaataaattaattatgcctatgactatggccgatgacacgatttgaacccgtacgagagttagtggatttgggtttgccttaaatgggttcggattgtgttcgggttgactcgtctaactcgtttaataaacgggtcgtgttcgagttaacacggctaacacgatattgacccgttaataacttatttaaaattattttagtactttaacgtgtcataaatagattgtaaacgtgttgaatacttcataaacgtgttattgattgacatgtttaaacaaaatatgcttataaacgggttacacgggtcgtgtcgtgtcaacccgtttataaacgggtcgtgttcgggtcaagcatgttcctgttatacatgagtctcaacacgacacgaacacgactcacgaacacaaattgccacccctacctatgaccacgagatactggattcaatacaaatataaatcctaacattctaagttacgtggcttcacgggttgattgagtgtttgaaaaaatattagcgtttagttaaaagtaatgaaatagaatagaatgaaattaaaataattttcattctattcgtttatttggttgcatattaaagtattagaatgtcattttattaaaatgacatttacactattttaatagaataactattccattttaaaatgaaaatgaagatcatttcaatgcataaaaaataaataaataaataaattttttataaatttttttttaaaattttaacttttattccattcttattcttattttcattcctattcttattcatatatttcattctttccaacccaactccacctaatactctttcacaaataatgaagcttttgttcaagattgagtctaacatcctaagtcacttagctgcataggttcgttggccaactccatggctcgtgatagtgggttcaattgggccagtagtattttttctactaaaggagaaaataaaattttgtcagagacaagatcttctcttaatagatatgcaaatacaaatgtgaaacaaaaagaatttgctctttagatttcatcaacaaaaatcatgatatcaagattcggaaccacacttttaggtattatgaaaaaacaaaagatataaagtaaatgaattatgtattaatatgtggatctagtatggcagagattcattaagttatgctaagcacaaaataattattaaaaaataaccctttatttaagcattatattaataaaacagtcggcaaagagcattattacaaacttgataacacgttgaagtaagtccccacatttttctaagggggtgagaaagattttgtcccctgaaaaccccaaagaaaattgtggaaaaaaaaaagattatacacatcccttaagaaaaaagattatacatgatgattcattccatttatatgatctcacatagcagcttcttctcattagagccattttctcttatacaacatcaaaggtagattagataaccaaaacccctcttcatttcagctccagttgttgaaaaatcaagtgcatgcggtcataaatctcttctgttgcaccctcctcaaaaacccaatggaaataaatcccatttcaggtaaaaaaagatgaagaagagagtaccaacccattagagataataaaaccgcagaaaaagacttgcttttcaccacacacacaccaatatgtgatatgtggttaaaataattactaaccggatcagcataatcagcagacgattatccccaaacagagaagagaagtaaaccttagatattatatgagtaaaaaagagagaagaaaagagatgactttttagtgtttgctaatatatatatagaccatagttaatatatgaattaacataactagtcatctccttgaatataccagcaaagaagcatggtagcacagcggcgtagaatgtaaattctggctctctgttctttgaccagagaagcacattttctagaaaagccatgaccctttttagaatgaccattcttgttggttttggttctattgcagtgttgaatcacaacatccatgattggatatgaaatatatttgtatgaagagtttgataaaaaggctctgataaaaaaaagctcggtagagagctttgaataggcctgaaagttagaagaggctaaagggtgtttatatatggagcagaatcttgaagcttgattaaaaaatagaaaagggttgactgagttttgaagggagaaggtgaacatggtcaggttcggaaactgagggatttgcattgtagccttggttttagcatggatttcaatgtagttaagggggagtgaacgtggggttttggagaagtaattatgattattatttagttaatggcgtttgtttcttttaccaaagataataactttatttatttgtttgagagtaatgaattagaaaagtggcaaaggtgttcatgaaaagagggaagttgcttaatcgatacacggcaatggatttaagcttatgggaaacagactcccggcaatcttacctcaattctgagttgggtcgttcgtttggttggattctactaggtcttacacaattccctatgtaaagaaactagacacaaaaaataagaataatactttttatacattggcttatataatatatgtttttgttattatattttcactctcatttttggctcatttccagtgaagcaaaaataatactgtaaaatcttcctcacactagaccagtgctgctgtcagttgtatctatctttttaacaacattatcatcactagaatctgtagtacatctttttctatgttgaagcaaccccaaagtggttttcattagtgagaaagagaaaaatagtatattaattaaacagatcagccagctaatttggattttgtaacacacaatttcctgatagtgattataatcttttataaccttgttctaaggttttagcccctaaaaagaacactgttcaattaaataaataaaaactcaagtgggtttatgggggaaaagttaatataagtaattgctaggggaccaaaatataatccttatctactgtcccttttctttatgtgagcattaaaacatggtttgcttcaagttaaagaccagtcttgttgtccaagatttttctttagattggattcagtttcaactataccattttgtagaagttgatgattttttttacttaaacaaaaagatttttgtgatttgacatatgtacatatcatatgcttggacaaggtagataatttaattaagttttcacattcaaagtacttaaaaagaagtttcaaatccaaatgatatctttaaagataattttggtaggcaaaatttttataaatttcaccatggtgctctcagatttgatatcagaatctatatcatcagcaaatattatcacgtttgtgagttagctagctagtcaatgcagacataacccaatctctatagatatgcttgttcttcaactactttgtatacacacaaattaatgaaatgatcattataaccaaactaagaaaaaacattaatatatctcatactacctactaattatatatatgaacatattccagctataatcaaggaactacaacagcttttattaattagtattgttttttaaataattttattcgatgcttatatggggataaactcaaagcctagttatggtatcgaataattaatgaggtttatagtttatactacttgactttgtttatctaatctcttgggctggtttggttggattagtataactagaattggctagattgattagtttagctttatgtgttacctaataaacaaccaaataatataatctcgaacaccaaagctaatcaagacaaaacgagccttagaatacgcgcagtgtagaagataatataaatcaaacttcataactaatataatatgtatatatattttgaaaaaaatggaattttttcaatattaccaaatttattaaatttcttaaatatatttttttaacccactattttattaaataataatttagctttgtatttttaaaattagaacgtgaactaaattttagtttgtgttaaaatttgactagaggttgattatattttcgttttgttaaaaaaaaaaaaatacgaactcagatattattatgtattattttaaaaaataaaataaaaactaattggtacgtaactttttttaatgtagaatctaaataatatttacttaaaatataatacttaaataataatagaacagtgcgtaataatttttttaaattttgaaaattaacaaagctacgttgcctatctgagcaacattaaagacatcgaacattatttaattatctccactctaaatatgatattatctttttgttgcatctccttagataatacttgaatttttagatttcaacactcaaagatccctttaagtaagttagatgaatctcttcaccagctaaattcgaaatcccttcgaattagattaaacctccgacagctctagtagcaagcttcaccttctttatttgacaatccaaaaattcattcacatgactaatttttaactccaagaattgaatgtagtactagcaaaataatgtggattattagatttaattaagacctctatatatcaactttaaatagtatttagttgaaggtaataaaacaaaatggaaaagaaatgaatcaatttttattgtattcttttatatagttgtattttaaaatattggatttcttttttaccattttagtagaatttgaaatgaaagaaaaattccaacaaaaaatggtaattttttttaataattccttttatgcattttaactttcaatttttaacttatttatattctcatttccattgatattcctacatctttttgttcctccaaccaaactcaacttaaaagatgataaaaatatacaattattaggtgaaaaatgtttatggaactctgaaaaatataaaaggcataaggaaacttgatatgagaaaaataaaatgaaagaatgaaaatcttatcctatagataggacaaccatggaggattattttttttatgcaggaaaagtatggaatgtgggttcaaggaacatattacatatggcttgtagttgtagtagtgagtactaaattgacttgatactcaaaaaagagtgttggtttcatccgcatacaatgtatatatgtgtactactagactagagattagagtaatagagtagttagatgagtactctactcagtagagtatgtttcaattcaagtaattaataataataattgtcatctccagcttgcaaaaatatcttgtacgatctgtacatttttattcttaaagataagagttgtaactaaagttaattaaactatacttttgaaaagagtattactattgagtattagtaatccttaataccttctagacgtgacgttttttaattgactagcgatattctttaaaaattattatattagattacatagaactcgatacttaattgcaccaatagcgatattgacatataagaaagtgttaagcaccaatatctttttgcatttctgttttgaaaaatgtatgtatgaatgtgggttggccttttcaaacttcgaacggttctttaattagtttatttggtaggtttaaataagatattaatcattgggataaatgcagatagagggaccatcgttttacgatattaggcaataattccataactttctttagtgaagggcttcagattagctctgttcagcccaattttctaacaagaaataggcctgggaaaaaacaataatgattctacccagaaaaaataaagcttactttatttctattatttatttataatgaagtgcacgagtggctgtatttatttaattaacttagatttaatattatcccttttaaaaactattttcttttttcttgtatgtgcaaaagataaaatactggtcaaaagataagttagtaattattgaactaatattttcattaatttggaagataaatttagaacgaataataattttttagctaattaaaatttctgttccttgaactttgatatgtactaaattatgcctcttgaacttttaagatcgttaaaaatgcctcctgaactattaaaattgttagatttaaggacttttgtcaaatttcattcaattttactatttcaaagattgtttat

SEQ ID NO: 377861 - DNA, 2938 bp, Cannabis indica
atcccatttttaaggcctaaaaaggcccaaacacaaacctaacttgacctaagtcatacgcaagcaaaaaccatgctaaaccaaggtattttcaggcactagaaccacaaaatataagttcaattttaccaattcaaatacatcataacatcaagaacacaagttatactataacacaaatatttaagcttgaacatcaaagctttaaacattcaaagaaaactcagaagttcaaacttaaagaaatcaaaccccaaatctcaaccaaaaaatcacccaacacaatctataagtactatatgcattccctatagctcaatcacacaaaaataccaaaatatcatcaacatatacacaaaacaccaagacatgcatccaaaactcatatgaacaccataaacagtgcttaaagcttcacttaaaatctgaataatcataactaaaagagatgaagagtaataccacaatttcctcaaacttctagcaatgactcataccaaaattccctccaatctcaaagcttcctgtaaaatccaaagagtttagcaaaaagaaaagttaatgggaaagagggggttcgaccaagagaggatacaccagaaatggatttctaattttctcaaattttgttttattgaataatacctaagtggtcaaaatgacaaaaatacccccataatcaatataagcgtttcaatacactcaagagaaatttaaacattccaatcacacatatatatcacaatattttcagattttcatactcatcaaataatgccaaaattaaattccaaaaatgtattttgggtctcgaacctggttcggcccaaaatacccagttttgactataccgcacagacttgtcagaaagcacatgcaaatagatagaatacacatactatacaataatatagtccacaaacacaatatatcataaaattacgagtttacccatttcggacaaaattacaaaaatgcccctggtacaccaacggggtcttaaaatgcaatttacaagtatagtttcacatattaaattatataatagcataattccaaattaatacacatttaaactagttagggttgctaatccggtttcttaaaccttagggtatttcaccatcctttttctataactttccacttggtactactcctactacaccaaacactgctactgaccctacttcacatgtcttttctcctctcaacaccaatacccctactatacctgtaccaccaattattgtacctactcctcaaactgaaccacaggctgtcactgtcataccagttcaacatatgctgctcctgctgaatagcaaactgcagctcctattgaacagcacattgttgctcttgttgaccaaaacactacagcttttgctgctagacatcctactggccctactgtacaacctactgctgcacctaacacaacgagaaatttaattgaaactggtcccactggtcatccagctatgaaaaatcagcatctaatgtgtacccgatccaagtctgggataagaaaacctagagtcctaatggcttctctatatcctaaaacagttaaagctgctatgcaaaataaaaatggcttaaagccatggatgttgaacatcttgctttattaaagaacaagacttggatccttgttaatctccctgaaggcagaaaacccatagactgtaaatgggtatatagaattaaagaagatgaagatggaaatgttactcagttcaaagcaagacttgttaccaagaggtatcgtcaacaactagggtatgatttcaatgaaacctttagccctattataaaacctatcaccattagaattgttctaactattgctctcacaaaagggtgggttgtgaggcaattagatgtcaacaatgcttttctaaatggtgacttgcaagaagatatatacatggtttagccacctatttttgttgatccatatgctcctcacaaagtgtgctaactacagaaggcaatttatgtcctaaagcaggatccaagagcttggtttgaaaaatcatctgttttgatatcacttggttctgtttcaacaaaaatagatcattcactttttgttaagattgattcagcctgttgtttgtatgttcctatatgtgttgatgatatcttaataactggttctaatggtactcaagttgctgccttgataaccaggttaaataaatctttcgcacttaaagatcttagcacattgaattatttacttggtattaaggccctgccaacagcaactggtatgatactttcttagaaaaggtacatccaagaactcctatgcaaggctgagatgcaaggtgccaagactcatagcactcctatgaacagtggactaaagcttttcaactatggcagtgttcttgtcactgatccaaccttgtacagatcaattataaaggcagtatgccacaatcaccaagccagatattgcttttagtgtcaataaggtttgtcattacatgcataatctactttagtctcattgggttgcagtaaaaaagatcttaagatacttggatggtacacttgattatggtcttcagttgaacagagtttccaactttcaacttgaagcccattgtgatgctgattgggcagcagacccagatgatagaagatctacaacagggttttgtgtcttctttggtgacaatttaattacatggcaatccaaaaagcaaccaacaatctcaagattttctacagaggttgaatttcgaagccttgctgctgtggtctctgaaattactaggtatgttaacagagttacatgtcctattgcagctccacctatggtctggtgtgacagcatcagctctgttatgcttgttgtcaatcccatccttcatgcttgaacaaaacatatagaaattgatctatattttgttcgagacaa

SEQ ID NO: 377862 - DNA, 5461 bp, Cannabis indica
aagacaataatatattgcataataaatataccactcagtacaaatatttaataattgcaaaattaaccaaaaataaataaataaaaaaatattcgggcggtttaatattcctactcaatttctttgtttatcaagtggagtattgtgcgcgtgggtatcacgtatgccaagtgacgaatattttcttttgtatggtagatccaaattgaacaagcataattaagacgaagaaacgttttgatggttggtcccataatgtataatttacaaaagttgttttaacttttacattcaaagggaaaagaactgccaaaagttctctagtttaattcactcaaaatatgattaacagccaaaatgatattaatcttttcaccttgcatgtacgagatcaaacttttacaaagtaattataaatgaaatcttagattggtctctcaagatttgctacccgtgtctttaaatttaacatgaaaaaaaaagtgaagtaattggcgaaatattaggtctaccatctgatggtaagttttcactacggacaacaatcacttaattgagtagatgacattccttttggtaaaggatccaatggacacattcctttcttatgcactactcttgttcaaacacgttcagtgcaacgttttgttggaatctagtgtattaatattttttaataagaggcaatattttttaatggttttggatttttgttggttgatttggtaagtttgttgtctaaattttcaagggtattcctaattcatgttcgtcgaacagccaatgtggctgcgcatggattaactgtacatgcctttcgaaggaataaacaacttgtgtggttagacaactttctttatttgctctggaattcgtaggttttttcgttattgtaatcaaacatactgtttttgttcaatgatatattcattattttcaaaaaaaaaaaatatttgttggtgattgtttaactcctttccttctttggtctacagaaatttcagggaccaccgatgaacaaactataggagtctgccacatgagctcataacccaaaaatctggccttattctattcgattcattatgccgatattgagactcgatcgaactggtgtgcttaaagaataaaggctgaactgaagagctcactttagtacaatgaatcacaacacaacatctttcttatcatttttttttatcataaagttaattagtaaaagctagtgattagtggaggcgaggaacaaataattaatctccgtgaatctacagagaactaggcacatgtaatacaaagattactgtaatggatttgaaatcaagctgcagtaacagcataataaacttgttcaagttttcggtcacttttaattgtcttttcttctgagcccacaacccttttcattgatttgactctaatcatcattacaagtctataattagtattcagcttttgctttttttttcttattatattccttcttacaatctagatcaagctaaatattctaaactactttctaggataatactagttttggctgatgtttgtttttgtcccttacagagcaatgaatttggatacaatcctatggtggtggatgattttctattctatcccttctttacaaataatatttatttcgtaccttcgctaacaagttgcaaacatgagcaaaaaagttaatgaaatagtataacaaggtcactgcagctatggttggcaattcatgttagtgtcaaatttgtatttatgttatgcacattgacatgtctacctgtaattactgtaggtaaaaaaaaatctcaaccctcgtgttaacctatcatgaatgttcatgtacaattgattatttcgtacctaagctaataagttgcaaacatgagaaaaaagttgatagtataaaaaggacgaacaagaaggtcattcagccatattcccagctgagacagtgtccttggggaatatatacatgatgaaatcttgattacaagcaataagacttgcataaaatttgtagttttgtaacacttcggaacacaacataaatatcacaaaactgagctcacatccaaaccatgtcaaataaatgaacacttaatttaactatccacactatcgatgttcatattgtaagaacaaagtttgaagattcagcattttggataaactccaagtcatgcttcctcacactgaaaaaaaaaaaaacagtattatcttaaagtagcactcccatctctacccaaagggttaaaagaaggataagcactgctcctgaaatcagaatcctgaacagcatttgaatctgaatgtgtccatccatcccaaaatgtttgactggatcttttggtagctccatatttctcgaattcaagcctctgccttggggcactctgtgaccgaagtttagcgcgggaggattccgtgttagccatgtagtttggatggcttgagtagccactgaagtaaccccacgagtgctcgctctttgcaggcgaaaagggtccacctctcctagcgctgctgcttccatgtctggacgaggcagaaaaggcttgaggactgttccttgttgtcttaacagttgcttcatctttcactattggatttttcaaattgccaaatgacactgcatcaatggaagattgatttggaaccgaaactggaacttttatcatttgttttgatggggaatccaatggagtaaagctccggttttgatagtctgaggccaaaacatggcgtggcatttgaaagttccgtgtactactacgttgagtatccatgcgaggcttccaagtatctacttctagaatcttgtcgcttttttcgtcgtcagtgtgaccatatctcattgaagagctttgacaactgttccaaatgctttcctccatccaacggtctaaccagtttgatcctgtttgatttttctcaatgttcatcacatccctgaagtttgaatttgaaccacacctctacatatgcgtgttgaaagacaaaattagtaatggcactaagatcaatgtctaagtttaagaatgtcttatttcacataaaaatcaattaaaagaataccttaaggattgaggggccatcatatttgttactataagtacgttgttgaaatccatttctatcagaatttaaagggatctgcaagttatgtgatactacaataagtttgaaggatcacttaaatgcaaccacaagttatttcctaacatatttcaaaaaggtaaagatcatattcaaaccaattataagagaaaagtatttttgtaaataatattcacttactggtggcaataagaacttgctggaagaatttaaagattccgacccattcgtgcgaatcgcacgtacgcgggcttggactcgcacgagtgtctgcatccgattaagcatgtcagctgtttgttttctcactatgtggcctctgaccaatgcttgaagcttcacaagtgctttcagtgccctcaaggctcttcttgcctttaaaatttcataatcaaaagaatttagataatgactttctatctaccaaagccaaattagaattttgttttaaaaaaaccactcaacaaatataactaaaaccacttcaaatactagctactttactttatacctaccacttgaaaattttaaaaactaaaagttataataatgtcatttggttgcactgcaagaaacagctcaggaatttaaacaaattggcatgaactggtattgactttaataaaggctgcaatgtaaaatcacttgttgacgaaatcattacctctcatcactcaaaagaattggaaatatacaaatacaagatgacaataatttaaataatataaaaaatgttgttattcaaaattaaaagatttcaaattgaaacacttttcagaaacataaacaatattgcccgtgtgaacattccttcgaatttcaactcagccccacttaaaagagataaagtaaactaaaaaaggaatttgtaaaataagggttaggtgtaatataatagtaattggatatgggccttaggaataggcactagacatacaacgacgagtcaaaatcttgtgccgtgttatccattcctatataatacataaaatcttcaatagttaccaaagaaaatgtggtgaccaatttttttttttcttttgtggcctatactgcttactgtgctaaagtccaaatacgagacatcttagtcttacagaatgtcagatataccgaacaaaccaatagcatgacgacacgtcattctttattagttttcaagtacgtatatgagaaaattacacaatattgtttacaggtgcaaaatccctcttacctaaaaacttctagaatataaaattctattttaactctctgtttactctgacagtgaatgacatacgtctattagtgtcggcgcatttattattatattaatattcgttttctttccaaaaatcaattaaaatcaatgatcttcaaaattaaatttcactgtgtttgtttctcgagaaaagaaaaacggaaaataatttaaagtttccctcggaaactaccacaaaaatatgaaaattttcaaacgctaaactgaatacccaagttcaaacgagttaaccaataagaaagttccacatcattttcaataatttaaaagtaaagacgactaaccagatatccccgaaatgccgattgaattttaacggcagcaaagtaacgggtacggctaacatgggccgcggtggtagaggttccggcgctaccgttattggtaagacggacaacctcggcggctgcatgagctgcggctagagctgcttcggctacggctgcagtggcggcggctactgctatggcgtgcttgtttgcgtctaaggcagcggctgaggagggagggtcgtaggtggaggaggtgttgagcttggttggccagggattggattgtttgttagtcttgtctttggaaaaaccccacctcttcttttccttaaccggcggcgaagtggtgggcctttttgggccaaagagtcgccggagaaagcccatgtttcattgctgagatgggccgaaacgggttattttgaatgagaggagtactactggtttgggcggcgagtatgaaagcatgtgaagtttttcaagcgtgggaaaactgaggaactgatgaagaagaagctagagaggaggaaaggcttaactaatggttggggactatatagttgggattttaggggacgtggaaattcagtacacgcgttatcgaaggatgtgtagctcacgctcttttatttactttctattttccatttttttatggaaacaaaaaaaaaatctttaaaatgtcagcattgctacatgtgactattaggtatttttaaccaaaaaagaagtaaaatagttttcccatttatttatgggttaattttacaaatgcacaaaaatacaaaaaaaaaaaataacaaaa

SEQ ID NO: 377863 - DNA, 3592 bp, Cannabis indica
ggcagcctggtcccgccctttcgctcaacgttttatactctctttggctctttctctcttaagcccttcgattttgattatgaacttgtccattcttcaatgcatcatagatggctcagctcgttatctacagctggcttgtttctttcaaagttttgttgatttttacttaaaaaaaaatataataatactaataataataataataataataaacaaataataatcagttaagtttttttttttttttttctgaaactctattttttaaaaaaataataataataaattgctggtaacaattatcaagtcaatatttgactgaatggagcatatcacacgtgctagtctttttaagaaataaaatattagatgtggtttatgaaattttatgagtttttatgaatgaagaaaatgatagggagattatttaatactcataaaccataatactgtatcactgatcatcattggagtgaatattctattgtttttattatagtagttaaataaaggattttttttttttacaaaagaaaattattcaaaaaccgtaaaagtgacacaacaaaaacagcagcaaaagtaatacaatggctggttatgttggataacaggaaaattttcaggggtgataaatttgttatttgctgtgatactgtttatatgctgtgaaaaaatagaaataatagcgtttacaatagtagatggtattaaagatattaaagatatatttaaatacagattgtgtagcttaaaaaataggaggatattatacaagctgaaagaggcatgtatttacgcctaattcagtaggacttttagtgtgagtttgggctggttggttgtggccttggtaaatccttgttttgtctttgattaataaaattttctctctctctatagaaaaaaaaaaaacaacagcaaaacacaaactgctcaaactaactaccaaccctcaaatacatttacaatataaaaatcacccctcctcaacttggtattttcgaactccaaaactctcaacttaactatacttttaatcataattacacaatttttcaggtcaaaatgttgactcaagcaccagttctgcaactccgaaaagtttccaggccaaagatggaaactaagccaccttccaatccctgcaaccacctttttagtgaacatacattccataaatagatgagtgtgagactcatcttctttcacacaaggctggaggaatcgacatcactttgctcaaatgatttctagctaatagttgtctgttaataacttgcaagtatataaacctatgtttaggaataattaacttgtgccaaacattggaagcatactccactttattaccagtaagtaaggagatataaaaacttttcactttcaatttacctctccttttggctcgatgcaccttctttttaacagcaatttctcgaagctttaggagctttttaaagtaccagctcatatcttgtttcatagaacaattccaaaaatcttgatccatttaacccaaagaatatcttgcttactagagatggcccataacaacttaaacatcatggttaaattccacttcttcccctctcaaaagccagtctccccaaatattttaggaaggcaaacttgctctcaagacgaaaggtggaacttacttcagttttttttcaaaccccacaaaaaatcacgaaaacttttaataatggcaacagtatttttccaaggaagaataaaaagactcatccagaaattgcgaattcccaataagaccgattgaattagtagagctcttcctgcaaatgagagatttctacttgcccaactattaagcttattattcaacttatccacaatgataccacaatctgaagctttccatttggttggtctgagcttaacccccaaatatttaaggggaaaaaaaccttcattcatttaaataatctctataatattcatttaacaagcctctttaatactcccaaaatagatgagagacttcaatctatttgctgaaaggccagtagattcacataactctttaaaggcactatacatcattttaactgagtttgcctttataaaacatgatcaaatcattaataaagtagagattaaaaagcttaagataattacaaagagggtgacccccgaagccttttttggtagacatttaggccaacaacctagtaaggtaatccatgattaacacaaagagtagaggagagatcgaatcaccctgtctaagccctttctcacccttgaaagacccttgaatcataccattcataagtagattgtactttgttccctgtaagaaaattagaatcgaactattaaattgagagggggagcaaagacccttcaacagatttgctacaaattgacaatccacattgtcataagctttactaagatctatctttataaggcatctatcagaaacactcttcctagtgtagccctttaaaagatcctgaaagattaagatattatgagctaataacatgtttttaatgaaagccccttggcagttgttcacaagccacgacaacaccttagataatttagaacaaatcatctttgaaatacccttataaagaatgttacaacaagttatatgtctatagtcattagcattaattggattcttacttttaggaataagagatataacagtttcattaagatttgagggtaaaatatcatcttggaaaaaattcaacaaagaaatctcatctccaatgtcttcccagagacccttgaaaaaacccaaatcaaatccatccaaactcaaacttttggtgttatggataccaaaaaagactttcttcatattactttgctaaaaggtactctaactaaatgaacatgttgctccaaatttaagcaattaccataagagagagtccacattgatttttcaagaagtagaacttttcctctctattgtatttataaaatgattagaaaatgttctacaactttaaagtaatcatcaataacaacatcattcacagtgtaagtagtgactctattctgtattcttctctttttcatataagcatgaaaataatgagagttttcatcaccacatttaatctaagtaatctcactttgttgttttaaaaaataagtaaaactactcacaaatcataaaaaaattgatgtaatcttctttctttcaactgcaacatcaggttattaggatcactcgcaagatccccttgagctctgtataaagataacttggaatctttgtattttgcagtgatatctcctacttccttcctgctaaatctcttcaaaacatgcttcattctatataatttcttagttatttcgttgaggctgccataactgttagtcttcacccatcaagctaaaacaatattcctatagccattgtgcatcatccagtgattgcaaaatcaaaatggtttattaccaatgttgcctagctcctgatgtttgataatgtagtagctatgattcgaacaaggtttccacttaaaacaagcttcatttttaggaaagaactctaaccaatgtgttgggttttgttccttaaataaaactcatt

SEQ ID NO: 377864 - DNA, 7652 bp, Cannabis indica
gtttgtatccttcccttttgcggaatttcccttcttgttcccaatcgttatctcgctcttctccggggaaactccatttccggttccatatcccaagttgttcttccaagtcttccgaggctgaagaggaagatgagaaagagaaggaggagtcctcttccccggatgacgagtggttgaagaaactcccggaaaagaagaagcccttgtattctcatagcctcccttgcattgaggcctggttgagaagtttagggtttcatcagagcacagaagacagggctgtttggctggtggagaagcatgaatggcatgcccaactctcgcttgatgtaactgatctctatataaggttggttggttaattgatttgtaatcttattgttgcatttgggttctcattttcttgctgtttttggtatgggtcgtgttgatttgggggtactaattgtttttagtgtgattaaaaattcaaatatggtcatttttcaatactgcattgaacttgaaaattgtaaattgtgtgcatttttcaaccaagtttagatgaacacaattgaagaatgattgtacttgtgtggttttcttctcatgtttaaaaaatgaacaaaaatcaagttttcttattcttgcttatgatgtgttgagcatgtaacttaggttagtgatgtatgtaatgcaggtatttaaagactggacctggaaacctcgaaaaagatatggaaagaagattcagttatgcactgagcagagaagatattgagaatgctgtgcttggaggaccttagacttagtcatacttgagttgagtattatttttttttttttccattgtaaggttttgactttgctataatttttgggatgaaatgaatttgtttagtgttagtatattggtttttaccatttttgaaatgctattgtatttgtatttatgtttctttgttgtccaattttggttgctaatgaatacacatataaaataggcagccattgtagctttcttaatctgaaaagagggaacaacacgttactagaaatgaaaatataccaactgactgtcagaacataaacaataataactaattattattacataatctccgtacgaaatttaggcttcagcacaatagagctgattttattatattatcagtgcgactcagcagactgcaaatgagaccagtattcattgaccaactttccaaaaagtgaaccttctttcttcatcaacttcgttggctcatcatattccactatttgtcctgaaattaaaggtcaaaatatttgttttcaaatgggtatttcaaagataaatagtattttttttttctaatatgaacatcaaagcaatgaaatttaccatcactcatggcaagaaccatggtgcaatccataacagttggaattcggtgagctacagtgattacggtgcaatctgcaaattcaattctaattgttctctgcagaatcgtgtcggttgcattgtctatggatgcagttgcttcatcgagcaccagtattcgacttcttctcaatagagctcgtcccaaacagaacaattgtctctgtcccatgctccaattcgatccatcatccacaactgaacaacaaaacaacacattgttatttgtgattgatcacaagaaaaactcaactgccttctcttactccactcaatagagccattacctaacgagtccaagcctcctttcttctcttgaacagcttctttaagttgacactttccaagaaccttgaaaaccaaacaaaggaaaaagattaacagccaaatagccaagaacacttattatgtcaaaatcccttgttcttcaactagtgaaataacaagttgtactgtagtatatactatatagctacctcccatatttcattgtctgaatgttgagataagggatccagattgaatctaacagttccattgaagagtgtaggatcttgaggtattacaccaaaacgtgacctaagatcatgtagtccaattgttgtgatgtcaaccccatcaactataatctttcccccagttggttccaccaaccgaaataaagctccgatcaaggtactctttccactaccagttcggccaactatgccaatcttgtgccctccttcaaatatgcaacttatcccacgaagaacaagtggggtattggctctatatctaatctgttttttcatttggttcatatcaatattattagtacacagaaccatctttttgtagacattaaatcaaagttgaacttacctgtaaatcatgtatctctacttttcccacatcaggccaggttgttggggggcgattttcatcgatcacttcaggtgcttcactcggtatgtacatgtactggtttagcctttctactgaaacaatgtaattggcaatagtgcattggttctgaacacaaactacaagtgtggtgttcattgagaggccataagaaagtgccatcccaataaatcctgcagtaacacaaacttgtttcaaaatatatgcaaagaaaagggtcagtgtcaaatgtaaattttttgaagaaaagaaaaaaaatacccgagctgaaggtgtcaggggggaggaggaccatgaataatgctgcagaagcaagaatggttgcactgagtatctccaaccgttcgattaaccattcatttgctgcaaaactatgaaaatatggactagcatttatgtcaatgagttttaggctcttgacgaagaagcgttcctcctcttcgaaggctctaattgttatggctcctgccatagactcagcaaggtggtttgctaccttggacttagttgtaccattgagccgcattagttcattagcagtggcaaggtagtatctctgtcataaaacaagatcaagtaagctaagattagctcttgtttcttttcttgtgtggagtaagatgagatgggaagtacctgtagtaagaaagctaggtagactgttgggactgcgataattatgatttgccaagtgataacagctagtactccaaggtttgtgatgacatttatgcatgttccaatagcaatacataaggtgaatgggacatcaagatccactaagcttagatcagatgaaaccttcacaagaacaaagatacatatcagattagtagtagtttagtttcttgaagtaatttttagtatgtatttgctcagatgcatacccgagcaagtatccttcccaaaggcgtggagtcgtaaaaggacatgggtgatcggaacagggaatttactagttgtgaaaaaagtgatttcgaggcattgatgcttaataaagctagataatgggatctgaaagctaagaaaagtatggaggcaattcctatgaacaagtacaccaagatcaaccacaatgtgctgatttgaggattatcaacattggcagccatccatgagttttgcaagatcagtgcaaggcaaaacataaagtgagtgaaaaaggtgatggagaagtacaagtagcctttgttctgattcaagtattgcttgtaaggcttaattcctctattccctacttctctttcttctaccttaatcaactgatctcctttagatgctttacattccatatctgtataagacttttgaatctcattactgaattttccttgtttctcagcatgatttatgtgcgcgagcctttcagtaccggcagtctctttgtgagcgtttacaaggtcttgaaactcttggcttgtggacaataactgatggtaaggagctgactctaagatttctccatcatacattaactgtcaaccaatgttaaattaatgtttatgttcactatataatgattctattactaaacacataaagttgaaaacttggaaatgttttgccattttaagaagtctaaccaaaactgaatcaaatgcaggcaagaaatcaacttgatgggttacaagcaagactgttctgtctaaaagtgcttccataacatattcctgcaaacacgcaagaaagattcaactttaagcgacaccaaacagacatggagatctgcaacaattgttatgaaaacactgctaccttaaacaagcttgtagcagtatgtgcatcaacagcactgaatggatcatccaaaaaatagacatctgcattttggtatagagcgcgagcaagttggattcgttgtttctgaccgccactcaaatttactcctctctcgccaatttcagtaaggtcaccataaggaagcaattccaagtcttttacaagtgaacatctctcaagagtttctctgtacctttgaccttccataggggagccaaataaaatattttcttgtattgtgcctgtctgtatccacgccgtctgagaaacataggctatcttcccataaacttgaatctgtaattccaatagttatgagtttgagtgcaaaaaagaaaagaaaaggtatgcagatggatcagattagaagccttacatttccccgaacattcgggatttcacctagaattgctgccaaaagtgctgatttccctgatccaacttctccacatatagccatcttttggccagaactaaccaataaattgatgtttctcagagttggctttgataaatttccttcccatgaaaagtcagctgattcgataacaatggcattgttcaccttccccagggtagtagaattattcctgattcttgccatctgcagctctggtgcctcaaggaattttagaattcgcataaatgaaacctttgcttgaatcgtcacactaacaacatcaggaaacaatctaacaggctcttgaataagacgtagagttgctacaaaagtgaagacattattggcatgaagaggaacatttagaaaataacatgctccaaaagaagcagcagagatcaaaataggcgacgaccagaagagaagtgaattatacgccttttgaaactgcactgcagatagccatttcatctccacattcctcaacctttctaccacagttttgaaatgattttcccatgcatatagcttcaacaccttcatgttcacaagagcctcactaagagccttaagcctttcatcttgagccatcataaggtttgtctgaaacttattctgtaagttagaaagtggagcattgcacgccacagtaaaaattacggcacataaggctgctattgttcccagtccaatcgcttgggcaagtattagcaaggaaatacatatttggaagggagttgtccaaatctgatgaaaccagaatggaaattctccaatcctatatgcatcaacagtaacataattcataatctcaccactagaatgaacaatcctagcagagttggataatctcaacagcttcttgtaagttgcagcagtgagcaaagacttgacttgcacaccaattagtctgcttctgaagtaccactgtctttgagagattgattcaagacactttgtaaggaagagaattatgaccaatacataaccttcatactcgaaactcacctttccttcagcaaccaaaatgaaagcatttaaaagcaaaggaccaacagagagactcaaaacctttagcagagcaaagaacccagatatcaaaatctctttccaatgacataaaatgattatcttcaacagtgatggctgagcagaaaaaccatctttctttttcttcttcttcttctgtttctctaattgctccaagaacatcagataacaactttctgctctatcagctttcctcaactttggtatatcttcttcattgagagtttcctccctacccttcttcatcaacgaatttagccaccaaaatgagatcttactgaaccagcctgctctggaaaatggggtaactgagtcaatatcatcattttcattgtttccactcaaaggtctataatggcctttaacttcatcctcactctcttcacttttacaactcttatgagtacataaaaactaaaagaagaatcactccaggaacagataaaacatctaaaacaatttcaaatgttacttgtttgttcaaaacagcttcaaacaaagaaaaaacacaagatatcccagcaaacagggtggcaataatggtcaaaaaccaaactggtacagttggaagttgtttaagtttgatactcaaagtcaagccaaccaacaaccaagtgaagccttcaaataatggtggaaaccacagattcagaggcagtagagaatgggatactttcagtttgtcttgtaagttccatacaccaaggaacataaaagacagagaaagacagccattaaagatagcagaaactatttgcagagttgacaatccttgaaagcagtagtagttgctagtaggcctagctggaggaacttgaccaagttttgatgaggagagcttttggatcatggtgatcaagagagtgagcagaagaactacatcaaagaagatacttagggcttgtttggtacagtttgaaggactcagaaagtcaaatggtgaacttgagtactgatcatcaccacaaaacattgtgcagatattgtcctattttttcttgtacttgttatataataagcaatagatatatatatatatatatatatgtatatattatttttctgttacagaaagaacccagaaaaccaaagtagatgatacataaacatatgaaaaatatagattcaacaacttctttgacaacgtaacacatttaaagctaaacagtaacatagtaataggtacagagtattattaatgtatttattttttaagaaaatgtgtgtttttatgtttaatatttttaaatttaaaaaaaaaagaaaaaaacttttttttaacatgagttgagactatatcattggctcgaaaaattaaaaaaaaattattccagaaaagaaagagataaaaaaagttagtttatgttaattttttttaatataaatatatttttaatatagtgtagtaagatatatatttgattttttttaattaaatattttaaaaattaatatttataattaattttgtttaataaccataaataatacccataaaaaatcttatatatgttagacatttatatttcttttacccataatttttaacagtacatacttttttgtaaaataaaaagaaaacacacaataagtgtaatcattaatcattaatcattatgtatggttactgctttttattattattattatttatttatttatttatttattttattttttagggtggcttcacatttttgtagtctagaatttaagaattatatataagccaatcatttggtatggataagtcataagtcaatggtttttaaattttagtatatgcaaacttgtggacatgtgtgtgattctatccaataattccaattgaatcctttaattttagtttaatatggaaactcttgccattttcatggcatcacttatgagttatctttattattttttgttttatccatgtttttttatttatttaaaaaatttattaattttgatcatcataattaataattaaataattaattatgcttatttttaatactcaaagaaaaatttaaaagacacactattaatcttatttagtctttattaaaaacaaaagatgtaacatattctattaaaaaaaatataatatattcatatcaatttcac

SEQ ID NO: 377865 - DNA, 2601 bp, Cannabis indica
ttttttatttcttttctcatttgcttttaacaaaagtggacaacaaaaatcgaactgatctaacatatggtgtgggctttaaaagtgggccatttcagcccaatgtcaatggccttccgattctcaggtccatatgggagagattcaataacataagtgaagtgacaacagttgagttagagttgccgctgggggtgaggtttatcagacaagagaggatagaatgaagattccaacgatgatgtttgcacaaaccctagactcttaatcattctcgccgctgctccgctctcatgtaatcttcaatttcttcttctgtgagtttaatagattctattataaccaattattcactctttctctctcatttgttacccttgtcattttgcttctttctttctcataaattaaagaagaagaaaaaaaaaagtagaagtggtagttgtggaaattcgcgctcttttttatttagggagagtttttcaaagtttgggagctctttacttagtgcagacaaaatgttatgttttccagtttgattgaaagagtaatgtttggcagaatgaatcatatgagttgtttgttaaaagtccacttagtgtttgtaatatgggactaacatacatcccaatcgtttgatttatttatatcattctatatccttagaaaaggtccatctgggtatattactgtttttaatcaacaaaaaaaatatgtgattgtaattatatttgctaaatgcctatattgcattatgaaatgggactaacagacatctatatatttataacattccgatatcctttgaaaaggtccatctgggttttgctgtttgtatcaacaattaattgttcagcctattcttgggattgttcatttgtaatggaaacattaatgggaaaagaattcttcttgccatttaaatatttggacaggtttatcaaatgttttaagtgttaaacggtataaacacaggttaaacagtccgggctgatactaaaacatgacctgattataaaacgtgctgtgtcctttggtcatgtcgggggtttacacttagaaacgaattttgaatttttagtgtttattattgtattgtagtccttaagcatttgtgttttactgtttcattcccagtgtccacttcgagaggaacatattcgcatggcttgcattgtttactttttaatgtgggttatatttcatgttaaatcctaaatggatgttttatactcaagaatttggctttctttatcaggtgcccgaccatggttctaaacggatgcgctttgcccactgggtgtttctctataaatctcagaacaaacaagacattgatacatggatccggtacttcatgcgttcctcatttgcaaagtaaaggttctttttccagaatcagctcatggatgccaccccttcatctctctgctgtatcatctccactactaagtggggatcaaggtagcctgttgcgtgccatccccatgttaccaaagcgttgcaggcaaggtacttctattagggcagctaaggatgtcccaactagttttaggttcccaccaatgactaagaagcctagatggtggtggagaatgctggcatgtcttccttatctaatgcccctccatgaaacctggatgtatgctgagacagcttatcatctacacccttttcttgaagacttggaattcgcaacatacccttttcttaccgccattggaagtttgccgagctggttcttgatggcatacttctttgttgcatatcttggaattgtgagaagaaaggaatggcctcacttcttcaggtttcatgtagtgatggggatgttactcgaaatcgcactgcaagtgataggaactgtcagccgttggatgcctcttgctctgtactggggcaaagtcgggatgcatttctggacaggggttgcttttgcttacctttttacagttttggaatgcttgcgctgttctcttgctggtatgtatgctgacatccctttcgtttgtgatgctgcttatattcaaatcccatatgattaagatggaaaatgacatcttggtcttcgttttctgttgagactgttgtatatcttgtaacttgaccggctttgtttctgctgaaatgggattagaaattttaatggcattttcttgtgatcttgtatttcttttcggatattggttatggtaagttgtacttcccataaagtagggagtaatacgatacgtctaaaagagaaagacatgaagttatgagtggggatagttgcctcttatgaaacttcaatgaagttggcttatttttttcttttttatcaagaataagattactgatttactccataaacactcattatcccatacaatcttgtgaagtttcaaacgaagggagtgcatacatactaataattatattgaattctttcaaaataaatctcatatttcgaaatgaatgcactgaagatttctattctagcctaaattactgaagaagtggaagtgtctggtgcactaagttatataaatttatgtttttgctttcaaactttcaaaattttaattcttgtatttaaaaatgaaaaagtgaaattaattt

SEQ ID NO: 377866 - DNA, 3677 bp, Cannabis indica
ttttttttttttattttaactaattatgttttagataaatggcaagtcccactaattatatactcataattggtgcgtccaatctgtccatccccatccaatctgtaacagatgtccatgtaatttaattattaacaaacccattattcctagttttgaagattattagtagaggaagctagaattgtgtgaccccatcaaattaaatagaatcatgcaagcaagtattttaattttgtacataaattctattcatctatgcctataactagctagcaataagtgtcactttttagctgttacttatttatgttagaaaaccacattaagtgttacacataaagcttgtagtgttcgaaacattattatatatcttcgaatttattaatcctaacaaaaagggcacttcgatttttcgaccttttaacaggaaaagatagctacaaagtcccctcgaagtcatagattagtaatctcaaaacaaaagagaaaaaccaatggtgggagtaggagagacagaggagacgatgtcacatgaacaaggagaggtagagccctcatcactactgctcatccaagctaatactgagcagaataaccaaaagaacaacaatactactacgactcagtacccattttcatctctgggaagacaatgctcaatttactctcttaccctcgatgagtttcagcacactcttaatgaaagtggtaagaattttggatccatgaacatggacgagttcctcacaagtatctggacagccgaggaaaatcaagccaataacaatgataacaatactaataatgatgttgatgatgatgataacaataataataataatcatggcagttacagcaatggtggcggcggcggcggcggaggcggcgcggcagctgcagccgacttactatcactcagtaaagtcggcgccgaaaaaatcggggtagcctctcagccgagcctgacgcgccaaggctctctcactctccctccgccgctgtttcggaagactgtggaggaggtttggtcggagattcatagcaaaggtcggcacgatgacgatcaacggaggcagcggcagagcactagcgccagcgccgccactaggaataatactattaatcatcttgatagtgttggggatattgtgagaaattccgattctacccctcgtcagcctacttttggggaaatgacactggaggattttctcgtcaaagcaggggtagttcgggaacctgctcctttaacgacggtgtcacctacgccgacgacgcagtcactgaagacgcaacagtacggaatgtaccacaacaacaacaacaacagcagcaacaataacaacaattctgctggagcagggcctagttttgtgaacagagtcaccgggaattctagtggcggttcgggttatccgagcgcggtggctttcggggactcggcggtttacggagggagttcttcgagaaacggggcttacacgcagcagcagcagcagccgcccgcgccaccgcctcctcctccgggtgtttgttatggcgggagaggagtgaatggcggaggaggcgggtacggtgtgggggcggttgcggcgcaagcgccaatggggttggctgttccgatgagtccagtgtcttcggacggaatttgtgggagtcaggttgagaattctggtaatcaatttggtttagatattggtggggtgaggggaaggaagaggagtcatgatggtcctgtggagaaagtggtggagagacggcagaggaggatgatcaagaatcgagagtcggctgccaggtctagagccagaaaacaggttagttttaatctttaatcaactgtttaagtaacttagagcaattgatgttaattacaatatgttatgcttcattaagttgtgtattaacttaaattgttcactatttttcattacagtttctttagaacagagcaattgtaatggttttttcatatcattagagagaatttgactatcaattaagctgtgtatgaacttaaattgtccacatttttttcgattacagttttctctagactagggtattaatgcttaaaccaaagataaacaaataaatataaaataattaaagcactctgtataaaagtgttaaaaaaaaaaacaaagcattattagagagtgagatttaagtaacgaagtaaaaataattaaggagtgacattgataagggtgtacttattttaatatattttttttattctgctcgacagtgatgatgacatgtactttcaactaatttcgaagtttttaaggttatattttgatgatgacagagttatgttggaactttttggttaacaaatcgaggaaactcattttattattattggttatatcttaattattaaggattgattcattgtaattgtataatattgcaggcgtacacagttgaactggaagcagaattgaaccaactgagggaggaaaatgctcaccttaagcaagcactggtaacaataataacattagcaactcaattagttatttttttctgttactgacaaaacatgtttgtacaccattttgatttttttttttaaaaaaaaaaaacaggaagaaatcgagagaaagcaaaagcaacaggtactgtacttattaatttaattattttagtaaattgattaacttttttttttttttacttttatcaatgggtcctttttttcatgtgtaaatgtttcagtactttgaggaaatgaagatgaaagctcaaacaagagtctctatagccaaggacaaattgaaattattcagaaggcatttgagctgccctttgtgattaaatgacaaaaaaaaaggtactttatttattatacatggcataaaattggttttcctacttttatgaaattttaatgtgatttattattgaggctactacttttttttttggtgcagcattttaagaaacaagggacagcttatgtaaccagtaaaaaagaaaaaatctgagactaaaaggctgatcaaagagaaaatgttacaaaaggtgttgaaatttgattgcaaggactactactactagcatgtttggttgattttaggattagataattatgtttgggacttaatttctactcgccttgaatagtttttgtacacaatcttagtctaatttatacttggttagcatatatgtctttgggttttttccttttgatcaaatgtgtatatatgatgaagtttttcaagtcaattaatggctattagtggtagtggtatacatgctgagacactactgtgattaattgttatagggataaagatgcagaggcagaacctagtttacgagggaaggaactgctttttagttgtgagtagagtaaaaagagaaagacaatgcctacttttatgtatttatatgctagttaatagttactaggtacgtgccgccctctttattagaaaaataaattaacaattagtgttattaaattacatttttgttattaaattacatttgaagtggataaattgtgtaacttttgtgccaacaaaatcgtataatattttttgaaaaatttatatggtatactaatttttgttatcttttttacaaaaatattgttaggcggtatttttttttattttttttaatgtatttttttataaattttatactgcagtata

SEQ ID NO: 377867 - DNA, 1825 bp, Cannabis indica
ctgtaagtcagttgacacttatcgccaacatattaaggaccattaaggagtccacaaaggtcacaagggaatgaagggaagctgcgaaggctggggaggcctaccgcataaaaagcgttgatatagcccttatgagcactctccacctattatggaagagggatccttctgcgctcaaaagttttaggagaggatgaagcggagtactggcaacggtacatgcttttaagaatggcccatatcctccacctaactccaccatctcatgaagaggctgcctctccaaaaattgtggttgtttcttttgaaattgaagcccaactcaaaataggccaaactttagctcgagaccaagtctaggaccagactcatccatgaggttttaacattcccttcttcttttttttcctttttttttctttttggtggcccatggcccccctttggtatttgcagaggcatcttaaatgccttaaccatgaggttatttgtaataactttagctttttcctcactcctttttctttcatgtttttacatcactttgcctctcgtaaattcttgttatttgcaaaactgctttcaagagactttggatgtcttgacattatggttctaatggcatgaactctaaggcttaagcttcaattaggaccgttttaagttgcaggttatgtgtcccgcgtgttaggaaatattgacaagcaaatcttcctcttaagtttcttagtacttaattccaagaattaatacttaggatacttaggatttttggattctagctcctccttctgcttctgcttccaagtgataaaaaacgctatacttactcccgattccctagggtttcgattctagaggttacacgcttgcgaactttagtttgtacttttgttcccagataaccttgacttaatgagttattaatcttaggtacggcgagagagtggcttacttctagctttaggagtcttcagtttcaggtggaactctgtaactagtttaatattgattctcgactgaacaagggttcgttaatttaacaagtagtaagaaactgactgaatatgtttcaaaattaaggctagatttttattcccacatttttaattaacaaagcaaatgatgcttgaagaattcacctttttcaaagtatggtgagaaaatagatgaaattattaaaaaatttaggtaaagttttctattcccgatctcagacgtaatggtatacacatttattttgaatatggcaagaaaatagctaaaaatgttaaagatttagccaaagatttctacttccacattccattaatttttagaataaaaataatcaacagaatttaacataatactaaaagggcattccacatttttaggggtacagagttgtaaatcctacccccaagagagttgagtatttagacatctccaaattcctagtcactgcttgaaaacaaaattaaaatgcattcttttgaataaatctttttatttaatttttttatccttattttctcctacctaatgtgccatgtctacgaggtcgatattagcgccacataacaatacaactcaccaaaaagaaggctaggtcatctactcagcccttcagccaatagggagtttcgacactcaaataggatgatgaatgatggaccagccacccctggccagccgtatggtcagcacaaggacggctagcttctggacagcataaggccatgttggattatgttttaccaggatttagatttactaccatgtatgttatttaacatcctaaatatgaatttgtaaaacaatgtaaattaaacacatataaagt

SEQ ID NO: 377868 - DNA, 3218 bp, Cannabis indica
tttattttgggtcctgaggaacaattacagaacaattacaaacaatgtcaatggccaattcctccacctccatttcagtcaccctcacctaccttcccaattgccatttacgccgctctttccttcccaattccaattccaaatccaaacccactcgcattcgatgcgaatccaccatttcccccgccaggctctctacgcaatccaacctagacggtgccctcgccgacgccgtagtcgtcgggggtggcatcagcggcctctgtatcgcccaggctctcgccaccaagcaccccaacgctgctcctaacctcatcctcactgaggccacggatcgtgttggaggtaacatcaccaccatcgaaagggacgggtatctctgggaggagggccccaacagtttccagccctcggatcctatgctcactatggctgtaatttaatcatttcttcttctatcactactcattgttatattgcttctttcatggattggattgaattcatttgtttctttcgcaggtagatagtgggttgaaggaggagctggttctgggggatcctaccgcacctcgatttgtattgtggaacgggaagctgaggccggtgccctcgagcccaaaggatcttcctttctttgacttgatgagcattccgggaaagctcagggctgggtttggagcccttggcattcgtcctcctcctccagtgtgttctctttgtctttgtctttttttttttaaactagttcttatgctatttcttgaattgaattggggtgaatttctcatttctgaaatcttgacaaaggtgacagggacatgaggaatctgttgaagagtttgtacgccgtaatctgggcgatgaagtttttgaacgcttgatagagcccttttgttcaggtaatattacctttacttgtaccccttatcacactgtaatctgtatttagtttactacttgttacgttctatttcaaagtaatttaacattaacaattcctttaacaacactagtatggactatgaactatgaagtatcagtctgatgattttctgaaactagtgccactttgtttaacttcaaagttcaaaccatgagttgtcaaattcactgtgagatttcgtaatcaatcatttctgtcacgtttaggtgtttatgctggtgatccttccaaattaagcatgaaggcagcatttggcaaagtttggaagctcgagcaaattggaggtagtatcataggtggaacttttaaagcaatccaagaaagaaatcaagctcctaagacaccccgagacccgtaaatgtttagtttgcatttacattgaagcaaaatcttctttcttatttagattacagatatttattgccagtgatctaattttacttgttttgtaggcgtctacctaaacccaagggccaaacagttggatctttcaggaagggacttgcaatgttgccaaatgcaatttcttcaaggtctgcttttttttttttgccttagcaagtattaatattgatttagactatcaactttgtcatttgctgtttcactgctgtttagttattctttattttattcctgttgagcttctattcttttgtggccccataactttcaacaatgtgtgatttatttggcaggttgggtagcaaagtgaaattatcttggaagctttctagtatcagtaagttggataatggaggctactctttgacatatgaaacaccagaaggattggttactttgcagaccaaaagtgttatctttactgttccttcccatgtcgcaagcagtttgttgcgccctctatctgtaatgtttagtcctggatttctttatcattatggttttcatttgtcttttgctattcttttttatttttccactttgctcttttgccttcaattgtctattgtcctcaattcgagtagttcctgctctagaattcagaagaaagagagtggctgtagtttcaatgttattgtcatggtactcactgctcagtcgtttttccctagcctcttattatttttattattttcaggatgttgctgcagattcactggcaaagttttattatcctccagttgcagctgtatcgatttcatatccaaaggatgctattcgacctgaatgcttaatagatggtgaactcaagggattcggtcaattgattccccgcagccaaggggttgaaactttaggtagatgtcccattgctttagaaaatgtagttgtggactggtgggaacttatagctaacacatacttttggtttttgcaggaactatatacagctcatctctctttcctaatagggcaccaagtggaaggatactgcttctaaactacattggaggtgccactaatactggaattttatccaaggtgaggacagtttgagtaagctcttagactattcgcaagattcaggggaaggagggtaggccgagtgagatatatattagtgacaggtttttttttttaaatatatatttatgcataatgtcaacgaatacagccaaaaataataaaacaaaataaaaaggttgcagcaattttttctctgggtaaggttacagcaattaacttgacaatttgatttagctttgaagattactgtgattgttgatatacagctgtaataattccatcgcggagggtgcagaggtaattttttaaagacagtttcagttagttgccttgtacatatttttataatgtgcacttatgctttgacagacggagggtgaactcgtggaagcagttgatagggatttgaggaagatcctaatcagaccgaatgccccgaatccaattactcttggagtgagagtgtggccacaagccattccacaattcttagttggtcatttggatattcttgactctgccaaaggtgctctaaggaatgatgggttgcaggggctgtttcttgcaggcaactacgtatctggggtagccttgggtcggtgcgttgagggtgcatatgatgttgctgctgaggtcgcaagtttcctctcacagtactcgtacaagtagttttagttcccatatgtgtccattgtcagtcattttttttttaaagatcattcttatttgtgattagtggggttgtgatgttaatgtgaattatggccgtaatcccaattttgagaatactaattaatacgaggatttagcatgacaacaaagatacgagacagtagactag

SEQ ID NO: 377869 - DNA, 4887 bp, Cannabis indica
aataaaaaaattaaattattaagataataaactgccacatcatcaccttaaactgtagcattgtatagatatatagatagagaatgaataatcaaatctccaatgtttacttgaaaagaatggaattaattatatgatattgactacattcatttgtttactaaacttatgataaattagtaggatctactaaagtaagggaaagaaagaaaacaagttattctcctattttctttttaaggaattacattctccttcctaatttatatgagtattcttatgggatattaatgtgtaattattagtatgagatggtgtcttataattggttagacattctctataattttctattaaattagaataaataggatctcatattgaattacactaataatgattacatatcacaagagtattagacaccataagtgccatttaaaagcatcctcaatgggagacaacatttataattttcaaaatatacagatcatcttaaaaaattattattattttttctattttttttttttattcacataagcttcaatgctctatttatttttggggtaagttgaaaaatactattttttttaatcaattaatcaaatttacctctattttcatatttaattgaaatatatctctttttgtatgtgttgtacccaaattaccctgacataaaagagttatttagagagtatattgaagtgacatgggtaaaattagtacaatatttaaagaaaaaggtaaaaataatagactttaagaaagagggtaaaaataaaataagaaaatataaaaagggtatatagttttattttcattgctcaacaaaaaacgattggacacctatagtagcttcataggagcaacggtcatgtctcactttttttagtttttttttcttttctttaaaatattataattaatagtgtaaaacatttatagtgataacttttagagttacttggcgttagaatatttaataaatgtgcataagataaaaaaataaaatatttatatgatgtgaccattatacatattaagcaacactttccattaaataagtcttgagaattaaacaaatatacatattatgtgcaacccattggggatgctctaacatttctcaatttatattgtttgcttgtattttgtttaggttctcagatctacacgtgtaactgctcattcagtctgtcagttctagcttcatctccttttagctttgggaagaagtttaagttatcctgtggtgaccaagatttcggctgatagccttaacaaacgtccatattacagcccaaacatctacataaaatacaacacacaactactcgggaacataaacttgtcattgtgtatacaaataagtgtccatccataaaataaatacatgttattaaaactaaaagtgtctaaccaagactataaagtacacaagccaagccagttaatgaaaaagggcctaaaagatcacaattcacaacaacaatgtcaaacataatactccacccgtacaacaccaccaccaccatcaccaccccttacataatctagaattgatgaaagattttcaagttcgcactgctctttttttttattattattattattcgtttgattaaattaagacattcaaatacaaataaagggtacccactacttgtacctcaagggaaagataggtggtattatagcggagaaatcataacgaccactttgaactgaatcaaataaatagcaataagagaaacacgaaaagttcaaacctaaacaaaggttttcaagccttgccagtcttctggttgggcttgaagacatacttgatgagggattccttgatgggcaacatttcagggaattctttgctcaattttgtggtatcaagctcgttgttgctccttggggcaacaattaccttggcctgctcctcaagatcaaagtttttccatgtgtagttggggtcgatgtattcacggtacaattccaagacctcattgtggctgaccacaccagggtttgtgaagttccatattccagtgagatttctcttcgccatctcaaccgaaatgggaaggagttcatccaagattgtcatggagttagggatattgacaaccttctcgtatcgagagatctttgtaatgaagttgcgagggtttgataaatctgatgagatgggcattcttacacgcaaaatgcagacattctcatagttcttgagcagttcctcaaccttcacaattaccataaagagtatccagagtcagtaactttagtccattgagtgttccaaaaagcatataaaagtactcaaaatagagaaacaccccataagttctctataccagaaggcagaaacacatcatttatgataacaggggcaaaacataaaaggaagaatggtagcaaccttgacttttaaaaactcaactgtaatccccaaaaaaacattacaatcaccctgaatcactaaggtcagcttaacagattcaagctaagtcaactattggaacttaaattctgcttcacagatcaatcattgaagtaagacccttttcatgaaaaagttagttcctgctgttagtacgcaaacacactcacccatgcccatgggccatgacttgagttagccttatcctagccataaatgggtaaggttagatctcttggccactcacgtaacaaaacgcaaatagtagctgtcccactcaactctagaatctttgtgactctagcatcacatttctaggtaagtgcctatgaagaatctaaaccctccaaccgtattgagaacaaactacttacacaaaacagggaacatcccaaaatttacaaaacacaccctttgacctttcgaagtcaacggcactcttactttcttcacaccaaatttaacagattttatttatatacatactataacagatttaatatgagtcagctatacatgaacttgaatcataaaatcaagtacaacaaaactaaaaatcacatatttaatccaaaaattgagagcatgccatagatccaaaagaacaaatgccagatctaatacatggccataagcaaaatagtattcaaacaataatcaaaagttgataaatgacagtgctcaccatggccttggtatttgaatagaaggatccgatgaagttaggcttatcctcctccttgaatccgatacccgacccgagcgggtgagccgaatcgtactcaaatatacatccagtggcatagttgagaagaagaagtcctcgctcccggcaaatgtcggcgaggttcaaggtcccgacgacattagtacggatggtctcgaccttatgtgactcacaccaatcgacgttgggacggcctgtaacgccggcggcgttcaaaacatgagtgggtttaacggaaccgatatcagcttcgatcgcagctcggtcctcgaggcggccagaaccgtactcgaatgtgatcccttgctctttacagatcttaccgaggaggccaccaatccagccggtacggccgtagatcaagaacttgattggcttatcttgaccgtccacagctggaaaccccatcgatcgccgagggtgagtgaggttcagacagttcgagcaagagaattggaaaatgtgggcgagatttgagatttggatctgaatttatttatcacttatttataactgaggaggacaaaatctgatacatgtggattcattccaactgccctgggtttctcctcattatgccacgtgtcatttcatttcattgattatgttcttacgtaaaataccataaacattttcaccttaattctcatttattaagaaatatttatgtaatgcatatatacattcttttgtaaccttttttatgatttattatgttactgtctgaaacaagaaattataatattgattatttacgtatgtcggtgatggcgttttgaattttgagttaagctgtaaatatgattttttttattttgacacgaaatcggcatgaaagaatgattacataaggagggaagatttatatgggagggtaaattataaagaaaaaaaaattataggaggcaaattaatgataatcataaatacttttgtttttcacacataataaatacatatcaaaacataacaaaaataaaattatatgtgattttttttatatattaaattaagcatataagttataaacttataacagcataatctataggaattattacattgaaaatataaattgacactttatttacaaaaatatttccataaggtgtggacaatatttataccttttatttgattttaattaccaaaatactaccttacactatcacttacacaattagacgatagttggagagtggttgttgcgtagttgcgcagtaattgcatcaaacaaagttttaatcagacgaaataactattagcaaaatatttatgcaactgttgtgaaacattaaaaatcagaacagtatttctacgtacgtaactctatctacatgtctttttatgatttaatatgaacaaattcaacattagaaatttgggaaaataaaaaacaaaaatacaccacaataaacattttactatagtattgatgtaattttttttggataatacttgagttggattgtttgggaactccagttcaactttttgagatctgcctttcatggatctgaaaattgaagtcaggacattaattatatgcaaattaaaatggatttccaattaaattttagtttcgtagtagtttttcaacactttttttttaatgaattcgaaacaactcatgttttgactgattctagtcgtcttctcaggtgaagtcgtcgaattaatggtggttctctttctacttgaattttcgtttcagttgcat

SEQ ID NO: 377870 - DNA, 4154 bp, Cannabis indica
ctgccacgtggacgatgcaatatttgtaattgtccacagttttttcttttttttcattttagtgctaactccagggttgagttaaccatagcgggcgattaagttaacctgaactctgactctggtcccccaattcacagacccgggcagtagtagtacgataacagactctctctccatggtctatataaatctgttgtggagttaactaaactcattgtaaaatcactttctctctcttatttccttttgagtattcaccttctctctaggcttataactactactgtacaacctggaaaactgtcaccaaaatctccttcgcacagagacgacacattcgtaaaattctcgattccaacttcttcgttagtaactaactaacggttttttatttcctttgtattcttttattcccaaattaccccttcatctactcctaattttcatttcaatgccattgtaagcttcagatctgaaccagagtttctattttgaaaagttcaaggacagttagaagaatgatcacatggaaggacctgtacaccgtcttaacagcggtggttcccctatacgtggctatgatattggcctatggttcggttcgctggtggaagatatttaccccggaccagtgctccggcatcaaccggttcgtcgccatttttgctgttcctcttctttcatttcacttcatctccactaacaatccatataagatgaacttccagttcatcgccgccgacactttacagaagatcattatgctcttcgttctaggaatttggaccaatttaaccaaaaacggcagcttagagtggatgattaccattttctcactatctaccctgccgaacaccttggtcatggggattccgctcttgaaagctatgtacgacgaagtcgactcgggaagtctcatggttcaggtggtggtgctccagtgtatcatctggtatactctcctccttttccttttcgagtatcgtggcgccaagatgctgatcatggaacagttcccggagactgctgcttctatcgtttccttcaaggtcgattccgacgtcgtctcacttgatggccgggatttcctggagactgacgccgaaattggtgacgacggaaagcttcacgtgactgtccgaaaatccaacgcttcaaggcggtcactaggtccctgctctctcccggcattgacacctcggccatcgaatctcacaggcgccgagatttacagccttagttcctcccggaacccaactccaagaggctccaacttcaacaacgcagatttctactcaatgatgggagttcagggcttccaggcccgacattcgaatttcggacctggtgacatgtattccgttcaatcttcgcgaggtccgactccaaggccatcaaatttcgaggagaattgcgctccaatggcgacacagacagcaccctccccgaggttcggattttacccggctcaaacggtgccttcggcgtacccggctccgaacccggaattcgcatccactgtagctaagagctcgaaaaaccaaacgactcaagagaagccacaacagcaaccaccgggtcagcagggttcggcggctaaagcaaaccacgatgctaaagagcttcacatgttcgtttggagctcgagcgcatctccagtctccgaaggtggtgggctccacgtattcggcggtacggactttggagcatcggagcaatctggcaggtccgatcaaggtgccaaggagatcaggatgttggttgctgatcaacctcaaaatggggaaagcaaaggtaaaatgataagtaaatcaaataaaaggaaaaatacatttttcactaaattaacatattttcttttcatgtaaagcagttccggaaagcgagggctttggtggagaagctttcagtttcgctggtaggaatggagagggagatgaggagttaagagatcagaaagatatgggacccactgtgctgaacaaactggggtccagttccacggcggagctacacccaaaagttgcggggaacccagatctcagcgtcggcaaacaattgccgccggcgagtgttatgactcgtctaatcctgataatggtttggaggaagcttatccgaaacccgaacacctattctagtctcattggtctcatttggtctcttgtctgtttccggtgagccaatagtaaaaattaaatccaaattatacctttttacagcacacccgttttcatccaatcaactatttctttttcttcgtcttaaaaatatatacatatatgtatacatttcattttctttttaaataatattattattattttaatatgaaatttctctttatgatataggtggaatgtgaatatgccggaaataataaagcaatcaatctccatactgtcagacgcaggtcttggaatggctatgttcagcttaggtgagtggataatataagatttaaattaataatacataaaaaaaaattaatattttaatatagggtgtctttgttacttttgtaattcctttcctttttccccatcctccaataattgaaagcttttgatattttgtttgagttttgtataaacaagaggccaatgggattggattatagtagtaagtagtagtagtagtagtagggttatagccgtggcataattcggatcatatagtattagtttgagagagagagagagtgagttaggcaaagggaaggagctaggttggcaatgatgtcgacccttgtcagtcatactgtaaggttatggctatcaattcttccacacccttaatttgtttttgtctagtacaaaagcttgcaagctagcaaaggagttctaatctttggactataaattaggcttgaccgcccgacatgtggggccactaacgtaacctcctttgcggttcaggggtcggtggcttctctctccttttaaaaagagctaatatatttattttttatggtccaaaaatttgacgaaaaataaaaaatggtgattataggtagttaaaatttaaagctaccgtttcaatgtatatatgtttttttatatatataaattaaatatgacaaactaaaaattactaataagggatgaggggtgttatggtgtgctgatatttggttatacaatcaaactctaggtctctttatggctcttcagcccaagataattgcatgtgggaactcagttgccacatttgccatggctgttagatttcttactggtcctgccgtaatggctgtagcctccattgcagtgggccttcgtggtactctgcttcacgtagctatagttcaggtaatttttttaatattttattatccggttaattttcgttgccaaatttatttaaatttaattttgagtactaattgacatgaattgtattatgcttgttaattattaggctgcgcttccacaaggaattgttccttttgtgtttgccaaagagtacaatgtccatccagccattcttagcactgggtacgtaatgtttaagaattcgacatgccgttttaattatatacgttggcttaattttctttttcgaaaagttaaaactgattaattgcttcttaattttgttcaaatttacagggtgatatttggaatgttgatagcattaccaataacacttgtctactacatagttcttggattgtaaacctggcaactagtgttcccgtagttagccgaaatacaaaagcaaatgaagagttctttttttattttttttcacgaattgactaatattgtgtggcaacaacactttggggagctcatcttcagaataccacacccaaattatatacttagtacatgagaatttttcggcagagaagaagatcatagtaccaaggagatacgccaagattattttctgcttccaaaatttttggagctcagtttgactaattatcgttgaagtgcagaaaaaagaattaaacaaaaacaaatttataatcttcatttgctccccacattaggccaaaacttgtctaatacatatttttctaaagcacgagggaggaagccatgtaagctagttccctttctatgtgtcctatgggagacaagatgataagaaaacaaggataagggaagtagtgcagtcaatgatatgtaattcattctctt

SEQ ID NO: 377871 - DNA, 5584 bp, Cannabis indica
tctttcattcatctatttatttgggaatttataatgagcactgctattaggtatcagtagtgcttagtaacttctcgacatatcgcgttgcgattagttagcgatactccttaaaagctattatgttaaattatatgggacccgatacttagttggaccaatagcaatattaacatgtaggagagtgctagacatcagaggtgccctttaacatttctcatttattatacatctcatggatgatgatcaatgtaacaacaaaatataattaattaattaatcaaaacgtttttattttttggggagttgcatatatgtgtccctaattggtaatgattatattcttaaactgtactatagagtgtgcacgaagagtcttaatgtagattaatatatatatatagggttaaaagtataataattaaattaataattggacaaagcatgtcactttgtttaaacttaattacctcgatttggttacatgaaaagagcatgctttctaattctactgacgtaagcaacctctatgttgcatatatagtttaatttatcatattaatttgttttggctactcatttttgtagcgtctataggtcattattatttgtatgataatattattattgaaatcatttgtatgataataataatattattattattattattaaccaattataaaataacgcttcatcctaatgctacattattgatatgtaacttttaagaaatgtgttaattttttttaaaagtaaagaaatgtgtatatatgccttaatgagttagagcgactcattcaaattaatcatggcacatagacacctttatgaatgcatatctaatcaaatttcaagttttgtcaattaatagaactttatcttttttcttaagggggcataaaattgtgtagaaattatttattcataacttatgataaaaataataatatagaataacaatttgtaataacttgtaaattaaaatatctagtctataaacaatatttacaattgtaaaattatccatacaaaaaaactgtttaatttacagaaaatgaacttatttacgattatgctagctattacatattttcgtaattcttttttctaaatttcatatttatattacatattttttcaattttaagtaatatttttaaaaaaaaaaaaaaacaaaactccactaataaactaatgttattataaaaagaatattgaaagcatgccatgtaatgacgtaaggagagtgttgggaagaactgaaaaatgtttaatttattgtatagatttcattatttagagaaatatatatgaagcactttttctttttaaaaggtgatcatttattcccatgcaaagaaaatggaacccacaaacacatatttatttttgtttaattatattataacatctacttcataactatcttgctttttgtgctcccgtgcttatgtaccatagtcattatacctatttatatatataaacaaacattttatttataaatattctcttcttttgtcttatatatatcaacaacaagaaggcttcatctttttatatatatatattaaccttaatatatatattaatgccttgaaattacaaaatgttattctaggaaaagtttgaaaggaggccacttataaatttatatgtaactataattaattaagtcattgtaaaaactatatattggccattatgtagtgaggactcattgctcgatatataacttaattattatatatgtgtgtgtgtgtgcaaattgaaccttttcttaaatattattaacaattctattaagactaattatacagaacaagctatatatataagtccaaaaaatgggaaaggtttgttttgtaattaatgaagatatatatagacaatggtttatgggtttcatatcaaaacctatatatatctatatatgtatgtaagctaggtatatattattatttaacccttatgcctctaaacttgaagctaatgagttggatatgattattttatcataatttttcctctttttacagaaactatatcgaaagctggtccgaagaaaaatagttcacccacccatatggtatggtggaaaaaaaaacaaaattaagaattgcttctagaaaatataggtcacactagctacggtacacagtacacaatcataaatatagtgagttaaaattagtaattatcaataaatttacttgactaatcttacatagtaccaccacactactataaaaaataattaatatatgggtgtctaaaaaaactttgagattgtagccttaagacagataatattacactaatatggaagttaaaataagataacggtccaataaaaatagaagaatagagcccagcaaataatatatgggtgattaatttataaggagcatttcacaaatgataatttttatttaacttgatgatttgtaaaatatcatgaaaagttcagaaacacatgcaggttgatatatatagtgagtgaatatatgttgcagttgcagagctactagtacgcataaatcaacctctctcttcttctttttctttttcaaattatttccttatatatattagtttctctcgttaaatttatgtagtaactattcatagataatattcattgaaaattaatccatttatatatatatatatatctgaatactttatatataaatgttgcatggttaaaaaactcttgtaattgtgcaaccaaaattctcacattgccaaaaacaaatggtgagaatcatggtatataaggaattgacaagtatattttcattgagtattattattattaggccacaaataacttttaaatataatagtaaaaggattttaataattctgaaaatattttaagttctatatataaatataattattttgttggagcgtgcattaatctttgcttgtgagatttggtaggtagtttgaggttagtagctaatccaatggtatgaagaagtttcaccacataccaagtggtgtcaatttgccaccactctaacccatgccttgctgagtactcgaaagcatggtgattgttgtgccaaccttctccaaaagctaacaatgctacccacctgaatatcatcaatcaaccaatattaattaccaaaaaaaattaaagtaaaaggtgtttaattaatttctaaaaaaaaataattacttagcttaccaattgtttcttgacaaatcaccggtattccatgcttggttgccccaaacatggcaagcagagttaaccagccaagtcacatggtaattacataccaccctcacaccctgcaccaccttaattattagtctctcacttttaaacacttttatatgtacatatatagtttcaaaatctaataattaaattaccataaaagtaatttgagattattaattcctaccattccccaaaccacgaaaggaaaccctccaagtgcatatagcacaactccaaagtggcaattgggtgaagaatgtaagtattttgaaggaacttatagaatctttgattttctaaatccaaaacaatgtttggactcccactctgcatatctaaattttatgttcaaattaattaattagcgattttgtgtatctaacagtttaacaaagaaaattacataccttttgatatgcagtgttggaatcaaatagccaaccaatgtgactataccagaaaccttcaattgggctatgtgggtctctctcagaatcaacaaactgatgatggtacctatgtgtcctcacccaagtaattggatgtccctactcaaaaatataaataaaataaataaatccagtcttaatatttttcctcaaaaattattcataataataagagaagtaattgaagttctagtactacatacctgaagagcttgagttccacaataagcaaaaaaatactcaagccatttggggagtttaaaactatggtgagagagattcctatgaaaagagagagtaataccaaaaaggcctgtaatgatgtaaagtgtgaatgcaacccaaaacgcagcccaattacaataaaagggcccataaagactaagcaaatgcaaacccaaaataacaccagcagtgcccatgtcccaaacactccatttcctcccactaaaaactttcattggctcttctttagaaactgacccagttcttaattgctttttaggctttgactcattgtttatgccaaactttggtgaggtcatcatgagtgaacccattatttgtttttgtgttaaatgtttaatattgtgtgtgatatgtatatataagctccaattcttaattgggttcttgttaaaattgttggaaaaaagttttctatagtggtttcgtagaattatcaaatttcaatatagatgtatcttagaattattgttttgggttgttttacctccaatacacgaaatactaaaataaataataaaagatatgataggtcttagactttgatttttctttttaaagtaaatatagaactttaattaatttgtttaatcagacaaaagataaaattatactttaacaaggaaaaacattcctgttaaatactcgatttagaaaaaaaaaaacaagatgctctaagttctaacaagatttagcaaatcatttaatgaaaaataaaaataaaaaaacatattgtttaagaatgcaagaaatttacgacaatcttttataaaaactccaaaagaagaaaatatatagataataaattttgaatagcttgtacactaaattctaagcgtctatacaaaactacctaatttagacattactaattttctgtaagaatctcgagtgactatatcataactaaacgccggatcacgaaagatgctatatcaacatttactattatgtatttttatttttattttacataataattttttaaaattatttctttgtaattaattataatttataaatgttattattattatttaaattaatgtcggtttgaaaaaatgacacataatttatatgcaataattattgagaattaggaaatcatgttgttcaaattatttcctttttatgttatttttactatttctcatttggctcattcgttaactaagtagctttaaagttagatatcgatcggtattaatggacatgtgtatacaatgttcatatttagcactttcatttttatcaaattattttattttaatggaagtaatgtatatctctaagaaacaattttcatacgtaaattatatatttgagtcaccaaaagaatctacgttatcaaactatcctaaggacttgttgctagtaaaaaattatataatatattattatagatactaatcacgcacataatatttattcattaatttattatagtataatattacacataaataatatagatcacacacatagactttctaatttcataaaagagaaatgttaaagggcaccagtggtgcctagcaacttcctatgtgtcaatatcgctattggtccaactaagtatcgggtcccatataatttaattgtgatagcttttagtaaagtatcgctaaccaatcgcaacgcgaca

SEQ ID NO: 377872 - DNA, 6197 bp, Cannabis indica
aaaaaaaagaagaagaaaaaactagagatctaatttaattatcatctataaagctataaagatgataataatgctttatatctttaaaaaagtataaaagtttatcataaagaacacttgcagaaattacttctttgtgatgaagaattgctacttttttttttaattaattaggaatgttgatcattttcactatcaagttcaactagtaatcaaatttttttcaaacaaaagttcatgctatatgtttagacaaagcaactaatttagaacctgctcccaataaagtggttagtaggaaattaattatgttatggttatgattaaaaaaagcatttatagttatttactagtgtgtatgtaatttttgttgtgaagatagggaatccaaggacaaagaaacagtgacattttattttcatccactgagaaaaaaaggttcaacttagctgtttctgaaaattataacgaatgaaaaagataaattgacatacttataaatgatttatgaggaagcatatatggcaataactgatttgtccttgtattgtattttttcaatgggaacaagaaaatagtcaaacccatgtggaatattgtattttggaagacagagttaggtttcccaccacattattaaccctaaagacttttcatattagatcgaaaatgtcaggaactaactataatatattactataccttttttctttctataaaagaatctcaaattggtaaggtggcattataaatcaacaatggcagaagcaccaacttaactcattattgttctacataaaacgcaaagaaagaaagaaaagaaaattagcattttcacaatttgaactttggaagtgttgtttttgactcactgaactttaattcttcaactgagttataaatagaataataaatacaatagattctttccctaacatatacgaaaaatgatgtttagcatggttaaacaacccgagtcaaatgtcaaaatatttattacaccttaataaatattgaaaaactattacttgactcgttctcagaattatatgattgaaacttcagtagtcatggtataatgagtgatatttaatactaaatttgcatgaagtggcataaatattttaagactgaatattcaaagcatttcttacaaacttttctggaacacttttttaggtgtaaaggaagataaggttgagataatgaagaaaagaacaaaaaaaagaagagtagcagcagacccataaagatttcaacagagactgtagctggagcccattttcttcaatgctactttatatttaaatggaaggaaggcaaagaaagtcatagcagtgggaccctttgttccaaaagaaaaatcttcaatgacctttacaccttcgtatccaagactccaaacaactgatcccaaacaatactcactaacggcacagccaattcaaaccatggtccatggccccccaaatgggttaatattattttaatcttaattatgatgatgatgctaaaatctaaacccaaaaaccatgtgtgaaaactctctgtcatcaaccccaacaaaagtggttattttagtcttaattcttcattcatttcattctcttggttagtccccagaagaagagtcttaataaacagacatggttttctctttctctttctcaccataaacataaaaagaagaaaaagattaagactttggtcaaggatcacaattttgatttcatatctgagatgggttttctttccattgtgatttatctttctctttcgctagcttttcatacttctagtcatgtttatgggaattcagagcttgaagctctactggagttgaagtcctctttagacccagataacaagtttctgagaacatggactaaagagggtggtggtgacccttgtagtggctcattcgaaggagtggcctgcaatgagcacaggaaagtggctaacatttctcttcaagggaagggactctccggcaagctatctccggcggtggccaagctcaaatgcttgtctggtctttacttgcattacaataatctgtctggagagataccaagagaaatttccaatcttactgagttgactgatctctatctcaatgtgaataatctctcaggtgccataccttctgagatcggcagcatggctagtcttcaaggtacttgttgttataagtacacaatataataaccaaaaaaaatcagacttttttcttttctcttctttttttcctttttcttattatactaaaactctgctcttcaatgcaatctgagtagagtagataaacataaaagttatgtatttgatctatattggctccattttaagccattaattgcatttaagacagcatataagtgaaatattgtgtaattcaattcgattaatttccataattttctgtattgaaagcaactttgaaggtttttaacgcatacttctctctctcttgtatagttctacagctttgctgtaaccagctgacaggagaactacctccggtaatggggtccttgaagagactaatggttcttgctctacagcataacagattaattgatgcaatacctcctagcataggagatttggggatgctaaaaaggcttgatttgagctttaatagattctctggtcaaattccctctagactatctagtattcaatcattggaattactagatgtcacaaataattctctttctggagttgtctcttctggtatgtctgtttattttgttcagtccctttttatatattttccataaaatatggatttttgttcttttttttctcagaattacactgattatacttacggaaaaaaatgaaggttttcgaagattaaatgagggctttaaatttgagaacaatccaggcttgtgtggagttgggttttctagattaagagtctgcacagcttatgacttttctgatgtggatggagatggatttggtgctatcataccaaacagaaatgacagtggtgatccagcacacaaccctgaatatgcaaatgtcaaaggacattgtaaccaaacacattgttcaaagtcagcaagattttcacaggctgcagttgttgcaggggtaattgtagtgactatcacaatgactgggatagtgtgtctgattattatcagataccggtggcgaaaacaaaagattggcagtacttgtgatccttccgacggtcggcttagcattgatcaggccaaggaggttcagtttcatagcaggagtgcctctccacttgtgagacttgagtattgtaatggatgggatccagtaggagatggtggaaatggacttgggtcttcccaagaatatcttaatgattatagattcaatatggaagagattgagtctgcaactcaatacttttctgaggctaatttacttgggaagagcaaattttctgctgtctataaggggattcttagagatggttctgctgtagccattagaagcattagtatcactagctgtaagtctgaggaagctgagtttgttaaagggtttaagtttattgttttcactaaaacatgagaacattgttaagcttagaggtttttgttgctcaaaaagtagaagtgagtgctttctcatctatgattttgttcctaaaggaaccctttccagttatcttgacataagagaaggaagtgaccaagttcttgactggtccaagagggtctccatcattactggcattgcaaaaggtcagttgactttttcttgatagaatttatttagttgagttacaccgtatccatgctttctttcagtgcagctgactggtttttttcctaaaccaggtattcagtacttacacagcaatgaagcaaacagacctgccatggtccaccaaaatatatctacagagaaagttctcattgatcaccaattcaacccgttgatatcagattccgggcttcctaagcttcttgctgatgacattgtcttctcagctcttaagacaagcgctgccatgggatatcttgcaccagagtacataaacaccggccgattcactcagaaaagcgacatatacgcctttggagtcattgtcctgcaagttgtatctgggcagtgtatgctcacaagctcaattcgagcaggagcaaaatctttgatatttgaagatttcgttgatgccaatctgaaaggagagttctctgaatctgaggctgctaagctgggagaacttggactagcttgtactcatgaacttcctgaggaaagaccgaatgttgatgaggttgtagaagagctcagcaagattagcttcagtttttgatgacttgaggcttaacaagaaacaagataaaatgttccctcattcatgtaaattggatatggaaagaggagtatcttagagaacgaggcttcccttttttataattgtaataatttttttcacctttaacctattgttaattaattacatatatactatgctgctcttaacttttactattaagaaaaatatgtagttattgattacagtctcaacatcaataagagtagcttagctaccaagcttgtaaacttcaactaacattaattgatgacagttacacgttcatgtattgcagcttgaaagtttgttcttttcaactaagctttatttttctttacattcttttctcatatttttctttcttaaacaatgataactacattgaccagaaacaagatatgtacaacaaagctttggtacgcagtgaaataaacaaaatttgatctaaaagacaaaattcatacgtctttctatgagcattattttggcttttatctaagaaatgttcatatactgccctgccctgttgataattttaaaccattcagcaggccaccaatctggcctaccaatctggtcaatgcacttgatcctttcaaggcctcctccagccgcaagacacgtccatccctcgacatccaaccatggtcgttatagcaccaattttctttctcgattgggaatcaacaacttcctatccaggagagatcttctgctccaattcttgaaggaccaaagaaagaataaagttgagactgttatatacaacccaagaagtaaaggtgaatagtaagtagaagatatttaccttctccatggctattaacaaatctcaaaggaagcaaacgcttgtgaatgaccccacggtggtgtgtctgggctacaagtacaaagtcttggccaacataacaacaacctttgtcaaagcttattgcttttagacccaccaggttgtattcaagagtaattgtttcaaagggctgaacacttttcaatgggtattaactgactgtaattaaataaatttaactataaatattaattttaaaaatatatagttattagattttgatagatggcgaataataaaagagaaatttaaatttctatgcttaaattagctacttaattaaagaaaatatgaaaaaatacattttttttacactacatcaaaaataagtttatatgaaaaatatttaagtaaaactcaatatttattttatcatgactaatttattattattattttctttatagcggatagaacaacctcagtctatataatatcaaaatgagagttttactatgggattttaaaggttcttatgataaatatgacacatttaagtttgactaatttatatggtatttttttgtttttaggtctttttatagtatttaatatgccatatatatgtaattaggttttcaaatcccatatttaatgtttttatttgtttaggaagttttatttgtcactgatgccggaaaagtcaacggagtttgctgttggtgtcggaaaagtcgttggagtagcggtcggtgccggaaaagttgtcggagtagcagtcggtgctggaaaagtcatcagagttgttgccggcgccagaaaattcgtcgaaattggcattatcgcaggaaaaatcattgaaaaaatcactaagaaaccgatttcttcttcaagaaaccggtttcttgatgaagaaactactttcttggtgattttcccgttgacaatgccaattctgatgacttttctgacgctagcagctactccgaagacttttctagcactgacaaaaaagttcagaaaagtcatcagaattggcataatcgccgaaaaaattacaaagaaactggttcttgatgatttttc

SEQ ID NO: 377873 - DNA, 1397 bp, Cannabis indica
ttttagttttttaggaaaaaaaaaaaaacagggactgctgttgtgatagtcatgttggtcactacactgctaatgactctaatcatgatcttagtttggcgctgccattggattatcgttgtgatcttcactggtttatcactgcttgtggagtgcacttacttttctgctgtacttttcaaagtggatcaaggtggatgggtaccgcttgtgatcgctgctgcttttcttctcataatgtttgtttggcattatggaactgtgaaacgctatgaatttgaaatgcatagtaaggtttcgatggcatggattcttggacttggtccaagtttaggacttgttcgggttcctggtattggacttgtgtacaccgaacttgcaagtggtgttcctcacatattctctcacttcatcacaaatttaccagccatccattcagttgttgtatttgtttgtgtgaagtatctcccagtatacacagtgccagaggaagaaagattcctggtaaagcgaatcggaccaaagaacttccacatgttccgctgtgttgcaagatatggctataaagaccttcacaagaaagatgatgatttcgagagaaagcttttcgagaaccttttcatgtttgtacggctagaagccatgatggaaggttgttctgactctgatgattacagcatttacggccagcaaactcagcagtcgagagagggcctattgaacaacggtggtaacacaactcgctccagtgtcgatcttactgtctcttcggtggattcaattgtacctgctaagtctccaacgcatttaaactataatacggtcgggtcttcaggtcaggtaagcagtcacaccgagattgatgagctagaatttttgaatagttgtagagatgctggagtggtgcacataatggggaatactgtagtcagagcaaggagggaatcaaggttctataagaaaatagctgttgattatatatatgcatttcttaggaagatatgcagggagaatagtgtgatattcaatgttccccatgagagtctattaaatgttggtcaagttttctttgtctaacttctatttttgcactatcatccttcaataatatattttacatctcatccttgtactacacacaaatgtaaatgtctatttcattgtcttggccacccatattgaacttcacaaattttgaaaaattccttttattagtaaactagttcaaattgtatataatattactctcgagacgagtgaaatgcgtgctttaaaggtagtgattttattgtactatgggaacgtaacaatatactgaaacaataaaaaagtttatgaaataagaatgatttttactcttgcttattgagacaacgttggatttttattttaattga

SEQ ID NO: 377874 - DNA, 1923 bp, Cannabis indica
tgcgaaagggaagagtcggatacataaagtatgttctgaaaagcagtttgatgaagctacctttatttggttggtcattccaaatattggagttcatcccggttgtgaggaaatgggaggttgatgaatctatcatgcaccaaatgctttcaacttttaaggatcccaaggatcctctctggcttgctcttttcccagaaggcacagattactcgtaatttcttttgctgcattctctcttcttatttctttcttcttgtattttccatctatactaaaattgtttcatatgaaggtccctcctatgtatagacacatactctgagtagttattaattcccaacagaatttgtgtttctgggattattttactgaaaactagttgaaataataataataatcatttattcaaaacaaataaatactaataatagtgtaaaacagaatattttagtgtagcttgtgaagtatgaggacatacaataatctctatcttactttgaccaaacatagcacgtgtacgatattaatattgttatagatcccagtttgtaaagctgttgatgttatttacttggcccctttttctttcattttttcagtgagcagaagtgcattcgtagtcagaaatatgctgcagagaatggcctgccgatccttaataatgtgctaattccaaaaacaaagggtttctttacctgcttggaaggattaagaggatctattgatgcaggttttcatagctccttagagaatgttgctaactccatgcattgcatgttccttcttttatcatttgaacattttaaagaaacttattttgttgtccatatctccgaatttttttgagtcaattcccatgacctcttatactttcactacaatcaagtcatagctccctgattattttgctaaaccttttcagatttatgaagtcattttgagtttgtcatcaccacatcagtgcaggaacttgtaacttgtctcatgttttgatctaatatttagcttgtcttccataacataaggtaatatttatgtatttttattactgcagtttatgatatagctattgcatacaaacatgactgcccaacatttatggacaatgtctacggagtggctcctgacgaagttcatatccatgttcgacgcgtctctgttgacagtatcccaacttcagaaacgaggtcaatacatggttaatcaacacattccatctcaaggatcagttgctatctgattttcattctcaaggtcacttccccaatgaaggaacagaacaggatctctctactgcaaagtgcctaattaattttggggcggtagctgtcttgaccagcatatgtacgtactgtactttttactcctcaatctggtttaaactttatgcctctttagtatgtgcatatcttacatgtgctacctatttcaacattcgaccagtgcctattgttcacattgtgaaatatctttttaaaagcaaatcactttagctctctaatttctgtacctctcatgtgaaagcaagtttttaacacatcaaaaagaaaagagagaaggaaaactatggtcacagttttgtaaagaatttctgttgatgagggtaactttgttttgagaacgcttataacaagctcttgttggaatcagtttgttctggtggctggtcaagtcatttcaaaaataattactccagcaaatttattcaccactactacatctttatctcaccctgttccttcctcgttcccacttttgacaataggaaataggaaagaaaaaaaaatctatttacaacaccatcattggcaatgctgtcaaacaattagaaatttaacacaataatagcatgtttatatacagtattcgaaatcaaaataaatttaacgaaataaataaaaaataatcagaatcaatatt

SEQ ID NO: 377875 - DNA, 5746 bp, Cannabis indica
tttttttttcattttcattaaaactcattgaccattctttttttcttgaaacttgtaaatgattaaataaatatacattggtaatagtggtaagtaaccaactctaatatttggtagagaggaaaaaaaaggaatttaataattttgtatattatttttaattaaaaataaaaataattaagtcattttatttaaatgtataatataatagtaattgtttcttcattttttttgtctttcttcaattttaaaagaagaagaataaatagtgctgggatctaactttttttttcatccattttcacttttttttctttttctaattaaactatatgtatatattttacttaaaaaaagaaaatatatattttttcttcatttcttcgctattgtttactatttttttgctttcgaaaagaaattcaaaagttagaataaatttttagtttcaataaagagtgacactatttattcatgaaattttgaaaaataaattttcttgttaaattttgtttcctgtcagaaaaaaaaaataattggacatttttttttatatataaaatttcttaacatttcattttttagtgtgctaatcaactttctaatatgtatttttattttgcaagtttgcttaaattgttcagttcggctggatgtcttttttaggattatctacagtaattttgtctaaaattttcaggataacttaattttatataagttattttgtttttatagcgattcatattatcattttataattttttagttagacaattaatttcttggctgtctctcgatgtggacgtctatctttttatagttcacatcactctattaaaaaaaaaaaacataaagtaacaaaactaaaatagaacgataattgagtggtgattagtgaggtgtaagaaataaaagtaaagatttaacaaagtttggacttttttacttttgatttattttgtatgcatcaaatatgatatagtgtgtacatataatgtaattttgaaaaagacacattcatgaagttgcatggtacttaaaaataataataatttgagctttgtcgactgttctacttttttcaaaaaaattgatataaaatgattttgaaaagactaaactattaataaaaaaatacaaaaactttattcggtagaagaaaattgagtatttgggtagagcccaataatattttaactctttcaaaaaattatataaatataaaaataaagtagggaaaataattattaattccttcttattatctttttttctttagtccacttttacctttttttggttcaatggtcaaaaacacatttctatgggagctcatactatatgaatacccataaaaccattaaatggttagaaccttcaattagtcaacccaaatcaaaatttaatattaagacatttattatagtacttaacttagttttaatattatgaaatcatcataacttaatatagacatatggagttattttttattttcttacaaaataatatgaagttgaagtaaaattataacttgttgtaatatgaataattcctatataaacccatacaagttgagactataatttttttttaagaaaaaatttattccaatatgaaattacatatttacaacttgcaaagtgaagaaccaaatagtgcaaaactaaataagtaaacaaattaaagaattagataataaactaaatttaaaaagctcaagtaaaaacctaaggaaaaaaggacacaagaagtgtccaattattgagtacttttttcctttttcattactaattggtaacaggagtggcaggtggcaacactcttgggcttggaaggcccatcactcttgggcttggaaggcctgtcactcttgggcttggaaggcccatataagaaagccttggtgagactcgaatctttgggctgggccttggagaaggaataggaatactaccataaccaccatggttgacttttggggataagttgacttgttccaatgctcttgattgtagctcttgaggatagtccctaacacacccaatacgtggaccaaccccgcttgtccatttgcacgataaacgtttcgccatgtcaaacatcggcggaactccgctattgatggcattggttgttgttgcagcatccggttcttgctcgatgacaacagtactgttaacgacattaatatctaaagataccttgatttcttcagtcttagtctcttcttcgatactgacttctttgaatgaagttccgtcactactatctattgaatatctctgaaaaataattaacaataaaatattagtgaattttaattaattatttattaattaaaattaataaaattaattaattaattaccttgacattggtaaggtcaacttggtgttcttgaaggaacataatgaattctctaaagttgtcttctgttgggagatagtgaccactatatggccatatagcctttaaaatgaaatgaaaaagttagagcaaattttaaaaatttcaataatgatacaaaataattaatttaatttttaaccaacattatctttaattttgatattataacaattattttgtagatattaactcgaatttcgatcatcaacgaagattcaagacaaaaaatcctaaaaaagccgaattagtgcgactcgaatcttcaaaacactaatattttgaaaaattcaaattttcgataaaattatagcaattactatgtcggtatacagaagaactcaaacctcacataaactatgacaattgttacctaatcatttggaatgattcaaaccccaagacacaaatatccatgaaaattttgagtttagagggtttcgaagcatcgaacataaatttaagagagttaatttaggattattacctctagaacaccatgatgggcaactaatctaccagctgcagttgtagcagcaccagatagaaaacttgagtgttgaaaaacaccttttttcttttgaccaacatacaaatttcttgttgtgcttagcacaaatatccactttgacccttcaattgtgtttattagtaaaccactttgcttatgcacaagtttcccactttccacaatcacttcataggcctctctctccatctacattaacatcatagataaattaattatttctaacaaaacaaagacgggttagacttacgtttagggtccacccagcttagaagagaagaaagaaattatttttaaacaatacacaaaaaatttggtaatttttcaaaatagtcaaataccatatatttttatcacaaaggctcaatttttttccctaaagctcaaatgctctcaagctgacgttgggctaagacgggtcaggtctgtgtttagggcccaccaatcgcagagccataagaaagattctttttaaaaaatacacaatttttttagtaattttcaaagatactaaggcccaataattagtgtttttcctaaagctcaaacacattcaagcccgaccctgaaccaaagcagtatcaatactattcaatacgacagtataaacacgataccaaagcaaatccataaaatacccattaaagataattataacgaactcgattagattaacttaccggtccaagatatcttatgcattgttgttgtagaatagttcttggacacttctttacaatcaattcttttccatcaccaacatccaacctaagttaaatttacataatagaatacaattagttcaactatagtaattaataattaataatattcaaaaagacttgtttatatatttataaatatatacatataaatatataccagtaaaagaatggttgtgtgctcttgctatctgaccaaatatcatagtagaaatgaagattgtgtccgtaccgatgacgtggatcaatctataaaagaaaaaatcattacaaaatcaattcattattgaactgtgcagtctgtgctaaatattaataataataatgatgatgatgataaaaaatttgggaccccatatgagagagaaaagtcaagaactaacaatcaataattgatgtgataaaaaaaaataattgatgtgaacacctactactatttatatatatatatatgtgtgtgaagaaagaacttacagcttcaagccagtgttgtaaagctagtttttgagctttctcatctttagataagcctttcccaacctatacacaatgttataaaaagaataattcatataaacaattttgtccatttattttatcaataaataaattgcacgtattatagtaaagaaaaatgctaaaagacaccagtaatacatgtttggtttgatgtacttattagcaagaacatgtacaaaacatcattaagtaaagggtatgagtatatgtataaacctttgcagctctagtcctggctcgtgcccatctagaaatggctgtctctggtttctcaatgttgaaaaaagacactgaacttcttttaagtgctgcaaaatccaaagctttccacctacaaaaccacacaccaaacacaagcaactctagttagtttaaaaccaataaataatagtaataataagattaaacactattttcaacctctctatcttacaaaagttatcgattaaattcttaacatctattcttactagaaactagcttcaggttaacgaaaaaaacacaccaaacacaaatacttaaaccgaattggccaaattctttacatctattcgtactagaaactagcttacaaatactttaactagtgcttttttaaactctgttttacaaaaattatcgattagactttatttaaaggtactatgacaagtctcgtgaaactatttacatctattcgtgctaaaatttgatttcaggttgaaaaaaattaagacgacagagtgcaaaatagtatttacgaaagaaattaaagagttagagaaaagacaaaccagagttcttcaaccacaaccgcacaatcagcaagatttcttctagtcctataactcttgtaaactttttgaaccttagttgcagcagcatcaagctcactaactggtcttggacttgagaacacaaaatctgtctgttgtggcaccaaaatcttgggcttttcaatctgtttttgattggttttttcaatcaccaatctgtcaagtttatcaaccatttcaacctttgttttagttttgagacttggtgatctttctaagctcttctttctcattaaagtctctgaattttctttcactatgattgttccaaatgtgtctttcaaaccaaaaaactcattctttaagatttcactccatggtgatatcagtactgaaagggatagacccattaattaacctgttcataccaaaattatatatacatatatacagatgtatcagttttaagagcttagaatcacaaaagaacagaacaaaaacaacagtaagttcttttatgcatttttacaaacacaaagcaatcattacattattaaatcaagaaaattgcaaattaaaaaagcagaagctttaacttcaaaaaagatttcatagcacaaaattaacaaaaaataaaataaaacccatttacacaaataccaaaatcaagcaaaacccataaagaaaaatgaaaacttgattaaaaaaattattactcaccagaaaatatccaaactccaaaggtttgaactttgaagaactatactcctctcttaacaaaattagataaatagagagagagagagaga

SEQ ID NO: 377876 - DNA, 2016 bp, Cannabis indica
aattgttacgtagtaatttacataaacatttaacaatcagatatctacaaaagttctagaattataacttaaatattactgttaaaaattaaacttaaatatttatttacaactaaaatttaaatttaaatatttatgccgcaaccgagaatttttatttatttttttaaatcagctccaattatattattataaagctatttttttttacaactcaactccaaaaatttattatctcaaaaaaaaaaaaaccctcaacttaaaaattaatttcaacttgtatatatataacaatctcatatctttatcctgttgaaattgttgtatacaaagttatatatgacattaagattaataaggtttaattacaacttaaataacattttggtatataacaatttcacccaatcttattatcatgtaattaataattaaggataaagattattatataacaactcaaaaaaaaaaagacattatgtaatttaaaaaccttaaaataattattctacaaaaattatatttattcttaattatgcaaaaaaaattacaatttaactctcaatgcatggtaagatataataatagtgcatggacctaaatattaactatttattaacattcacacttttttttatacattaaatcacaccaaacacaatatttacttatttatcaaaacttggtttaataattaattctctaccacaaatcttcaaaaacaaaaatatttcatctctactaccttatttcttttcattttttaaatattctaatcctttactaccctttaatattagagtacaatatcgtcatttataagaacacgaattactacactcgtttgcgaattagtttttgagattgacccataaattttttttctcacttgaaaacaaaatagtataataaaagaaaaattgtgaaccattattgataatatttttttaaagttagtggtgaagaaaaaactcacgtgctcaatgtgctgagctaactacacctacctattcccattataaaatgaggccaagttctcagcaattagggcacaattttgttacttaacaaactcaaaattaagacttactattatggcatctttctcttacattggtttcttgggtcttatttttatgatatttgggttaataatggaaggcaccaatggtgccattatgtccaaaaagacccaaaatcttatcaacaaaatcaacaataaaggcccttatttgggtgtagtcataccaaatctctttgagcaaaaccctcttcttaattctcctgactacactgctattgacgttgttattgatatttctggtacatatatatacacttaatatatatgtgtgtacattttttactataattaaatatttatgtatggttttattgtttaatttaattagggaggagatttcgttttggaaaaattggtgaccaaaaagtggtttcagtcatgacaggattgggcatggtacacacatatatatatatataatataaaaattgttttaattattatatatattgagattattaaataattaaattgtttttgatgatgaatatatattaattagattaatgctggaataacaactcaacttttgttgagctttttcaacgtggaaggagttgtgcactatggtatagctggaaatgcaaacccttctctcaatattggagatgttgctattccacagtactgggctcatactgctctttggaattggcaggtccatccataaacataatatattatgatatttacacacaaaatatatattcaatatatatttattgggacacgattttgttaccgtgatgatatatgtattccgtggtacattagatgggtttcaggtagggacggacccattaagattgatgtgggggctatagccccacgaacaaaaatattgtttttcaaaaaattaaatataaattttttaatctaataattataggctaaaatagtagtaaagctcccacaaaattagatacatttag

SEQ ID NO: 377877 - DNA, 3898 bp, Cannabis indica
ccccaagtaaccaaatcaactcaacccatatgcagccaatagtgtcctatatttgcttttatagtgaaaacagaacaattgtaccaatttctacagaaagagccgaaagcatattttgttttattctcgaatttaatgcccatatccaaacaaagcaaaatcacgggctacacagttgtatgaggcagaaatattatatacaagaaagtgaaaaatcaatactaaacgacaaaccttgttccctatattaattgtaagaacattcaaaggtgcatatatactctacaataacgtgctcaatatgaaatacttactttggtgtcgcctagcctagttctgtaaatggaataataaaattataggaaaagtttctatctcatataaatatgtagcagttgaaagaacccaatataataataaaaacaagaatgttctagtcatattggtgcttcatggatatttagttttaaatgatattcattcttgctgagttgtaatttgtatttttgtcaataaatacttttaggagtaatagtattacaagtttcagttttaaaaatgaaattgctttttaaaattaaaaatggaaaactttagaaacaatacaataaaaaataaaagataattttttattattttaaaaaattaacggtatttaattaatatattttaaaaattatttttagatttttttacttaaagaaatacttcaatatctcatatcgcaccgtcacgacatgaatatggccacacccttaccttagtacacacttcgaaagtcgattatgaactgggacctcgtccctggacccagacccaaccctcgtctggacctcgacctcgacccaaaccccaatcggacctcaaatttgaacaccgaccctgaactcggacccaatctgatccccgaccttggccccctaggttgggacctttgtctctgaactgaataattgtcgtaagctagaaaaaaaaaaattattctttgatatgttatgaaagaaacttgacattacaatttcccctctttctcattatttattcggattaggatattgtggtttgtaacctggtaaatatgggtagtagaatcatctccttcaaacaattttagaaaattttggttttcttattatttaagcataacaataacaaaataactgtaatctaacatttcatcttgtatttggcataaatgaaagaaaagtcaaaagataaaaaaaaaattaaggtagaaatttagagtaatagaaaagagaatgtagtagaaaaagaatgtatcattttatcttgtttgaaaagaaaaaagaaaaaaagtgtaaatgtataattattctttttaaaatttgtgttctgcaaaagttattaattgaattctctgttttgttaaatgataaaataaattttatataatctaaacataagaccatgagctcaattttaaataattttattttttaatatatccaactttaagacaattacggaaaatgtaaccagttttgtcataatatctctacattagattattgttaatttttattttgaataaaaaatcagttcatggtcttatttatatgatttttaaaaatacagaatctattttgtcatttaactaaacagatggtctaattaataatttttttaaaatacagaatttaaaataatatttactaattacaattaatattttttatatatatatatttatatataataaatgcctattggatgaaatttgttgtgtttaacaaatttgttgtatattttatgtttattttgacagtttaaaactaacacggtcaattagtaattgtgtatattacaaatatttgttattattcaaaacagtgcaatattaatttattattattattattattaaggagactattctaaacaatgcaatatcaatttattattattattattattattattgttattattattattattattaataaagagatgtgttaacagagacacctattattcatccaacaaaataataagttcaaagataataaaaaaagaacaaccaaggacaaaacatagagaaactgttctcagaaccaacaagaaccagaaacatattaaaattactaacttaaaaattgcttgtgctgtatttatatatggtgggccatagtcctataaaacacaatcctaaaagagatttaactctaatatatgcaccaaaatggcacatttcttcatttagcaatgttgtctacttaattattttatctttttagttcccgaactttcatttagggatgttttactgggtataatttttattgcatgtggccaaaattaatgaagatcaaaaaaatttatcaattaattatatataaagaagccaaaaaattcatttatttttcattgatatactgatacccattaaaaaatgagaaaaaaatgtaagaatttagaataagttaaataaaatttcatctcaaaattaatttataataagaagagtaactcatttatcttatatatttactatcttttttacatattagcaatgttagactctgtaacattacttttcaagatggtaaaatatcataagcgactgatttttttggctcactatctttaatcacaagtggctcttttgctttactttttagattggtatttttggatatttggtggttctttttttttgctcactatatcaccgaatcacaagtggttttttttttggctcttttgttttacagctgttttgccatgattatttatttgtcgtcgatttaattatttgttctcaatctcaccggaattgatggttgttttccaattgttctgaatttcatgtagttgttccgtccgtgggtgtgaaagatagatgcttcattttatttttttggtttacagtataacagaaaaaaggggctaaaacagtataaaagttatttctgcgacaatatttttgtaataattaggtcaaaaaaaatttcctgtatattctattatattttcatatattagcaacgagtctctctaccccaccacagaatcaacaattaagagtttgaaatcgttaatataatttgggaataattagtttatctttcattatttttttatatttattaattattttatttcttttgaaattggttgattataacaaatttaaaaaatttaaatgaaaacaatcctaactaattatacataaattatttgtaaaaaaaatatgtgtatataaaacacatttattttcttttgaatgaaataatatatataaattatttttagttcttattaaaaatattaaatacgcgtatatagattatatatactgtatagtttttttatgatcaaaatttgtaaaatatctctattatattaaattaaatatactattccttttaaaaaaattaaatatacaattaatggttggaaattatttgaatcttacacttttatttaagctattttcattgattattacttttcaaattttaaagatttttttcctctgtaaaaatatcttatactgaatgttaaaaatctcactttatcatatatgtttaacttcttaaaatagaagacatccacacaattattaaagatatgatgaattcaaattatccaatacaactttttatattcttttctattaacaagacaactgaagtaacaccaaatcgcaaagagaatatatccacagagatattttttgaaatttgaatgaagcctaatcgtgtaaaaaaatttcaaaaattgagaattaagttaatcgtaaagattatttaattttttggtttaattattcagtttattttttgaaattttgaatgaagtcgtgtaaaaaaatttcaaaaattgtaggatttgtcagaaaatatgtgggtaagatgatttttttaatttaaaa

SEQ ID NO: 377878 - DNA, 3074 bp, Cannabis indica
ctctgatgttgtaactgattccaatttataatatcagtgaaatttctacaaaaaaaaaaagaatatcccttagatttgccatatttatctaaaagttacaaaaataccggcctaactcttaaaaaatattaacaccatatatatatatatatagttttatttttatttttttttatttaaaaaaaaaaaaaagaactacgtagcaaaagctcaagtctatccgaggatataaactgaccaccagcctcacatataagaaagtggtcccacccataactaccaaccaatcaaatactccaacgtgtttgttggtggaggtcggccccttatcctttgttttagttaacccgtgagttggctggctccctcacttcactcaactccacactcactctccaccaaaatgaaatccaatcttcttctcttccattttctggtggcacttctctgtgctaaggccgaacacggtggtgctgggagcagcatcatcttcactaccctcggccgattagactacgcctttgatattttcagcctcccgattaacgaggagcaccacccaccgaccttgttcgacgaaattcagatcactgatggagaatccgttaatttcaacggtcactttccttctccttcctcgactgcctcgcttctatctctcttacccaaccaaactctggtacagaccatttttggggtcgacccacctcctttgcaggtcgtttatgtcacggagcgagatggggtgtcgaatctttactacgatgttgtaatttctgatgatcctaattctgaaaacgccagaagaagaaggtcggccctcgaagttttcgatcgtgttcaagttcctatcttgggtaaaaagctggttagtgacaagatttctatgaaagataagcctaatttgataggtaatcatgtgatttatgtatcaactcatgagaacacaggtgagcccagaacgagttgggctgcagtgtactcaactgaattgaaatcaggcgtgactcggaggttaaccccctatggtgttgctgattttagccccgccgtgtcaccttccgggattaggacggcggtggcttcgtacggagcaaagggatgggatggtgaagttgaggagcttagtacggatatttatattttcttgactcgggatggaactcaacgagtcaagattgttgaacacggtggatggccaagttgggtagatgaatcgactttatactttcaccgaagaggtgaagatcagtggtggagtatttacagagctattttaccaagcaacggtaagatttctgttgactcggtggtgattgagcgagtcaccccacctggtctccacgcgttcacaccagctacttcaccggggaacaagaacttcatagccgttgctacaagaagacccacttcgagttttcgccatatagagctatatgacctgaagaagaacgagttcaaggagctgactcggttggtctcgccgcagtctcaccatctaaacccgttcatctcgcccgattcgacccgggtcgggtaccacaagtgcaggggagacggaaacggaagaaaaaactccaaactattcctcgaaaacgttcacagccccgtctccgacatctctctcttcagaatcgacggctccttcccttcagtctcaccgaaaaatgacgtaatcgctttcgttgaattcccaggcgtatacgccgtgaacctagacggttcaaaccggagaaaagtctataacggaaatgctttctcgaccgtctgggacccagttcgtaacggagtcatatacaccggtgccggaccagaatttgccccggtaagtgcagaggtcgatataatatccataaacatcgagaacccagatcatgtaatcgtaaagaaactgacaacaaacggtttaaacaacgctttcccttcaccgtcgcctgacgggaaacgtattgtattccggtcaggtaaaactggttacaagaacctatacataatggacgctgaggatggagagaagggtgggctccaaaggttaacggagggtccatggagtgacaccatgtgcagttggtctccagatggggagttgatcgcgttcgcttcggatcggcataatcccggtggcggtagcttcgagctgtatttgatccacccgaatggaaccgggttgagaaagttgattaaaagcgggtcgggtggtcgggttaaccacccggagttcagccctgatgggaagagcatagtttttacaacagactacgcgggtatatcagctgagccaatctcgaacacacatcactaccaaccctacggtgagatattcactgttaaattggacggttctgatttaaggagattgactcataattcttatgaagatggaactcctttttgggtccataaatccctaaggcctgttaatgtggagtggcccatagataggcctcgttgccaatttgaggatttgcattggctcaatgacatgcctgggcctagttttggtgttgggcttatggataaggctgagtgtggtatgaaattctagtgttttgtgtttcttgttatattatggaaaatgaggtacttttgtaaacattggaatattggtatgtagatggtgtttacttaatgtgctggaatttgcattggctgcttgttccatgtaaaatacaatagtaaaatcttgatgtagtagtcgtaattaataaacttcatattgtaataaaataattttgggataagttacttttatatgacctagaagcgattctattagagatagtaaattgaatgatgataacaactctataaaataaaccattttctcaaatcattcttgataaaaatattttagtttactttagagactttatttaacatcacacatgtttgtcaataagttcattttatcagttataattgttacttaaaataattaattaagtctatttagataaattaatcaaaaacaaagtgtgaactgtgaattatgaatctatgaattcaagatccaataagtttatcgtgaatttatcaactaaatttagggaaattaccacatatactgttttttt

SEQ ID NO: 377879 - DNA, 5458 bp, Cannabis indica
atataacaccaaaactaatatcctaatttcttgattaatttaaatttatttgaagatcgctattataataagttggccataataaaatgtttaacctatactaattgaggttatttgttagtctctttgcaaacatatgtatattgaaaatttgaaatgattattctaattaagtcagcaagcggtttcgaatttgtcctagccatatatataatcctgtctagctactgttctatcatatgcattttacgctcaaatttaagtatattttaaatttgttagttgttgtaaaaatttgttatgataaatatatatattgctcatgtcgcgcgtctaatttttttgtaataatttagaactgatttcattagatatgaaggtttttttttttttttttgttagttatattagtgtttataattagatgaggttgttttactaaatgatgaaagtgtaattgcacagattgtatattgataatgggagactatgtctagtataaaatggcttgttgtacttgttgttgatgatatatagtgagataggacatcctagaaatagagtatgtatttatagttaaatagtcaagtaagaggcttgtttaatactaatggcctttctagtttcacggtgcatatttcatccacttaaagtggtttatacagtaattaaggtcggtggcttcataccaaaccagcattgatttgtgattgatataatttattctaaattattcttttaagcatataactagaaatttctatgacaacaaagtttttagaaatttttaagaaattcatatatgtatatatatgtagcattctatatttttttaggctttgttttagggtatatagcattctacataccactaaattttttttacaaaagtaatgaaatatatagaaacttttgatactcgtccttattacacatttcagtaacctcaatcatgtcataaaatagtttgaacttttcttcgtgagagtacttttatgaatatgtctgttaattgttctttaatttatagtgtttgatttctatttctttctttgtttcctcttatataatgaaatgatacttgatttgcatatattattggttttgtataccgatttttttatcattgctatagttcattagttatcatagtagatctttgtagtttcttcttatgactctcccatgtctacaagaatttttttaagccatgtagtcaattgctattgcaatatattctacttttgttgatgtttgtgtcatagttacttgtttctttgatgcctaagagcatctctaatagtgtgctataaatatagtgtatatactttttttatctcatatttataaaattgaattctagtagcggtgtataatatggtccaaatttaacacatgctaaaaattatgtcaaattttatataaaatatggcatgtgctaaattttgtacaccaaaataatatcatttttttatttactcttttaccactgattaatataattaataactttatgtagttaatatagttttacatactttatcaataaacatttaataattttattgacttttttacaactttttatcaaaataaaatttattttacccctagtgtatttgagcataattataaaatttttgccaaatatagcaatgactcattgttaaactaaatttagcacaaaacttatacgattcattagagatgttataagaaaatattctagatctaattgtgaatgtatatactaatgtgttcttcatgtcatcaactgatcccgtccattcactattaatgtagccaattaatttgagcctagagtgtagtttgatttattccttgtaattatctaaagatttgcttggctgcttcgtagtgaacttgactaggatcgtgcataaatcttgatagcaggctcactacgtacattatatatggtcttgtagcggtaagatagagtaggcttccagttaaactttgaaattttgattcatcaaattttggttatccatcccccttcttgagtgctttgttgtaatggagttgagacatccttgattcctttcattttaaatttatccaagagcgattctgtatacttattttgtgagatgaagatcccatattctttttgagttgttttagtctcaagaaaatagtacattaatccaagatcgttcatctcaaaacttttcatcatattctctttaaattgcttgaccatcttctcattatttctcatgtagatgagatcaccaacatataaagagtaaatcagtttaccataatatcacgcgtaccttgtgtcttgatgtagagtgttggttcacttttgctcatgtcgaattcttgtttaaggaagtagctatcaattctgctatactaggattgtggagcttgttttaggccatataaagtctttcaatctgagaactttatattcttgtccttgcaccaaaaatccttgaggttgctccaagtatattacttattcgaggtagccattaagtgtacgttggacctcgttcttccactttattgggctgccacctcacttgcactcccacattagtatgatattgtgtgctttgggcctaagccctcaccaatttttttttggaaattttcccaaaaaccctcatactaatggagtactgcgagggatattatattcaaggcaaatcttgcctattctttcaatgtgggacttgggttgataccccaataatcctctccaccaaggaccacgtactcttggctttccctctagcaaaaccaccttgtgatgttgctatcaccaacaaaactcattgcctcaccatactttatcaggatgacttttaacacaaaccctaaacactgttctccatcttgtaccactgtaatcatcaacagaacacgctacaaatgtaacccacatagatcttcaatcacgaggtcatcacattgtgggcttttcttacactttacaaatgtaacccacttgcactcttaaacctttggctctgataccacttattaggccccattaatccaccttgttgggctgtcacctcacctggactcacacattagtatgatattatccgttttgggcctaagccctcacgaatttattttggacaccttcctgaaagatctcatacaaatagagtagatagaacattatattcaaggtaactcttgcctattctttcgatatgtgacttgggttgataccctaacattaagaaacaccgacttcacatcaagtttaaagattttccatttcttttgtgtgactgcagtagtcaaagttgtaactatgtcaaggcatgcaactgaagcaaatattttgttgtaaccaactctatattgttgtgagtatccttttacaactaatcttgctttattgtgcttttgaattaagtcgtatgtgttcagctttatcttaaagatcacttgactcttatagtgtctttgtcatgtggacgatcaacaagctccaagtaccattcttttcaatcatctttatctattcattcatgtcttgccaccacacttcttgcttttgtatattatttttggcttcataagcactaagttgcatgtcttgtagatctctcatagcgatctttcttgccttactagtgagtttggtggggattcaatggcttgtgctgaaccttgtgttagatattcaatttgatctatgtcttcattagtttcttttcttggtagtaaaggaatgttgacaatcttatttctttcaacttattgtctcatatacaacatctttgtccaatttgacatcacattgattataaggttagtattttctaagctatagactttataatcttttgattgagtactataacctaacaaaattcctttcctggtcttctttgcctctttcttcttttggaatgtggatgtagcatctgcaactgaagactttgagatgctttagtatggcttctatccattctaagctttgactagtgtcttatcttgtagagctttagttagacatctgttgagaaagtagactgcaatgcttattgcttctgcctaaaaaaaattgggagacccttctctaagggcatggctcttgctgtctccataacactcctatttaattttcttcttagatacattattttgtcctggtgtgtgtccaactatgagttgattgctcatcttcacataacttattgaattcattagaagtgtattatttgagtccatcacttttgattttcatgatgttatttgatttctgacatagattttgaatttactaaaaatatcaaagacttatgatttttgtcgtaaaaaaataaacctatgtaaggtcatcgatgaagagaatggattacatgttttgatgatcatttgatgtagtgagcattgacttgcaaacgtcgtatgaacaagctctagttgctttttggctctctaagctttgtcagatggaaagatttttcggtgttattttctgagcatgcacactttgcagacaatgttaattaccttgattgttagagtctcacagcatatttttctgtttgagcccatagaaatggaagtgaccgaaccttatatgccatagccacgactcatctgtttgcacttgcattgctatattgctagcatatctctattttatagaaaacatctattttctttcatttttctctttacagtttgaaatgatttatcttgtatgtcatagattgagtatgaatctttttcaaaatacaaagagtacaatttttcaattatttaacttacacttattaggttttgattgatgttgggtactaagtatatatcattgatgtatatcttgcttttttattgtaaatgacagtggtgtctttactaactgcttccatgaagccactattaaaaattttaacattagtcttgtatttgttaagcctacatgcatgcttttattttttgtcatacagttattgcaaccactattaagataccacgtatcttttacttcttttgatgtatcttcatagacatggaagagattactttcatcattttttttttcttctgaaaaattagcttgataagattttttttaatgacaagttttttcattgtgaccaaatttactacaatttttttacacttccgttttctttaaaactaacagtttttctccaagtgactcttttttttttttacaaatatcacatgaaggatatttgtcataatttttcttgtgtcttcttcctatcaatttttaatttttgagaccgcaaatttattttaggctgaaaggtattttcaattttatttttattatgtcttctctgcctacttttatgcgtttcaagagagctcatttgttccgctggtgatagagtttttaaacgttttgtttcttctatcataaaaattatttgaaaaaccgtgtttttgcaaatgtcagttgtatataagaaaatat

SEQ ID NO: 377880 - DNA, 4708 bp, Cannabis indica
tctagggatggagttcgagcagggtttgtattctaaggccgagattcgagtcttgggctaagatcgaggtcaatttattataaagatggtataattttatataatatattaatacaaattaatatcaaatatagtactgtattaaataatattaatacaatacaatacaacatggtataccaaacgaacccctaataacttaataaatgaagagaaaatatgctagggttgtttactaagtaaaaaaaaaggaacaaggggtcttatgaacaatgaactcagtggttgtcacttagatcggtagatgagggataggtaaggaatacacgaaggggtatagtttcaatatccattgaaaccatcagaatctttttatccgatcaaggatccaaattattttctccaagctttaaggaaatcctagtacagtaattgtagtggctagttcattctcttgttatctcccattatttatgttctgcaaaaaatcataagatcgatagaaagttttttaaaaaaaaaattaaaaaaaaaaaaaggaaaaaaatagggccctaccagttcgaccataagacctcccattggccccaagtttttttttttttctattttttgtctctggggattccaaccttggaacaaatgcctaccatcacttggcactttccactttccagcactagaccaccacttggggttcatggacggaatgatttggatagcttatgttaacaattcatgactaaatttattccatacaataaataaggtgatgattttaactagatcgaagccaataacgttgatcctaaactatacatgcatcttaggtggcctgttagtatgcaaaaacaatctataatgacgataataactgcaggacaaagtgaggttacagtggcaactaaaagactagggacaaaactatttacttgggggagaagtcagcctattttcttctgactcatgctttggggtagaatcgccacccatcaattcctgaaaaccttcaaccttcactggcggagccctcggcacacccatgttcctgcaaataaacagtattttgaaataagacaaatttatcacctaatgtagtagccagaaatgacattaaatgtactttagggcttcatactgtgtctgcatttggggaatctgcaatgaacccatcggtctaaattgagtactggattgaccatggacatttgacattgcgaaatttgacattgcagccatttgctgctgcctgaactgcatttgttgatttctattgttgaaattgttgaaggaattactatcaataggcaaatctgatgcagcttcaatcttgacctgtaccatgggccgatccttatccgcatccacacctgggcgaggagttgatggttgccgtcttcgcattctctctaactgctgctgctgcagctgttgttgatgctgctgctgctgcagctgttgttgttgctgttgctgtagctgttgttgctgctgctgcagctgttgttgttgttgctgctgctgcagctgttgttgctgctgctgctgaagctgttgttgttgctgttgctgaagctgcagctgttgctgctgcagctgtttttgctgcagctgctgttgctgcagctgatgttgctgctgttgataacccaagttttgggggaggaccatttgctgcatctggggattcatttgtctggacatctgtagtttcaccacaaaatgtaatgaaccacagttacaacaatttcataataaacagaagccaaattaatgtgtctacctaatactgttctagaaacaaaaaggcaggccatgagaagagtacaatgcaacagaacatgtattctaacatactgttcgaggggccaaagagctttgtggattcacgtcataactatgcccctacttaaatatctaaatcatcttgcttatgcatgaaacatgaataccaactcactaaaaaaataaaaacaacaggtaacaggttataaactaaatcatagtacatcaacatacttgctgttgtagtcgaagtgcagcctgagcttgaggcatcatctgtgacgggataccatgaacttgctgctgactttgttgaacagaagtcctagaaccatccttgacatgctcagcaagagatccaaaatcactagcagagagttaaacagagagaaataagatattctaggaaataaataaaaaggataggatccgaataaaaactgtatgatgttcacaatagaacataaatgaaaataaaacaatctgagcacctaaatccttaggcttaactgtaagatgttcacaataaaacataaatgaaaatataacagtagaacatatttgtgcagtggacatattactatcatacaagcccactgcacaaatatgtcctaaatagagctggcgtagttttaatagaatgaagacaaaatcacagttagactaatcacaacttgtaatcctccattcactacctcgcactttggcatagctttaagagcacaagtacataaacaataacaagaaacaattagatccacattttcagatctaaagaaccagaatgctaagaggtggacaggcacatagtacaacattaaatttgtatcactcttttaaaagttaaagaaaaaaatacaaataaaactaagatgactgctccagatccaaaaaaaaaaacaaattttgggaaaaaagtgtagcacatgacagagcaacaatacaaactcaccatctcacagtttgaaggaacatcttgagaatttcaacagctgagcactgttttctgtaactatcagcaagaactttcaagatcccacctagcttggagatgtgacagctcatcaactgagagaagacttcaatagaaacttcagtggaaccttcaaaccccatattttttaacatccgggacactacctgttgagacaattgtgatgcttgctcttggccaagacatttcttgtttactccagatccattttttccatgatatgaatttgctccatgttccacactgtcgtaaggattgataccaaacctctcaatcataacagggctcctagtcatagcccgaggcaaggtgtcaagaactccatagaactttattttatgtttctcatccactctacctgttgctgggagagcactatcaggaacactgttgaatgtaaacattatttcagggaaaaaagccaagtcttcatcatctgagttacttccatctgaaactgaacttggacgcgcatatgatgaattttctcctaccagattcccatagcctgtatactgatcttccttgaacgccatacaccttttcttatgcttctcaataaatttaagataagtatacatattgtcagatgtccgtttatctgattcttggtcacccagtgacaacctatagggtctgttaattctatagttctcaataaattgattgtaccatgtttcaggaagttcttcatgtctatgtctttgatgcatattatcattatcagattccccataccttgatccaattccaaacgcttttgattgtatctggataatttaaccaacaaaattactcaactcacattggcagaaatttaaagaagtaactaagtactacttaactagccgcactctcaactatgttctttaagtgtttattaacaaacgagaaaactaactaaatcaaaatcatagttaagcgaaaataagtccccaagagtattctatccaacaacagaaatagtttatgaataaaataaaaaataaataacccattttagagtgagttttcatcagttcaaattctcaatttgttacttttaaagagtaatggttaaagtaagtgccggaccttagaggtcgccaccccattgggaggaacagcagcgataccatctgaggaagaattctccagagtgaagtaaacgtcgtcaccatgtaactgcaaatctgcaacaacaaaaatcccatggatcaaaaaccctaatttttcaccacaaacagaaaaggataaatatactcacaagttggattgagcttcgaaatggcgagagacgaaggagaagaatcggaacggaggaagagggagatgctggctttatcgaagagaagggcacggacccttagttggagttggatctgagccctagacttggagtcgtcgactctcataaatgcttcccatgttgatggggaactgagaaaatggaagaagttggtgtagcaagagtcgccgagccatgaccgccataccccgcaagtctcaagcttcctagccagctcgtagccgcgaccatcgtcccccaagagagccatttttctattctattttggagggaagattagggacccaatgatgcgattttctgtgcatttaacttttgagttgattacttggattacaaacaaattcttcttctggtttttgttccataaattcatattttgtattctattttttttaacaattaacaaactttaattgaaaaaaataagaacatacaaaaaaaataatcttccattcaaactagtttagcattcactgtaatgtaagtgtctgtacaactaaatcatgagcatttatattgaccaaccgatgaacattaatcaaaaaaattttggacactaaactaaaaatataaagagaattaagattattagaaagagataatctcttaacaaacgtagaaattacagataagcaatc

SEQ ID NO: 377881 - DNA, 2006 bp, Cannabis indica
ttcaattcattttagtccataggatataaaatgtttgacttttagaaatcaatccaatgcataataatgtgttgaaggatgccacacctcataaagaagtgaggaattacataattttttttttttttacgtgaggaattacataatttgccttaatataaagtcataatattagaaaacacatgtgagaaataattaggaatgtggggaatttccctcaccagcctactattcttttaccaagtggtaaatgattgtgtgaaaaaaaaaaactttacaattattgcttttcacttcatttcaaagagaaaaaaaaacacacaataatatattgtgtttaataaaaaaatagtaatatattgtgaaaatttaatagtaatatttagtaaagaaaacttatgtaatatattgtgtaatgatacgagaaatcaaaattaaacttaacattcaaatattttaaaagcaattaattgttaagttttttttttccacactcatctaccacatgccaaaagaatagaaggtgagattggtgaggaaaattccccacattcctaatgacttttcacaagtgtgaatttaaaatgcatatgatcattgaaaattaattatgtgacgaaattaaaaaatttcaaatgaaaataaattaattatttatggatgagttaaatattcttgaaatatgattaataaattcaaggttaatttttttttcttttcaatttttcaaaaaagtctactgaaagacaaaaacaacaaaaaaaaaaaaaaaacgaagttgaaaatctgttaacaaataaaatgtgaacgacgcattaaacgacttgtaagtgtaaaatatctcaatcgggtacttcgaaaattgtcaagaacaagcagaggttggtgcgcatgccataatcagaataaaggcgggtaaaactgcaaaagtctttcctaaaagtatacgacaaacacttttagagggaaaatattatacctaattttcaagaattcagaaaaatcaactttaaaactttgaccaagaagcaagaagacgagacaaagattaaactcgaatgacgaaccaagtagcatcatgtttgagtgccacatggcgcagaaagggccgtatgcgaccactgccctaatggactgccaatggtggcatgtatagggttttgcccctaaatttgtctcatcggcattctgagaaagggtatttcactcttaaaccctaactcgagaagaactccaacgaggggtataaaatacttagcttgattggaataaaataatacaaaggataagatgacgtcatccaatgcaagaggaaagagtcatacacaaccacgaacactcccctagtgttagtagtcgcatatcaaagagggatttaaagggattaaaagggaaatagcacttgaaggaatgtatctcacacatgcaccaaagacttaaaccataaagtccatggtagcacaagaagaggcaaataagtgatacatgaccactaacactcccgtattgtcagtggttgcatgagaataccaaaagtatagtgacacataaccattgacacttcccaggttttattagtcgcccaaatgaaggaatgagggaatcaagcaatcaatgaatccttccaatgtcaatggtcacataacaagtatataactcacgtaaaaatgtcccctagtcgggtctggtctgcattggactgagatttctctcgtttgaatcttttctcgtttgtgcgtgcgagtcctagggtgtttttcaactattttttatagagtttaccatcaagttctgtgtaatcttgttgtagctactatggagaaagaggctcaagtttctctagatgtgcctcttgatgttgaggataaagctagtgagaaattacttgaaagagacagtgcaatggagatggaaatgttagagctgtttgaagatattacacttgatgtgacagtcagtagtcctgtgatccgtaagggaaaacaccgggtaagctgtgcaatccc

SEQ ID NO: 377882 - DNA, 5346 bp, Cannabis indica
gctcttgaccaagcattgctagctgatccttcccaatcactgtctcacaacacccttcactttgtccgagactactatttttactcctcactaacccattgtcactacacaacaatggatcaagtaatccattttcatgattactagcctcacgagttaggagttccttatgaagctcaagatcatcaacatcaacaagaatgaagcccgagccatcaaggcggaaactcgaatggattgttcgtttaaaccaatctcgagcataggcaataccggggatacaaagagggaagatgaggaggacaattgcgccaccgaagaggagacgagcagaggaagcatcatgagtggttgttgaaccaaagaggaggaggtaaacgccagttagaacagctaagacattcaaaaggagaaaaatgaccgagtcacggcggaccgcttcaggcgggagaggatccagggaaggttggcggacgattgggatgagagcagcaaaagaggtgataagagggatgatggcattgagaatgaggtacagaggacttgaagaagggttgatggctttggcagcaagagtgtacaaggccgcactcacgccattgaagcttacggttagcgatattgcaagaggttggttcgatggaaaatttctaatgcatagaacgaagcacactgtgttgaaccagcatatgctacaaccggccatcagacaaagaaggaacacctgaaaattgttgtcaaacactgctcaacattaatctagctggtttagaaaggttcataattgataatagtactagtataattctaatttacactaccttacataagtgggaaaaatattaaattcatattgttctgtgctgaagtgaaagttgtccattgtttcatatataacagagaaagaggtctcataaattttcatatatgactgttatgtttgtgttgtgtgtgcatattaatataccattaccatcctttagttatgcttatcatcaattactagtttatattgtgttaatcacattttcttgagaaaagatatatgtatatatatagtaagagtggttaatttggatttttgctattgaatttttacatgatgtctcttatattaaaaatttaattaaagtcttttgtccaattttactaaacaaaatttgaggtagataaaaatttaaggggtacaatataacacatgttaaaatttcatggcataatttagtaaatattaatattcgggagcaaaatttagtatatagaaaatcgctataataataaaattgatgaaattaaataaaagttcttaaatttaacaatcttaatatttcaaagaaaatttttaactgaaaattcaaaaaatataatttagtgcatttatttaactcttagtattgatgtaaatacaaatagtattactatttggtatttaagatgctaatattatattgatataatatctaataattagttagagattttttattgcatagttcaagtgtacttggcacattaacctttagaatttcccacacatattttttactcaaggatttgaaaaaaaagtataagtacaagtgtacaaatagaagaattatttgattgcttcaccaaaaggagaaactcaatctgaatcttttgttttggcccattatattgatgacatattgacatgcatatgcatgatagttgttagtttgccttttatttaaataatttcattaaagaccggagcagggccctactactttactggttacacttggttgtttctcattgaaagaggaagttgtggttgcaagaaaaactcagctttattgggtaaatttcttattttgttttgaagtataatagtaccacaatcaaaaggaaataacgttcctaactacaaaaagaaacaaataaaaacatattctatacatataaataataaaaaaatatagtaaataaaacatcttaacactagatagaagctaagattgaacaaattaatagaaacaaacagaagaaatgaagttaccaagaaaacaagtattttttttattattatttttaaaaagaaacatgtatattaccgtggtacgtaaatgaaagaggcacgtggttgctgagaaatttcttctacccaaccttatttcacgtgcaaacatgcttcctttattttgtttgtatttgaacattttatgtcattattttatttaatttattcttagatacataataagaacatttttcgtctgaatattataataagaacatttaacaataataatgcatgagaattttttgttctatttgacgttcaagactattacaaaagttggaaaactatacttctgttagatttaatatttaagccttttaaaaaaaaaaaaaaaaaaattaaatatataacgaaataatgtctacagatttgtaaattaccactttgaaactgcttttcatttttactctatttgcacggtaatattttcaataatacccagcatcaaactagtttcatttttcttgcaaatattaataacattaatattatgtaagtcagactctatgatataccatttatttggctaattatctagatgggtaagtgggtaagatgaataatttattataattgtactttattattttataaattggactgacgtatattacagtcaaataataattcatttataagtagttgtttgatttaattcttctctttataattctatcagtagccagaccattcatcgctgaattaaatgctaagaatcgaccatgatagatccaatacgatcccagaatcagaatttgataataaaaactctatcactcactatttcacaagtaggttttttttttcagagatatatgccataaatagtgagttcattaacgaaaatagtcgacattttttttagtagtcgtcaccatgattaatctaaactctaaagataaaatgaagcacaaagtattaataatattaaaatttatcttataataatggactttataatcagtaaatttattaattcaaaataaataataaataaaaataatcagtaaatttacaatattaaccttaaaaataaaagtgcataaaaacatgcctatatacttatatatatatttttgaaagcaataacatatatcatttatgtccacatgctatttattgtaaattatttaggctataaaaaataaataaaaaagtatataaatgtgggtcactttcgctgaaaaagagttctatttataaaaaccggtactgatggaatagagggagacaaagacagcaacaatgggcccaaacctaaaggctaaagctttggggagtcgtgttttcatgaaggccctagaattagaaatggtacttgtaaatcttcgtcgacgtgtgtggttagcgaattttttaaacgttagcagtaaatgagaatttttcatttaattttaaaatccaactcaattatctctttgcacaaatttgtagttcaagtatatacacctactttattatccttttttttaatattagcagttgaggttcaaaattggaacctgttttccaaagagaataatattactatacttacgacaataaagaattttattttagttggatttaaatgaaaacatagaatctgtcaataattcatataaagcatcagcgatactatcagcggattcacataaaggcgagcaaggatatttgtctaaattaaaaaaaaaatatgtatacatttataataaaaagttaatatttataaaaatagtgttaatttttatgtaataattaagcgataccctcatgatttacaacccaaagccaatacaaaaagaaattctttaagaaaaattattaaaaaaggaaagaaagaaagattttttcctaaaaaaaaaaaatagaaagaaagaaagaaagaaatgccagcaaaagaaaaaagccccttggccaaaattcttttcctctttaaaatatcagatgacactctttctttagaaaatagaaagtactctgattaaaattaaagaaaaataaataaataaataagcaatgacattgttagtgttactgccaaacacacaaaatgttgaacaaggaatttttttttataaaaaaaaaacatttttgatttggtaagtttaaaacttttttatgtgtaaaactgcagaatgtcatctctgtctgtgtgacttttgtcttttctattaatgacaagtaaataacacgagagttcatgaccaaacaaaatcaccaatttagtatagactataattaatttattagttaaacattaaataaaaaaagaaaagaaggaggacatattagttagaaatcataccaggaaataaggaagagttatgagttgcgtaatgacaagccactgaagcccatacccaatgaaacccataaaagcagagataaagagaacaacagacaaggggagatacatcaaggccaacccagacgaccacccaaataccttccccatatccgaagcaacagccagataattcagctgcacctgagaaatccccagaaccgatttcaacaccgaagagtaagccgagaaatcgaagttcgttcctgtgaacgcctgaatccatattgtcgccactagaatcatccattttcgagactgaccagccataataataatggttataattaattatatgccttttgatagaaatgcccaccacccactccggccgtacgagaaaagttgaagattacgctggtttcttgatttttattttttatttttttggcagtgtttcttgattttgcgtatttcgacggagtctctcttcggagcttcctttataagacgttcaagtgagtcgtgatagggtcccatgctcctctcaataatgacaactgacattaacatttacttggcatttagcctccctttctatgggtttttctttttctttttttggtccactaatattttttattttattttaattggaatattattttatttgccacattgaatttgttgttgaaatcccatcaatgaaagaggatgtatgaaggttcacgtggcggcatgtggtaggaagaagatccatatgacaggtggcagtggcaggcaatgaaaatttaaaagcattaccaatggttaatgatattttataatggaaatttcactatttgaccctaataaaataccccatatcaaaatttataccctccactaatttgtacaaaacaattccactattactcatttctacccaaaatacccctcaaatttaattttcctattctctctctctctttccgtctttccctctctttccctctctctctctctctgtcgttccccctctctctctgtcgttccc

SEQ ID NO: 377883 - DNA, 3089 bp, Cannabis indica
atcatcatcaccaccaggtgtaggtgtagatctcaatacactaagatatcttgagtatctcttggtttacactctcttttagcaaattttaagactggtgttgatgatgagactgagtccattttctgaatccaataggaagttataaaaagtcctgaaaaatgatcacaaggaaacaattaaggccatgtcatataatgctcatacaaaatgattcacatttatattctcaattcaactacttaaacatagtatgggaaagaaaatctaagcaaatttcagtaccactccattgctgttggcgtatataacatcttcaagttcaccccatgaatcagttgcttcctcatactgaccctgctgaatttgttgcctaatcttctcagccaaactgttttgtgaaatggggtttttgttagattacagacaatttaactttccaaaattaaaatttatgtacaagagaaaacagaagaagcaaaatgaaaaaagaacctttgtgcttgcttcaatccattgtcatcaagtcttgagacatctttgagaagaggaccccatgaaaactgtagtttttaacagatcacaacattgaaaggacttgataaaatatttccatagttgtagaataaaaaagaaattgaaaattcagaataaagctttaccacaaaatcttcaggagatatccaagtgtctcctaatgcaactcctgcatattgaatttgaagccatacataaatatatatatatagatatatgtatattaattcttggtaaagattggttatgagaattgagttttacctccaagtttaagtttcaatttcccagcttcaatagcttttagagctgataaagcaagagtaacagcaaatttgcctccataagactgagcaacaatgaaaagaggactcttttgaagtttctcatctccattaaagagcttctccaacaatgtggtcagatcatctgctgcttctaaatcacttttcacaaacaactttgtgtcctccacaaaactgtaacctgttccaactggattgtcctaaatttcacaacacagaagaaaaatcataagaatcaaaattcacatttcaatactagttttccatagtagattgaatagattaaaaccaataattccccacttacaacaaacaagagatctgctttttgtaaccaagttaaattccttggcttcaagcctgtgtctaatggtccaacctcttcaaaattcccaattccaactcctgaagctcccttttgttttctcaagaaaaacaaagaaacagattcatatcccttctataatatgggtactcaaaactaaagcatccaatgaaactcttttctcgagaaagtaactgatatggcttagagaaagatattataaatgaagcatttaatacacacaaacatatatacaaacacaacactgtcatacacaccatatatatttgctaaaagggtcatgaatattataatacttacaaacacattactcactatgatcctaattttgacaagtgtaactatctaaacaatacttatttttacataataattagttataatattataatactattacaattatgccactctacacaaacgtacacacaaattattctaactttttctttaagagttattaaacttacaggtcctccttgaagccagagtacaataggccaaggcttagagggatcttcaactctataaggactcttgtaaagccaccagaacatgtgggcttctgagaaattaacaaacaatattcacttctcaaaataaaaaaaataaaaaaaaaataaatcctttttttttcttacccagaaaagaaaaatgaagaaaatttgaaaaatgtaaacaactttggaagaatggcttactgggtctgacttcgacataaccccattcctcagacccatcttgggttcttgttggaatctttcttcctccatgaatgagtggaagaaaacagagactaaacatcactacaaaggctaacaacttcgccattttcaacccaaaaaagatgagaaaaccagagaatgagaaccacttatacctctctataccaatatatatttatatacatatgtgtatatgtgcttatattatgtgactgaagctcccaaaaggattaaaacttctctttatagtaatacagtacggtacggggaaggaacattaaaatattttatatattaattttggctgacggcaattattgattttggccccgttaactctttttttttcccgttaactctgttatttccttagtctttaaaaaaaaaaaaatagagttgagagggaatcaggagaaatgacaacacaattaatttcgattccctatcgacttctctcatttcacttgtataaaacatagttcgccatttataatattgggcagtttctgaatttaaatgcaaataaagaatgtcgattcccttcttctagccctaatcaatgaggcaataccggtaaaaaaacatagttgatgcagtgtgatctaaagatggaccataatcagtaatcaacaagaggttctgccatttttgaaaatcggtaagttttgtctctttattctcttaacttatagcaatcatttattttattgtaccttagagtaatccttactccagataactcaatcgaaatcttaatttgaggcatttgaatttaaattgaattgagaaacttcatccaaaacatcgaagaagaattaatgcaataaccgaaaattaaatattttttcagttaaataattattttttacattttacaatatttttttaaattttagtttataatttttcttgattacaattttaaggtatattaataaaactagtaaaaagttacgtgcgaggcacgtatactaaattgtatgctacgttttttctacgttattaaaaaatgatacaattaaaaataaaaaaaaaaatattattagttattagattcaacatcattaccctgtgttcatttttaaggaaaaaaaatatttatgaaataataatttgttgcaacgcgagtacaggaaaaattcagaaaatatagcatttattagtagagtattgaca

SEQ ID NO: 377884 - DNA, 4400 bp, Cannabis indica
ttttttttggatcgaattcgacccaatttggtttcaatatattctaaaaaaaatcccattctgctgttgagtcaaatccctaatccaaagcaacgatctcagtatccatagcagagttccaacgaggatcgatactagcttcttggaaacttgagggttcaacgggagtacctgaaataacaccataaaacacacggggctttcttatgcccgatttagctctagtaatcatgggatgcacattagtggaggcaatagtagtctcatgaggattatgcaagtttaccattaaaggatcaatgtggtgagatgaagaggatggggctgatgtagaagatgccgtggtaggagtaggtgatatgggaataatgggagatgatagtgatggagaaggatgggataaagcaggttgaggagacactggagaaagagatgagggtggtgattgtggttgaggaacaagtggaggagtacgtatggaggaggaggcagagaaaggtaaagcagtaagtattgtttgttgtttgttaggaggtagagaggggagtgaagagtaggcgaaaggaaaagaagattcattgaagataacatgacgagtgataaagatgcgacttgaggtagagtgaaggcacaaataccctttatgtttgctgctgtaccctaagaatgtgcaaggagatgaacgaaactcaagtttgtgactgttgtaaggacgaagaaaggggaaacactggcagccaaagactcgaaaaagagagtaattaggaggtttgtgatagagtagttggtaggggctggaattgtgaagggtacgggtgggaagacggttgattaaataaaccgccgtggagaaggcataaggccaatattctaaaggcatatgggcatgtgccaagagagtgagaccagtttccactacatggcaatttttacgttcgacccgaccattttgttggggagtgtggggacaggatagatcatgtcgaatgccatgttgagtaaaatattttgagagagatcgatattctcctccccaatcggtacgaacaaattgtattttaccgttaaattgagtggaaactaaattctgaaaaataaggaaagtattgaaagcttcatcttttgtgttgagtagatagaaccaagaaaagcgggtaaaatcatcaataaagagcaaaaaatatttaacaccagtaattgcagtaatcggggcaagtccccatgtatcagaatgtattaattcaaagggtttggaagcccgtgatacagagtttggaaaaacaagatgatgagattttcctaattgacaagcggtacaaaacgatagacaatctcttttcagaaatgaaaaattacaaacaaaagaaacacgagaaataacatcttgagtgggatgacctagacgagagtgccatagatcaacagaggacttggatgagaagagcagctgaggtgaagcagaggagtgcgaactgctggaaggaggtgtgactcgatagagaccttgatcaagaaggcctttgaggaggatttgatggttgtcctgatttttaacatagagaaaatatggatgaaattcaacatatgcattattatcaagacataactatgttacactgagaagatttttagaaatggttggagaatggtaaacctgacataatttaagaagaggaacagtagatgatggtaaaaaggcattacccacatgagaaataggagcgagcttaccattgcccacagtaatgtgatcctggccatgatagggagttgccgattccaacaaattcagatcgggagtaaagtgatgagatgctccggagtccatgtaccaagcaggatcattaatgggtgaagaagaggaggggttgggtaacaggggaggagtagaagtaggttgttgttgtgtgaaataggcattaaagggacggggggatgatggaattggttggtattggagattagttcgatgatagcaatatgcagctgtatggccaactttaaagcaaatttggcatttgaattttcgattgtttgggcgaggagaagaaggaagccatggagcaggggcacggggtgaagaattgtaatgaggtcgaggttgatggaattggggattagatggtggtcgaggtgggttgtggtgagggtatcggggaggtatttgggatggtggtgaaggggtttttgggcgttgtttgagataagataggttggctatattggcttgaagggagctgatggaagcggctgtcgtatgtcgatccaagcgagcttcgtaacagagtaaaagagcatgaacttcctccactgctggcttgattggtctggctaatattggggtgacaaaagcattgtattctggccccaatccatttagtaagtatccagatggtcttgagaagaaatcggctcacccacagaagcaagtgtgatgcagagtgagttgagtttctgcaagtatgctgatgccgagagtccttctttcttcaaattttgcagtgttgttcgaacgttggagcttcgtgcaaatgaggcagcggtgtaggttcgttcaagtgagacccagatttcggtagccatattaaaactcacaatttgcccaagcatagaatcagaaatagaggcgtatagccagctcatgagaagacggttgaagcgatgccaagctgtgaagtttgggttcgtctgtgtggtgtttgaatcaatgaactgtggtggacaaaccaccgtgccatcaatgtatccttcaaggccattagcaataattatattctgcatttgcattctccatactagatagttggaatcatcaagcttcacagaaatggttggatttagagatggtattgttggatgtagaggagttgagagagaagaagaagttgcaggggtgagattagggttaagggcggcggctgttgtggggtttgcttggttaatgatattagggttttgtgtgttttcatcctctcttggtagggtagagtttgtactcactagtgatgccatgggagccaaatcggctctgataccatgtacgaaggatagggtaaaagtgttttctattccttaaagagaagttatacaaattacaatgtatatttatactgccctttgggaaagtaaagaaaaaggatataggacacatgtcctgaatatagaagaccacaaacaaacactaaaataaagaaaatacattaagaaaataatcactgtttaacacaagctaaatgcttgagttcgattgaaaagatgttgctcaagattcgaacttggagttcaaggcatatttcatttgcagggagaactacactcatcaactctgttttaatagcaattcattcctactgggcactaattgtgatattagtgcagggccttcctttggaaaggcacaactgaatataatggaccaggttatataacttggtttggattatgtaaggttcaaaagcaagggcgattgggatgtagaaatctgttactatggaacaaagcagctgttggtaaatacacttgggcagtagccacaaagcaagataacatgtgggtcaaatgggtttatagtgtatacataaaaggaagcaattggtgggattataagagtttcacccaaaacagcaagtactggcggcaaattatgcatattaaagaagagattaaacgaagaatcaacatgcaacaatttatactacaaaggtaattaattcaacaaggatactctctgattgttccgaaatatgaatttcaaaaagttaggatggcaaggtttgggaaagatttttgattcccaaacatcgattctttaattggcttgctactcttaatcagctacaaacaaaggataggttatctcatttcaacatagtcacagatgggaggtgcttgatttgtgatcaaggggatgaaagcaacttacacctattctttgactcccatttcagtaggaaatgccttgaagccactgtaaactggcttggatggagaattacaagaactcctttagtttaactcctgagagtactcaaaaagagcaaagaagtctagatttcaacagcaggtctgtgctacagctcttgctgctacagtttaccacatcagaagaagtagaaacgatgtactttggtgccaaaagttaagcacaattcagtcagtaatcttgtagattcaacaggatgtaaagatgagaattacagcgattttgccaaaaaagataaggggaatcgacattgaatggtttgatcaattgtaattaatatgtgtaaaaattacatattcaggcttttaaaaataaaagtggtatttgcttttaaagttttgaaagtttgaagcaatacaactttctgaaaaaaaaagaaacatctatatatatatatatatatatatatatatatata

SEQ ID NO: 377885 - DNA, 2412 bp, Cannabis indica
gtattatcttgttgtgagtgctctaacactatgatttggcttttgtgtcattttctttttagttgctctttttattcgacgtcctttacttttttgaataatagaaaaaatgttgtcattctagtgttttttcaattcaataataattaatgaatttaatattttgaattttactctaaaatgtttgccatgtagttgtaggcttgtaccaaaactcataatatataacttgacaataatatacaaaagtaataatacattattattattattattttaaaaaaatgtatggtagataattaataattaatcttgcaaaaatatccctaaaatcaaaagctaatagatagagattagattcctgtgaattaaaaagcaaaacttctttacagaacaaaaaaaaaaaaaaaaaaaaacaaaatcttagtattattacttactttaatcaacccaaaatattcattaatttaacaataataataataataataatatacttaaatccacaaacagtgaaatcgttcatttcacaagatcagagttttaatatgtaaaaaaaaaaaggaaaatagaaatagcgaataaattaagagttgagagttggagtggttgagttgacctaatttaaagctttttatccagtatagatgtgaacatcaatggcgattaggaagatagtgagaagaccaaagaagatgatggagtggacgaatatggaggcaccacttgtctgcatgttcccaaactcaacaactctccctttcgctggaatctgaaacaacaatcccgggcttaacagcacgaacagaaccaccgctatcatcactggaccccaatccgccattgatgaagaactctgctactttctacagagaaaatatatgaagaagaagaaggtgatgaaaatttgtttaattgtgaaattgtgagagaaaaaaaatgggtttggggaacacaaaaggacaatgaggcattaaaatcgatgcctatcgctcgtgatgggtgaaacgtacattgatttgtacacgtgtcaacatcatgtggctcacgttcgacggctgtgatcttcttgagatgtgattaattacgatattgagattgatgttttcagatttacattttatttttgactaattagtatttttgtctttgaactttgacatgcattaaattatgtccctaattttaaggtcgttaaaaatgtctcctgaactattagatttaaggacttttttctaattttaataaaaaagtctaacatgcatgaaaattcagagggcatgatttagcacatgtcaaagttcgagagttacgatttggtagatatcaaagtctgtggagcatggtttagtatataaacaacactgaaatagtaaaattgaatgaaatttgacaaaagtccttaaatccaacgatctcaatagttcaggggtatttttaacgaccttaaaaattcagggagcatgatttggtacatgtcaaagttcaggggacaaaaatcctaattagcctttattttttaaaagtagtaattacaatctcttaattaacttgtatgtctaaaaaataaaaatatatccattaatttttttaacaacaatatttgttataattatagtattatttttataaattgttgaataatttatgttatcgaaaattattttgaagccttttaaatatgtgtaataagttagaatattataaatttgtcgatatggtatactgtagaatttattttgaaaattttttaaaggtttgatattataactataatgagcataagcattataaaaatatttcaatatgtattttcgagcgcggagattgaataagagattaaaatagaaggttgacggtagttattttttttttaatttttttaattaggatattttttccgtatttcgaagtgtaactttcaggccgttaaaaattcatccaaactactaaaattgttcgattcaaagatctaattctgtacaaatttattaacggacaccacggacacctaacgtggaaattatccatgtatcaaatcgtgctctcgaactttcgttcatgtaaggtttttgttagtaaaattgaatgaaaatttttaaatcaaataattttatacatttaagagaaattattaatggtcttaaaaaaaattaatagtaccaattagtacatgtgaaagtttgggaagaaatttatttagcatattttgatttttgttttgtatatattgattattttgataatggactaaaaataaaaatatcattatttgacgtatattatatagagtggtcattttagttgtttacggttccatacattagaatagaatagagatgagtcatcccttcttattttgtgttactcgtgggcttgttttaggcctttttttatgtaataaatacaatc

SEQ ID NO: 377886 - DNA, 10073 bp, Cannabis indica
ctactttttgtttttaacattttcatttgttactttaagctatcaataatgtgagtcatacgttgttggaacttggaagcaagcaatacttgtgaaagtgttgttaaagttggtttgaatgctcacatttagctttaggctcactgtaaaaggtccatacttggtggtttagaagatgatatattttccatactattggtatgctgatggaactgaaaaattattgacattagctttctgtctctgtttacttcttgcacagggaactgtgcttgctggaagaagtgttgtggatgaatccatgcttacaggagaatcacttcctgtatttaaggaagaaggtctttctgtatctgctggaaccataaactgggtatgattatgttgccttgatcctggagagtgaaatataattttgacaagttgttttatgtctgattttctttcttcctaatttaatcaaaaaaaaattgatatagtccataagttcttcaatttgaaaacagtgatggtcattcaaattttggttttgttgtgagccatctaaaatagtaggattgctcaaaattgtactgtggtgtgttattttctttgctagttttttggagaggctagtctacattcaaattccatcaaggaagagtttttttttgtatcttaatcttaccccataaattgattaataaatttttgccatttttaaagtttggaaattgtttatgaattccaggatggtcctttaagaattgaagcaacctcaactggaaccaactcaacgatatccaagattgttcgcatggtaagtgatctactttcattaatgatataaaagtctaatgtatatgcataattgcatatatgataaaaatgaagctacattttcctgatcatctttggtgacttttctgagtctatgcaagctaataatgagtattctgtctaaagaattcagagatttcttgctaaagaattcacaatttttttcctttctaaattaccataccactcttaaacatactaagcgagtacaacatgctgaggttagcacttagcatgccagattttgtcccattattgtgccttggtgatgcttgcaagcacaaactgaggttagcatattccgttttatcccattatgccttcgcgccgatgcatatttctttatttaaggggcagtgattaaaaagagagaggctcgagtgggattcatgattacccatctttcgatttaagaggtgcatggaggaacaagaagaaggtacccatggctgccaccccatttctagttttactttgttcaaacctaaaaggcaggcttgtttggcgtctgggaaaattcttctacctcttttcttcactcttcttttttcaagacgggttttcaccactgtgatggtcctatatctatacacttgatatgagcccttaccggcttaactctttggtttttaattttgtatctttatatttttgcacttgttgattttgaatggcgaggaaataaatttcttgttttctcacccaatcaacagtgctgatattaaatgtcttgtttctacctttttgtaaatatttacaaagaggatttgagatcaggcagcggccagacaaccgtagcgatgacttccacagattaagggctaattttatccctttgtctactaaaagcatctcacattttttttttaatcaatgttcatatttacataaataatgtaagtcctaaccgaaccaatggttattcatcatcattaatattaaaaaaaaaaaatattaatctatttttctcatgaaaattgatatccaccattttttaatgtgtctaagcactgtgcaaaatctcatggataaattcaaagtttcatatatggtgtttgtgcacttggtggatggcatgagcatgcccacgtgtgtgtggttacctttgcactatgggtgtcaatttttgttttccttttggttttgtatacatcctatatggatttaaaaaccattatttatcatttgaaataagtttgattttccattacttgtgcacctggtagatggcatgagcatgtccatgtgtgtgggcacaagtgcaccatgagtgtgatttttttttttggggggaggggggtgagggggaaggttcttttggttttgaatgttgatccgcatacatcctatatagatttacaaactattccttgccgtttgaaataagtttgatttttttgcttgtggacttggtggatgccatgagcatgcacatgtgtgtcattggcaaatcacctatgaaaatgattaattatgcaagagtcgaatagtttggcaatgctgttgcttgtaccgtgtgtcattgctcagcattttaattttcaggttgaagatgctcaaggccatgaagcaccaatacaacggttggctgataaaatagctgggccatttgtatacagtgtaatgactttgtcagccgcaacatttgcattttggtaggtcttcattttattttccatgttctatctagcagtttcgtgttcatatcttagaaagaaaagtagtttccattcaaaacttatgaattattataaataattataatttttaatgtcaatatgctctttgattctgaatgggagacatggatcatggggtataaattttcttctttgagatctgaagctttagttgctaaggaaaagaagtaactttacaatgtaatttgtatatccaagggaaaaaaacaagaagatgatctatggttccccttttgttcttccaatcctcttgttgagctttgtatctgtgtcttaggtactatattggaagtcaagcattcccagatgttttgctcaacgatattgctggaccagatggtgatccattgcttttgagcatgaaacttgcagtggatgttttggtaagtagaagttacttttctccttctcactgtgtgatctgagttgcattttatcaagccactctgtaggttttgttgaagggtagtctgattccgagaattatattgacttttagtggcacatatttgaggtagggttagatctaatacgtcaacaatgactattttttggaccttggtaaatgatggcaaggaagaccaaagagcatgtattaaccttgtagaaatgtagatctcaggagttaggttccctctttaggggttggtgtcgtattcataaatagccctccaagggtttctagaggtatatttctaatgtttttgaagaagcaacctcaatttatagaatgggctagggtagaatgtaaaatttgcaatcttggccatctagttgtattatggaaaattttagttccttgagtgacatcattgctgatgttgaatttcgaggaaacatttggtttgacttgttattgcagaaatggtactttttcacttctaaatcattttgcctcacaacacattttaatagagagtgctttatttttaaggaaatatgtgtaaaaagatatattgtgatagtgagaagtttcctttcttctgttttcttgtttttacttcctttcaatacaggtggtttcctgcccgtgtgcgctaggtctcgccacaccaactgctatcctagtcggcacctctcttggtactaaatatttacgacattttcctatgagtttgagtcatgtttgaatgaaattacagtaaatttgcaagaaattaaaatgaagttgagctgaggatctttatcaccgaaaagttaaaactatagattgctgctaacttgatatgacagaaaatgttcagtagaattatcatcttctatttcaaattagcatgtcttcccctagaaataatttgctatgtgaaggacttcttttccttgcttgaatgcttataacttcgaccctagaaattatagttagttgttggtcaatgattattgattctaagataactcactagaacgtatgaggtatctggttgaaaaacattctatttagctacgatgatgtggaagatttataattgaaaattattctcttatcctcttcctgttcaataactatgtgtaggagcaagacaaggacttttgattagaggaggagatgtattggaacgcttggccggcatagactatattgctctggacaaggtacatgcaattcttgctccctctcctccatagactaattgttgaagaaaataactcacccttctacttgcagacaggaactcttacagagggtaaaccaactgtttcggctgtggcttcttttgcctacgaagactcggaaattcttcaaattgctgctgctgtagaatatacagcttcacatccaattgccaaggccatcaccaatcaagcagaattattgggtctgagtatcccattaacaaaaggccaattggtagagcctggtttcggaaccttagctgaagtagatggacgtttggttgcggtcggtagtttagaatgggttcgtgaccgattccaaactaaaacagacatatcgcatgttatgaatttggagcattctatacatcaatcatccaaaggagtaacattttcagattactcgaaaacagttgtttatgttggtcgtgaaggagaaggcatcattggtgctattgcagtatctgacaatttgcgccatgatgctaaattcactttaagcaagtaagtttcattcacttgtgaattgggtactgttaatccatctttttcttatattgtcttaacttgattatcaacttttcgttgtgttgctgtgttgattaaggctccggcagaagggtatcaaaactttgctcttatccggggacagggaagaagcagttgcaactatagccaaggcagttggaatagataatgaatctatcaattcttccttgaccccacaaaagaaatcagaaattatctccactcttaaatctggaggacaccgcattgcgatggtatcaattaaactcattaaattgaccaacaatgttgctcttataatttatttaagaaataatcttcatataaagtatctgtaattaacaattttttgtttttcgaaggttggtgacggcataaatgatgcaccatcattggctcttgctgatgtcggtattgctctgaggatcgaagctcaagaaaacgcagcctccaacgctgcatccattatactccttggaaacaaactatcccaagtatgttattacaccaactcatgaattgctttcttttgcggataccatttagttagttcatgtgcattgcaacatttatcatcagttaggattctcaactgagttgcatttttcgatactaatggatgcaactgcacgtaccgtttataaacttgttactcgctggaaactttatgccaggttgtaaatgctttggaactttctcaagcaacaatgtcaaaggtataccaaaatcttgcatgggcaatagcatacaatttagtagccattcctattgccgccggagtattgctacccaaattcgatttcgccatgacaccgtcactgtcaggtaaattaacattagtagtttttattcatttatcttttatgttactagagaataatgattgttattactatggggtaattttacacttggagtaacatttttgtccctataggtatgaacgtttttatttttaccacctataaaatttataactaaaattcttttaggattattagtgcgaaatctctttatgttttttattttttacacttaacttttttttttcttttagcaaattcttttatgtttacttttctttacaaatttgaggtgtgaactgtaaatcaccgttaaataacaactggattgttatattagcttcgaagttttacttttgtgtatctatccagttggtatttaacaacgatatttagctgacgtctcaaatttgtgaagaaaagtaaacttaaataaattttgccaccaaaaaaatataaaagggattaagtatataaaaattggtaaatagcaacataagtacttaaaattttaagtttataagcggcataaactcaatatttatttttggcggcataagtacccaatgtttatgaaactgtaatttttcttcagattcgtcagtacaaactccttaaaagaacatttggaagtaactaatactacatgttttggtctagacccaataaactagaatctgtgttttatatttgtctaatttaagacaataatagaatttgtactgacgaaattagaaaaaaattacagttttacaaacattgggtacttatattgttaaaaataaacattaggtttatgttacttacgaacttaaaattttgggtacttatgtcgctatttaccctataaaaattaaaacatttgctgccaattatcttataataaatacattgtagttataacaaacattctaccagttttttaaaattttaaaattatttacagtgtcgaatacaagactcaaaacatatagttcagggcccacttagaaaaatatttttgggttcttatttatatataaaaaaagaatgtagtatttttcaaaattaataaaagaaatgtgtttttaaaagagaaaaggtttgggtccttgaattaggtggactttaggtacacgtctaaccctaggacacaggaactttttatttatacatatacaatttactattttgaatattgtttttagtatagtaatttatttacaaatttcggaaacaaatgaaagttaataaaaaaatttgtaataccgaaaacaaagatgtaatagtcacaacaactctattatagctgcatcaaagtttaaagaagctttaccaatgactgattgttgggttgacatgctttgacacttgacaggtggtttaatggcgttaagctcaatatttgtagttacaaattcattgcttctacagcttcaccaagggtctgacaacaaaacatcacttaacccaaaatagtaagagtaataatattcatacatatttcttcctaccacgccagaccttattcaatacaacaacatactattaaaaataaaataaatataataagatgataaaataatcacaaatattgtgactcgcctagatgaaattttgtaaatatggacacttattttatagagcttgttttgcgacagaggtttttgatatttgataataaattggtcatggcatcttagacaaaggttgaaacatagcttcttttttcaaaccccgaaataatgagctacaatacaacagttttatatggctccattcttctatttcagtatacaatatatttacatatgtatatctgatgttaattttgttgtttaatgttgacatagcttatttggtgaccaaaatacttaggctatgtttggaagttaaattttggtgagaaaagaaaaaaaaaaaagtaggaaaaaaaatagtgtggagaacaaaaaataaataaataaatttttcaagtttgatacggtgaattttgttgaaatgagtgtttttctatacaatttttattatattttatttttcttacctttttctttccttactcaaattcaatttataagcatagccttaacgttgtgttaaaaattacacttaaatacttgtgtatttttaagtaggtacttaattttaattttcagctcatatttacggtgcaattaaaagttcatcataattactcttgatgtaaagaaaaaattttgggcgtgtttggaaagctaaaagagaattagatttggtgtaattttagataattacacaattttatcttgtgtgtttgtttgattacctaaaatgtgtaattggagataattgagtggtctccattctcaattacacttcacaattctcatgtgtaattctaaaaaaaatttcactttaaatgttaagtactagtaattattatttttgtgtataattattaattattttggcaataaataattatcgcatcataatcaaatattcttcaacaaaaaaaaaaaatctttctattttaaattgattgtaactataattttagtaatttcgaaatatgaaagtaaattatcattagtttcaacaaaacaacattcatatttctacttttatattttattgctatattcatcttacaaacaaaactccacaagacttagagtaacatttatttatttcttacatatattgtacttagagaattatccaaattttctcttttttttttttttggaaaagtcttttttcattacatcaagtcttttttatatcaagtcaagtcccttcacttcaactcaaaatgaacaaatataaaaacaaaatttggggaaacaaacaaaaaccaaataaaaggaaggattctaaaggaccctatttggatttgttctaataataaaaaattgaaattccttaaaatacagagaaagatattattaattcttggaaataaagaaacctcacatttacaatactatctacttttcttccttcttattttgtacggtagaaattaattatattaccattaataataggtgcaattatgtaattttattgtcacatttttttacaagtactttttttcagacaaagggccagtgtgttaaataagatgtcttccaaattatttttaatttttttttataaaaatggctaattggctattgtatatagatttacttaccaagtttatttaattatctatttacaatgaaggatattaattggatagcatgaaatatttcatcatgtttatttaaatgacttagtttggtaagtcatattatatcctattgtattgtattataatacattgaatcatattttatataaaaatatatatatgatattgacttttataaacatataaaataatatataaaaatataatatataactcaatttaatataatacaatactatattataagaccaaatacaacgtaagaaacgagtcttaaaatctcacattttgcagagtttttttacaaagtaattttgtttaacaaattattttacacttcatcttaatttcgataattatttccatgtctaactagatagatggccacatttttttagacaaatcatcaaaaaataaaagtttagaaatttagtcttattttttgaaaatattattttactaataattatcaaaacaaagctaaaatctaaaatcaattctaaaaaaaattgccaattattgcataactagagtaattaactctttataaattttaactcaaataaaagaaagaaaaaaaaactcttccctagaaatttaaacaagtagtaacattgtacttgcctcaaaattgtacactacaactaaaatggtttttttttattccccacacaactagatattctactttaaaaataacaccccactaaatgaggagcccatcttatctaacttcaatacctttttttttcttttatttattttttaatatagataaaaaggatctaattttatggctggttatgaaacataatacattaaagaagaaaaaaatcattaaaataaaaaataattaaaatgaaaaattataatagatagggccccattgaactttaatatacaacattgaatagggcacgtgatcaagaacaattgttgttgagagactcttcattttgaaacgctttgcatgtgattagtggggtcctcttcactactcctaaaacccaaaaagattttatctttatttttatttttctcaaaaaaaaaaaaaaaaaaaaagatagaagaagaggaaaaaaaaagagaaaaaatatgtgataatgtcttcttgaaaatcaattgtgaacaatggggtaagcacatagaaaaaaaattgcaatctcttactatcatctttgggatatatgaaaaagaaaggataagtgtgggtgcttgtttggtataattgtgcttatggtataatgtagcttaaatgacttttcacctacccgtgtacctaagctatgttgtcataaccgaaagacctattgattccaaagaaaaaagttgtcaacattagtggagagaggtatgtcacccaaacttattgaacatgggttagcggaatgtcgggaagtgtagaatgtgtgtgatatgaatgtcaaatgcgatgtttgtgtttgtatg

SEQ ID NO: 377887 - DNA, 6861 bp, Cannabis indica
ataaaatgcatggagttgaaaggagcagaacatatttcgatttcagacaacggctctaatgtgaaagatgaatccatggaacacttgtcttctgttttccgctctagtgtggaaattaaggatgcgtatataccaccatggattatcagcagtatatgtgctgtcgtgggctcaggagaaagaagctttgatgcaaggtatggtgatttatcatttttgtctttcatatgattgcgttgtttatattacaaccaggacacagtttttgttagttcattgcttggcatgaggttgtaaggcacaccctcttcgattagttttttgcaagaatcatttacaaccatttcaaatggagcagaacgtttgtttcaaattgtcttttgagaataattttattgttaaatatttagtttgtagattgatttgatttggttggtttccagttttttgacagaacctacatcaactggcttgaatgttgctctagaggcagttagtgagaaacctgatacacaagcctcagcaggtgaaggtctgaaagaggccagttatgcttttggtatcccagaagccgtagttgctcctcaattacattcaggttttctaaaaggcttgaagtacttgaacggttcttatacagctagtctttctccaatatgacttctgcttgaatagactcaccaactataaatgtatctactaaattttatgcgactgtatcttacaattagaacctacttctatctgtactttggttaaatgtataatcctagtttttttggaagttttatgtgaccaataatttgggttttatcagacactaagcctggattttggctggaaaatgctctacgcatgaacctcacatttgacaatacaatagcctgaactgaattgtacaataaaatgcgtttgcactgtttgttttttcgtcattatttcactttctgaactggcaagctgaatatgcaacttcattgtaatcgaaatgctcctggcacaaaagcttcttgtcccatatattgattgaaggctttaattttaatttttaattttacaagagagaaatgtcttacaaaattcgctaacatgaacacacaatgtaatggaaagaacatctgatgtaagcataagataagcactgaaataatttgaattttaagaatgtgttaaaacaattaaaatgtcaaaattggttgaaattcttaaagctggaggcagaataggggtggggatacaaaaattatgtctggttgcttggtcttgtggtaaactaataacccctagaaagagaacttgaaagcacctgcctttgaatcggtgacagaatcccagaatgagggtttcttctcttcggcctttttctcttctgctttcctcatcaattgatcaatagttccgggaaaggaagcctcaaaagtgttcttaaacttctcatacaaattcacccgatcttttgtcccagaaaccagttcactagcatttggcctctgaagaaaatccaacacattcaacaagttgctcctgcaacattaaagaaaataaagcaagggtaaatctttgtttcagtgtctaaaaccgcgaatagtaaaagaaattctatacatatgaaacatagaaaagtaacaattcattcagtaatatcaagcatatggcactcgtatgaaaagataaatcttcataaagattaagcttctaagcttgaatctactggggaacatataaattatgctttaatcatctccaactcattcttgtaatgttttggaactattaaatttaatataataataaaaaaaaacattactctctttctagacgatgctcactcattttcttaagaaatttcatcacagatacactattaaagataaactcaaactaaaattgagtaatcttgaaactggataagaaaaatacctgctaacataattctgagtaatggcaactgattcctcaaggttaatcaccaaatgccaccatccattaggcacaaaaatcacctccccagctttacaaacacactctatgggtttctttttccatgttttggttgcaccataaaaattcataaaccactcaattatcgaaacagggcatgctacctcagcaccatcagggctggggtgcactcctggaggagtcacatcaggaggaaacaaaacccatttcttggaccctttaatcacagcattccatgctgatgttgaattaggatcaatgtggaatgatgaaccagaaccagcaggaccaattattatccatctgtaatctggtctctcattgcccaacagaccaaacaaatcttcccggaaatacactggaacttcatactccgaacccaatctcggaaccttttctgcgaatttcgggtcgaataaatacaatggcctctcttccctcacttgatctgaatacctaaagtaattctcaagctccatctcaactggccctactgaaaaatgtaaatcaccagagagcttaaccaaatagtctctatcccatttttgaagagcagcccaattatctatacacccttctaacaacacaggcttattcggttcctcaaaatttgacacaaattcttctaccgacatgcccttcttccgaattatgttatctctttcaagccactcaggtttcatttcaagattggcacagagccaactctgaaaaagataatcagaataaaagtccctcactctcaaacacgacaatccaatattcatggcatcaaaagaagggtaacaagtagcaatgtaagtgagcttccatgaccctttaaagataaacccaccactaagattttccaacacgagattcctccaaaggggttcatggttagtgaatacatagaaagatttgctaacagccgctaaaacccctaaatgggtagcgcccaaaagccctagaatatcaataacaagctcatctgttagggtttggagattgcccaaacctgtgtttctagagttgacagaagatgagttgaggtagaaatttcccagtggtcgaaccccatgagtgtgtgaaggagcagaggctttgaggctgaaaccttgattaatttcttcatcttcatcatctgattgatatttttctgaaatgaggttttgctttatgccattggttttgctcctaagctcgtttttggttttgtttttggtcctttttcttttccataacaagctcttgcagctcaacatggcggacgaggttcaacactgtaacagccaactccgaaggagacacacaaagctatgtgccagggtttaagctttccttcattcgtttggggcctttattattgggcttcaaaacaaattcacaaagggtttttcataaatgcattttgttttaggaatttttacatatgataccttatttttattctaaatgggaaatgtgatctttcatgctaaaaaataacacatggtgttattttgaacaaaaaaatacacattgtgtaaatatgctaatttttcaatagtaaccccaaaatgccctcccctaccactgaacgatcttatcaatacaagcagtaaggaaaactaagcttgcaaaagatgcaaggcttagaggctgatattgtatttatactgatcaagactttacaacagacaaaaacaaaacagaattaacagagtaacaacttggacaaaaccgttacaagaaactaactaactgaatgtacactaatgactttatcatcctccctcaaacaaaaaggtgtggaacacacattaagtttgttcttgagataggtaaatctgtctttgcttaaaggttttgtaagaatatcagcagtttggtctagagacggcacatatcggacttcgatttctttggcaatgatctgatctcgaacaaagtggagatcgatttcaatgtgcttagaccgagcgtgaaaaacagggttggctgcaagagaagcggccccctgattgtcgacccatatgatcggtggagtgggctgtgacatgttgagttcagagagtaaaaagttagccaacgaatctcagcaactgtattagctaatgatctaaactcactttcaatgctgctcgtggccaccacagcttgcttcttggcagaccaagagatgagattgcctcctaaaaatactgcatagccccccgtggactttctgtcatcagggcaactcgcccaatccgcgttagagtatgcttgtaaactcatgtgcagactcggtcgaagatgtagcccttcatgaattgtacccttcaagtacctgaataaacgtttacaagcatcccaatgaaccgaggtaggtgcatgtataaattgactcagcttgttgactataaaggcaacatcgggcctagtgagtgtgaggtattgtaatgctcccaatgtgcttctatacaaggtatgatctgaaaagggttcaccaatttgaagagacaactgacgagcagatgaagtgggacttggacttggtttcactccttctaaattgagtttggtgagaagatccgagatatatttagactgagaaaggtaaaaaccagtgtgattccttagaacctcaaccccaagaaagtaatgaagacttcccagatcctttagagaaaattcagtgtttaaagaagagattaactcacagatgagcttcggattggggccagtcactagtatgtcatcaacatacaccaacaaaacgattagagagcttccttggccatgtatgaacagagacgaatcagatttagaggagtgaaagcccctggtgaatagagtatccttgagcttatcattccaagctcggggagcttgcttcaatccatagatagctttgtgtaatttacacacataatgagggtgaatagggtcttcaaacccaggcggctgagtcatgaatactgtctcttctagagtcccatttaagaatgcattggaaacatccaattgcttgacatcccaattgtatgaaactgttatagttaatatgattcgtactgtagcaggtcgaacaacagggctaaaggtctcttgaaaatcgatgccaagagtttgatgatagccctttgccaccggccgtgatttgcatctgtcaaggctgccatctgcattaagtttcactctatggacccatttatttcccactaagttcatgtaggactgatatggaacaagtgtccatgttccatttctttttaatgccaaaaattcatctgtcattgatgcattccagtgaggatcagcaagggcttgtttcaggcttttgggttcagtgggaagaagggattctggtagtggatacttttgttgcagtataagcttttggtttgtgagttcctactttggatcgagtggtcatgggatgttggttataagtaatgggaaggggtggattggtgacagtaggaactatgggagtcgggttaagagaggcagagggaagggaagtggatgttggtattatttctgaagtagggggtggttcagtaggtgctggtgtactggtgggaacattggaggttaatggaagggaaatagcagtaggcactgcacttgtctggtttgtatgagggccagctggtgtagacaaactggaactgcaatgtccagtagatggtccatgatgatgatcctcagggatagtaaatggcataggattagtatgtgaaggtaaagaatttgtagagaaagttgtggagggaaatgagaggggttcagaagacaatacctgctgagttggtttgggcaaaagtgctggaaactcctcctcattaaacaccacattccttgtaatatatacacggccagaagtactttcacagagatatcctttgtgttgcatagagtagccaataaatgtgcacttttcagatctcactgtcatcttgtgagtgtggtatggccttaagtatggaaaacatgaacacccaaaagttttcaagaaatcatagtcaggaggcttatgaaacaaggtctgatatggagaaatctgatctaacacaggtgtagtaatcgattgattacaaaggtggcatgttgaaaagcataccaccagtaagagagatcaagacccgactgtgctagaagggtcatgcctatatcatttatatgcctgtgttttcgttcagctcgtccattttgctgatggtcatgaaggcaagaatgttgaaattgaatgccattatgagccaaaaatgcagcaagagatctatactctcctccccaatctgattggacagatttgatggggaggttaaattgtttttcaaccaatttcttgaactgtaggaatgtaggatatgcttgggattttaaagtgagagggaatatccatgtatacctactgaaatcgtctagaaaatgaatgtaatatcggaaaccttctttggagggaatgtgagaaggtccccatacatcagtatgtatgagttcaagaggaatagaggccctactgttggacaagggatatggtaatttgtgactcttgccaattttacatgcatcacagaattttaaagtttttaaagtgcctgtatggttgatgttggacagaacttttgagagagttgcagggcctgggtggcctaatttggcatgccaaatattgatatcctgtgcaacatttatatgaaaaatctcatgagcagattgtatggaagaaccagaaataggattttcattaatatggggttgagtacaatgagtaggggctgttgagacaaccgctttattacatggaatattacaaactgaattacaatcagcagtagacaagggctgagatgctttagtggcaagatgacactgaagttgaataggggtgttggagacagatggttgagttaacatgtacaagccattcttaactctccctttgag

SEQ ID NO: 377888 - DNA, 5709 bp, Cannabis indica
tgacaagcaaattactgaaatgaccttttaaggaagtgcagtataatttttcctaaatattacaatacaatctcaaatacatttcaaaaaacaaaaccagagaatgggaaatcctaaactcattgaaaaattatttttagtatcattcatcagaagaatttgtatgaacaaaattgaagtcttgtttgttattcaaatattgagtattcataaaaaaaaaaaaaaaaccacaatgattctacaaaaacctacataagccaacaacgatggtaagagctcagtgagcattacatgagctggaaaaacaaaattaaacccaaagaaaagaagtgaaaaaaaaaattaacattgaaattaaaaggctatcttttaacactacaaatataaaattgaaacatagtgttctatttaatgcccctcactaactgctttttttaaactcagtaatttgccttttgaaggtagtgttgattaaaaaccaaaccaaaggaaacggattgagagaacggaagggatcgaaatcctttaaaaatgatatgacgaaaacgccatcttgtgttgtacaaaagcagtgactaaccaatttatgagttccccccaaaccgagccagtaatcaaatatggtttcgttgcccttatctcacgttttgcctggtcttaatcatgcgcttgagaggagctagccagaaattgcactcgtcccattcgcttgcggtaagaagtacctgaatttagaaggacgaaaaaatatttaaaagggaaacttgtcaattatcatggtttccatttgttcgaaaatttggtaactattaatatacctggatttggagggcagtggggaaatcgccattgtcgagggcttggcagagcttaacgagctggtcagcagcatttgtagatatgtccgcattgttgagtttggcaaataaggcgcctatcttccttgaattgtcttctatttcacgcttcttgccaggatttgctcttgaacctcccaatatttctgatgtctcattgaaaagtctcgtcaaggttgcaacagcaggttttaggtgagctgtggatccaacgatcagaaaaccagtaaaagctcgttagaaaacaacaagtgtagatgtatcaaaatgaagcagtggatataagatccagatagaaataccaggtacgttcgaggtgacagctgtctgtactgtaggtggtggagctggaggagcagcaggagtttgcatcgacgcagtattagtagtagggctaggtggttgcattgaaccgggcccttgaacaggtccaggtgtaaattccctaggaggatagggattcgtactgaatgacatattaggctttggttgaggtggaagaggagcattaagaggtggggcaggctgataaagattgttgggaggtgcaacaggctgataagcgttgttaggaggtgccacgggctgaaaagtggtgttgggaggtgcaacaggctgatatgcattgttaggattaggatacaactgagaacccaatgtagatgtctgaggttgctgatattgctccacatttttcagcatagtaggatttgtaggaacgaaggtcctcatgctagactgaatagaggctggtgctgcagcaaagttgtcctaaaagcaaaaataagagaccgtgttaatgtctagataaatgacacctaaatgcgaaaattggaaatattagaaggtttggtgagtgaagattcacatataaagagattttttaattaaagatctaatatatgattatatagaatctaataagttggggaatggcaaagttaaaccaaacagtaaaacctaaacgatgaaaaatataaaacaaatagactctacaagtaaggaaaacagattaaaaaaaatacagttgaaatccaaaaaactactataacacataccttaggaacttgaggtgtaagctgggtcgggacaaacatttgagtattctgagcaggaggagcaacatatctgagcgaagaagaattctgtccattgtgctcagcatagggattgacaggattaggctgaaagagcaataacaaagtttatagaataaacaagaaatacagaaatagctaaggttgagataaatgtttggagacaataaaaataccaggggaaaaaacagatagggactttagtaaagagcaaaaacctggtaatgtgaaggtgtaacgtcaacaggttgcactggtgcactttgctctacatgtttttctgagtcaatcagaggataaatgagtgagactaatgttttggccatggtaaggaatttcaccttaaacttgcacagttagcagctataatggtatacattttcatcatagcaaatttattaatactacagactcggttcctccaattgctgcttggtggaaataatccaatacaaacatataaatctccatacaagcgcttttttatttttactactagcgacaggcaaaaaccataacagtcaactgacgacatcaatattctttacacttaaccatgaaagatcaccagtagaccagtttagatttttctttgattacagtactagtagaaatatagaaaataaaatattaatgaaaaacaatactactagcttatttaaagagtgtgaagaaatttaaacatacaatacaagttgaggcaattagtcaaggaaaatatagcagtaaaaaaggtaattttgcattgcaatcattagggaattaagaggtagaagaaaatgcaaatgtcaatgtccataccagattcacaaagagcgatacgttcttttaagatctcaagttcgggtgtcacttcatcagacccaaacaatcttaggtattccattgctgttttaagaagcccttgacttgccaaaatttcagcgtacttctctacaagtttgcataatgatgcactgaatcgcttttgccctgatgctaaggcaaggacaatagtcttctccattaagtcctaaacacatgcaatgtttcagctcaggtgaataaaaagtttaacatgttcccatgcaatagcaaagcaccaaaaactaacctgaagacggtctacataagatttttcatgctcagttgacaaactcttagaccaaatctcaacagtcttatcaatatttccagcacatatgtaacaaatagttgctgccagcgtattaccagcagcactcagtttggaagctagtgcatcacaaagcatagtccattgctctcttgatgcaaactgttgattcatcatgaaaacaattttgcaagttagtaaatatagtaacttaagtttgttgttaatgagctcgatcccaacataacagtgtaatccaagaaagaaaaattccatgcaatgcattcaactataaatatcagttactgatgatgattaaccatatctaacattggagttagaatacttacactacaaagaagagcaagagtttctttccaaaatttgaggggtctggtatttacgagactcaaaaggtcattgttcaccattgcagaaacaacctgacagttaagcataattcagaatggttagagaagaaagaatgcaaaataagcaaaacataagtcagctgaatttcagattcaaaggaaaacatcactgcttctgagagcataagatggaaacataatctaccttaaggtaaggtgagcggctaatctttaggtattgatctcgtgtgctctcccacaaagaatcaccaccagcatgcgctataaccaaagcatcagccattttgttagctgaaatgcacttcgcaacagcccccttataatctccaacaactaatgcatgttgaacagattcatcaaatgatggatcatcgacactctcctccattacatctgactcttcctgcacctgatcagtactaggaacagtatcatcaacaacaaacttatcgccagatgtagccaatggtgtttcagctttaggactaggaagattgttgaaaaagtcttctccattgtcagtagggaaagcggtgacatctttcccaccttcaaatccagctgtctcttctgtggtatcattaagtccaatagcatttacttcattagatagctcatcttggacatcaggctttgctacttcagggacactgaagccaaggtgagttagaagctttgtccttgcagttccatcatcttcaaacataacttttaacaaaccccatgtttcacgttcatcatcagatctattaggaaagtaacagaaagcaagagaaagaaagagcattaattgtttgtcgaatacgatagcaaatagggtgcagatcaaaaatgtcttgtcaataaattatcataaagctattttaaagttagatgtcatactcagattcttctagtttcttctcgcacaaagtcctcaataaggacttttctccattttgtattgcagcttcaaaatcagaggagcggctcaccaaactgtgttcagtgaccacagtgtgtacaaaaacctatatacaatgaagacaatcaaaaaacaaagtccattttaaatgaaggtgtgcattgcaccagtaaagcatacctctgaagcagatgaagcacctccagctgacgacttagtttgaaacgaaacaagcttgccaccgaagccaaaggacacaccagctgggcgtttataccattttggagctttcagatatcctgcatattataaggtccatcaaacattaatttacaacataatattactataagataaaaatagttctgccccaaaaaaaaaaagatcaaacaaacagctagccaatgaattatgtgataactccaggattacagatttattataactattaactataatctacattacctgctccaccaaaagcagtgtcaccagcaccatatcgactgcaaccctgtgtgagagaaatcaatagtaaatgaaaaagaaaactaatacaatgaagagatcaggtgtcctctttaaagaaaataagcataatgcaacaaggataacaaataactgaatcaaagaaaaccatcaaagtatttaaatcaaataaaaacattattgttctccattttaaaattcaacactcgatcaattccaaccacctccaatataattcttaatcaaacgtaatatataaggcagaacattattagttagcaattacgtgggacatgaaatacctcaacgttgtaaattccaatctttccatcaaatgaagatgctgatataactccaggtatttttggataccagtgcacatcgaagttccaattggtgcttgctggcaactcacagacaatctacacaaaaattaaataaagttgtgttatctaataaaatggaaacacataaaccaagggtgataggtcaatttaaaggggagaaaaaattatagagctaatggaaggaggaaaaatatgacacctcagcagtaactgtgttccagcaaatagttcggttatcctttgcacagtaagcaaatatgaactgtcattcggacaccacgacattgcaattacacctagtgtttcaacatgagcattagcaaaaattcaaaagattataaattgagttcaggaaagagagatgttcaggaaacatgtatacatacacataaaataaataaaaaagaaagaaagatgaaaatgattatcctgttacctttggtgtgcccaacaaactctgcaactggtgacattatattccgcatatcccaaagctgtttaaaagtaaa

SEQ ID NO: 377889 - DNA, 7014 bp, Cannabis indica
ttttatttttatttttacaaacgaccttaattaaattaattcccacaatcaatacttgatccttttactatgaataaaaataaatgatcaataactaatgcaaattaaataatgcacatggaaacatattgactctacctttcttctcctttttatcgatcccatccaaacagaattgttcgattcaattcaagcttatagactctttaaacttttctaaccattatatatatatatatattaaaataaatttgttgtaattttcaggtacttatttataacaaaaaccagtactccatataggactattattaagagatcacacacaccatgatcagtaaccttaagcttggagtagaagtagtgagtgcacacaatttattaccaaaagatggtcaaggctcatctagtgcctttgtggagctatacttcgatggacaaagacaccgtacaaccattaaagagaaagatctaaatccagtttggaacgagactttcttcttcaacatctcagacccttccaatctccattacctttctctggatgtcaacgtgtttaacaatgtcagagccaccaactcacgctccttcctcggaaaaatcagcctcaccggaacttccttcgtcccttacacagacgccgtcgttttccactaccatctagagaaacgcggcttcttatctcgtgtcagaggagagctcggtctcaaagtctacgttacagatgaagccaccgtaaaatcctcactcaatactaatcattccggcacccctgtcgatcaagcaggtaatcacatatatatggatcgatgatataataataaatttaattaaacatttattaattcctactttctcaggtcatgaaaacccgactcggaaagtcgcgtctcggcatacttttcatcatttacctaatcaaactcaccaccaccgtgatcactcctcttcctccgccattgtcacccccacggcttcaactgcaactcttcctcatcttgaccctcacgctcaccataatgccgccaaatacggtgttatggatgagatgatgaaacatcctgagcaacagcagcctgccaagctagtccggatgtactcggctacgcagccgatggactacgctttaaaggaaactagtccttttctgggcggcggaagagttgtcggcggtcgcgtggttcgtggcggagacaagacctccagcacttacgatctagtcgagagaatgtattttctgtacgtgagagttgggaaggctcgtgagcttccggctatggacattacggggagtttagatccgtttgtcgaagtcaagatcggaaactataaagggataacgaaacattttgataagaaacaaaatccggaatggaatcaggttttcgcattctcgaaggacagaatgcaagcttcggtacttgaagttgtggtgaaagataaagatttagtcaaagacgatttcgttggtattgtgagatttgatattaacgaaatcccactccgagttcctcctgatagtcctttggctccggaatggtacagacttgaggataagaaaggggagaaaatcaaaggtgagcttatgttagctgtttggatcgggactcaagcagacgaatcattttctgacgcgtggcattccgatgctgctactcccattgattattcctcctcagccgtttcctccacgattcgttccaaagtctatcattccccaagactttggtacgttcgagtcaaggtaatcgaagctcacgatttgattccaactgaaaggaatcgctttcccgatgcttatgtaaaagtccaaatcggtcaccaagttctcaaaacgaagccgtttcaagctcggacacttaatgccctttggaatgaggatatgctgtttgtagcctcggagcccttcgaggaccatttggtaattacggttgaggaccgagtcggtccaggaaaggatgagattattgggagagtcatcttaccgttgaatgtcattgacagacgcgccgatgaccgtccgattcattctcggtggtttaatctcgagaaggcggttgctgttgatattgatcaactgaagagagagaaattctcgagccgaatccacctccgagtttgccttgacggcggttaccacgtgctcgacgagtcaactcactacagcagcgatcttcgtcccacggcgaaacagctgtggaagccaccgatcggagttttggaactcggtatcttgaacgcttcggggctccacccgatgaaaacccgagagggaagaggaacatcagatacctactgtgtagccaaatacggtcataaatggatcaggacccgaacattggtggatcatttaaatccgaaatacaacgaacagtacacgtgggaggtattcgacccggccaccgttctaactatcggagtcttcgacaacagccagatcagcaacgaaaaagacggacccaaaaaggatttgaaaataggtaaagtcaggatccgaatctctactcttgaaacgggtcggatctacacccattcgtacccgttactggtactacacccgactggggtcaagaaaatgggcgagctccacttagccattcgattctcttgcacaaatttcgttaacatgctttacgcctactcaaaaccgttactccccaaaatgcattacgtcagacccttcagcgttatgcagctcgacttattacgccaccaagccgttaatatagtagcggcgcggctagggcgagccgagccgccgctgagaaaagaagtggtcgagtacatgtctgacgtggactctcacttatggagcatgagacggagcaaggctaactttttccgactaatgacggttttcggcggagttttcgctgtgggaaaatggttcggagatatctgcacgtggaaaaatccgataacgactgttttagtgcacgtgctttatttaatgctggtctgttttccggaattgattcttccgacggcgtttctctacatgtttttgatcggaatctggaactaccggtaccggccgaagtaccctcctcatatgaacacgaggatttctcaggcggaggcggtccacccggacgagatggacgaggagttcgacactttcccgacgaccaggaatcctgagattgtgaggatgagatacgacaggttgaggagtgtcgctggaaggattcagactgtcgtcggtgacgtggcgactcaaggggagagaatgcattccttgctgagctggagggatccaagggcttcagccatgttcgttagtttctgcctcttggctgctttgattctctacgttacgccgtttcaagtgatagctgctctagcaggattcttcgttatgcgccaccctaggtttcgccaccggttaccgccggttccggtcaatttcttccgccgattgcctgccaggactgatagcatgttgtaatacttggaagttggaatagtaccatgcgttaatggaggtcatatgttttttctacttctttataaatatataatatgaatggggtattattattgtttgttataatttgtaacatgtaacacttcacatgtttctagttttgtttttaattagtaccccactcggaacttataagtatagaaccttactttgcttcttaaatattattactataaattaaagatttttcttatttcatattttgatcatatttttaaaatggtacaaatgaaaatatataagcaaatattaatttatatagcaaaagttttcaagttatttgagtttatcacaaagctgctcactctttttttttttttgacataaaagcagctcactctttgttttgtcttatatatgaatttattttgccttttgcgcattgttttgtcaaattttccttgctatttattgtaataatttttaataatgtctttctgattttttctaataattcttatttaccaatttagccgacagaatatcatagattctaatatgaagatatacatatatttataaaattatattcgaaagacttgagcaagcgtataacgtgacacttctaaaataggaagaaaaaaaaagttgcatgcatgatgcatatgtactcccattttgttgtcattatatatatttattattatttgaaactcaactaatattaatttgtgatcatgatcaaaatgaacgttcataggtcttattgacatctatatgtatacatgaacctttgcttccatcatccatgatgtcaactttttcttattttgctgaaacactaaacaaccaattaagatgcatgtcttctttaactaattaaaaaaagattaaccaaccaaggaatatatatattgttgtgattgtgatgttgtcaacaattctatatatatatataaatatataaataaatatgtaaaaactaaacgtgcaaccaaatatggtgcaactttcgaatatacgtgcttccatgtttttcaattattaaagaacaaattatatggaacctccccctactatagaaaaaccagagccaaggctcaacaatctccattcattcaccattgcacttccttattccacccaaaatggccttctctgtatccaaaaagaaaccgaaagtagtttccagtaagaaaatagagctaaaatcatcatcatcaaaccactgttgtagttcttcttgctcaattctactaagaattatttacaaaattcccactgccataatcttgcttcttcttatcttcatttggtcttcctccacaacaattatctctggaaaaattgttcatctttgtgtctcttcccgaaaactcaacgatctctactgtctttctgctggtacacagcccaaattggaagtctcaatacttgacaacactactacttttgatggcaatgttgaattgaagaaggaaaatgttcttgataagcaagctgttcatgaaaatagtactagttttgttgttagtactataactaatcatgtcaatgtggaagtgaagaaacaaaatgttagtaatgctgagctagttttcaatactagtgctattgccaatgttgaaatgaagaaagacaatgttgttgatcaacatgatgttggggatgattcagacccttcttttagagatagttttggccatgaaggtgcacataatgatgagcttgaaaaggcaatgaaaatggttaatgagcaacttcaactacaccggtcatggcaatcagacaaatataataagaaagggtgtgttgggaatggaatttatgtctatgatttgccaactaagttcaacaatgacttggttggtcaatgtggggacatggttccatggatgaacttctgcaagtatttcaccaatgaaggattaggagagccaattccaaagctagggaaagcatggtacaggacacatcagtactctttggagcctatttttcatgctagagttttgaagcatccttgtagagttcacaatgagaatgaagctaagctcttctatgttccattctatggtggattggacattttgagatggcatttcaagaatgtttccaatgatgttaaagattctctggggttggagttgatgaagtggcttgagaaacagagaccttggggtaggaattcagggaaggatcatgtgtttgtattgggaaaaatctcttgggatttcaggagaaaggaaaattcttggggtacaagattcttagagctagagcaaatgcaaaacccaactaagctcttgattgaaagacagccatggcatgtaaatgacattggaatcccacacccaacttacttccaccctcactctgatcaagacatcatctcttggcagaccaagatcatcagctcataccgaaaacacctagtgagttttgcaggcgcagctcggcctgatgcaccagagaacataagatctattctcatcaatcagtgcacatcggtagatgatcaagactgtcaatttcttgactgcaattcaggtggctgcagccaacccgagtctgttatcgagcttttcatggagtctgaattctgtttgcagccaccaggagatagcccaactagaaaatctgtgtttgattctcttgtatcaggctgcataccagtgttgtttgactcattcacagctttttatcaatatccatggcatttgccagagatcatgcaaagtactctgtttttattgaccaaaaagaggtgagacaaatggaggttaatgtggtcgaagtgttgatgaagatatctaagaaagaaagggatgatatgagaaggttcattgtttatgaacttttgcctggtctggtttatggtgatacagattctcagtttgaaaagtttcaagattcattttctattaccatgagtaatctacttgagaaggtcagcacattgaaacaaagctgatcaaaactattcctttgtttattgacttatttatttattttttgtttcttgtagttcaatatacagagttgaggagcacaatcatatattatttagtttgattttttgcttatatatttaacttctttttgcttgttcaattttgttgataacatcttaaaatggtagcacaatttttaattttggatttaaattgaattctgaagttggtgtgtgcattttctttattgtgatcatggttttattcaaattaaatagattgatttttgaactaaaactgaaatgtaaagattgaaataattaattaagcaagaattgacagcaggataatattttaaatggtggaatagacttgaattattgatttccgctatgtcaattgttaaggacgattgttgcggcaaacttctagtaaaagcttcagtgttagaaagaactaggaaccaaccctttgcatgccattgtattttgtttaattaagagactttttaaggtttaattaataaataaattaaattgtaattttatttgataattaattataattattaaatgggtaaataccaatttagaccctgtgttttgcaaaagttacagattggaccctgtgttt

SEQ ID NO: 377890 - DNA, 1305 bp, Cannabis indica
ctttctttcccttgtcctgagtgacttgtgctacttctttgatgaatcagctgcctgcataggaacggtgtcactcttcctcttctggggaatcacaggcgttggcgtcgcaggactaaccttacgtttgcagttgaaaacaggagattgcttcaagaaagtcatatctacgagaagaaccacaagttaaaatttaaaaaggtaaaacaagtattcaacacactagattacattatttaatgtcggtcttgaagtctgttcagatagacgcttatctattctttccttttacttctcaaaaggctccttatacactggttatcgctgaagtttagcgtcctttgggataagcgtgtgttctcgcaactttgcgatggtacacagcagacgccagtcatgatcttgcacgggaaggccacttaaaacttcagtgatttctagacgagttgggttcaatacagatcaagctcgtctatctgcaaaaagaaaatagaaattagagtctataaaagcaataaaaataaatgctaagtataaaaatatgtgacgtacgaggtcagcaattaaagtcaatcctgaccccttgcatcttaaacgcgtagaaccacttcaatttctaatcccccatattggaaaccgtgccttctaccccattaattttagaatttgcacatttaccaaagcagtagaagccattatcatggctggcactatttatatcgtaaaagaagtcaaaatcttcaactgttagctccccttgagcgtactccatatacatcgcataaaaccctaagattatgcgataattgttcgaagttagttggaaaggagagacgtcatagtgagataggatatccttcacgaagggatggaaaggtagcatcaccccgcatcggagaatgaggattgaaaccactacattttgagtggggataatcactgggttcgtaaaagggagatgacgtcgctgtgttggcgaaggttttgaggtggttgtgtgaaccaagttcaaccttgcgaatgtttacaaatcgaacttcttgactcgcaagaccagatcctcgcatgagaaaggtttgtttaattgagtattgtcaaccgaatctgtctcgcttccttcgccatcctcttcatcctcggtatcgtgatctggcacctcaaaatcctcacgcatctcttcaacctcagtgtctagggcatgccttgattggacaagatatccttggcctgacactgtaaactcgctatcgtgcacttctacagtaactggttcagctaattcttgaaccatcctatctatctcat

SEQ ID NO: 377891 - DNA, 14207 bp, Cannabis indica
tatattgaatgtacgcatatatggccaaagttatgtgtataagacaaactgggttagacctgatatatatcatcaagataaaccactgaaagaacataacgtatgaattacatatttatgaatagggttatgcgggctaggcataatcaggttagactcggtaactataaccgagataaaccctactaaggccttactgtaaatagacgtgtaagtataacatgtgggtctatgctacatagacataaatagacatgtgagtgtaacacgtgggtctatgtcggatagacatatataggtgtgtgagcataacacccaggtctatatcaaatagataaatagtttggtggcaccattacttatgtgctatatatatctattctgtatatggtgatttataccatcttgctaagcttggctcacgggggctctactgtacagaaaaggataaactagtcggtgatctacaatgagtgtgagagcatggcgatctgtgtacatttttgtgaaaatatttacgggatcccgaaacatgtatcttttggttatctataaagtctaaaattattacaagttttattttcattctatttcaaattaagtttaaatttatcgcgcttatccttctagtaatcctgaattaggggattagagtttcataatcggttggcgtagcgtgccaattgttagggcattacaaaaccgctagccactataactttaaagaaagtcttagattttattgttaaaaacatcatttgtcgatagagtgtcccatagaaaattgtatcagacaataataaatagctcaacaacaatatgttcactgaattttgcaatcaacacatcattattaaaagattttttacagttcctcacccataagagaacaggcaagtagaagctgtaactggatcgaacaacttccagaagtactttggtcacacaggaccattgagaggacgaccaccacgcaaacaccatttgctttaacttaaggctataaagcaatgttgcccgttgaattggaaccaccatcacgcaagagaatatcctacaaccaagaagtaaaccacaccctcctaacagaatcccttgatgaaatcgaagaaaagagtgattagaccaacttagaggtacacacctaccaacaaaaggtggcaagatactttaacaagcatgtcaaggatagaactttttgtgggagatatggtccttcgaagagtatttctaaacaccaaagaccctgtaggaggggtactcagcctaaattgggaaggaccgtaccaagttacagatatcacaaattcaagcacatacaaacttggccggtataatgagaaaatggaactaatactgttacgaagatattggaatggataacatctcagaaagtactatcaataagcttatttttgagaaacactacgcttaagaagtggttcacagacggtatgccgccaataaatttgataatttgtttataacacatcactcttaagtgcttttgcatggtatgccatgcaaaaatgtttgaatacttaagaaaaatatttaaagcaaggttaatgcaaaaaaattggaagctaagtatgttaaaaagtgactttgttacacataaaagaaaatcagtctgggaataaaggctgcccgaccaaccatatgtcttcatagaaaataaagccagggttaaaagctgcatggtctacaatatgtcttaaactgaatggcctttaaggttgtgcaagaaaaaaaaaaaaataagagctccaaatctctcgaatatcaaaaggagttggtgggttcaaattttcactagcctaatccttgacagtaggttcagaggatagcccagtaagagggtcaatgagatcaatcgtctgggtgacatcatcagtagcctggccaaaagagacagcatcgtgaacggagatatcctcctagggggtttagatgcctctaattcctggcccaagccactagggattcaagcaacctagagtccatgtatccatagtcacccttgggattccacttccagaacttgtagaaggttttaatggccaagttgccatatttttccttctccgtatccttggtttgctctaatttttccaattttatcttaacatcttcaacttcctccttaagtttaaaatctccccattctaggaaattaaaaatagctttctctttggtcctgcatctcccttgcttgcttctctgactcttccatgtccttctctaactttgcggtagatggcatgtgttcaatttgctgcttaggttctttgacaagatttttggtagcaaataactatttgttcacctcatcaagctagacctccaagtcttcgattttcttcttggcggtggtgtcagtccctttgaggcaagcataagtatgcccaaactttaaggtttcctgaaacaatgaagaaaggaaagttaggtcaggaagtacggtatataaaaatgctcctggcagaaaagcatcacttattgaggaaagctcctccagaagacaagaagccaaggccttaaaagacccgttgtttgagtcttgaagttgttcccgacctgggtgagacacctttccatgtagttgtgaaccacctccatagctttctctacactggctggaggagatgtctaactggacgtcatgcgatcccttagaggagtgggacgccccgccaagtttcccaccatgggctggttagtcagaggagagtaaggaggaggtggcagaagactcgagtgggcagagctagatccctctttttgagcagccttggctggggattcgtccctagaagcccccattggtttcctcttgaaaaaaatctcataatttggaagcaatacatgaaaagacacaagatgcataggttagaagacatatcttaaagaacaagaataagagtgcaagttggaaaagatctttacccttggacagctcgggattatcatcctaaagtaggttgtacggaatgtcttcatcatttgaagaagactcttcactgttttcatccaatacctctaccttttccctccacaacagttgggcgggcaatcctaacaaactctaatccttaagcccttatgaggataggagcctcttccaaagattcacctctctaaagcctctctgaataactctctctctctctctctctcttggtttctatcttcttcttaaaaattttattagagggaacttcgacttaaggtactctctcgttgccaactcacaaatattttgttttgaagccaacaaggagagcatatggttagctctatccctaagcttcaatgtaggtattggccggtcaaaggtgggagccctccaaaatgaggtgcacaccctctgcaccatatatcataaataatccttggaatacccacaaatcttgaatatgaaagaataatttatgctactcaaccaaatgaagcctagctggctgaaataaaagtaacctcgtcggccctaataagggttggatttcaaattaaaatactaactgatcttgaaaggagtaggttgcggccagcccatctaagcgtataaaatgaagagagcaaccaagaacttgatcccctttttagtcaactatgctgggtagatcccttaatagttttctatatccctgaagtatgaatgaagtggcaaaatagctccttgctctgggtgggaaccaaaccatgtcatcctgctcataggaggggcatgtggaaggtattcctcacctggcaggtcagtgtttagatccccagccaactttttgatcagaaggttcttaaaccttgcaggaagaagtttggattgaggagacacccaagcagcctctggctcccctctttgaggaaaatgctttggagttgccaactcttcctcataatgatcaatccccacatggggtggctccccattttcattaagaggctccctagcctcattgtacccctaggggattatctgtgagcacatcacactttttgactatcctctaggcaggccaccatttttccttaggctctacaggcctctcaacctgatcagcaggcctctcaacttgatcagtcagtgcaacctatcccattgccattatttagcaatataggggtcagttgaaggggtgtcatggtaggtttactttgtcttggcgaggattggatcctagccgatataccgcgcaacagtgatgacaacttagcctaaaaagggtttttttagtaacgaagatctacatccctttggcatgatgtctgtgacacctagacacctagctggacgatatatgtctaagaagttttgaggaatttcctccaacctcagttcagttgctaaatgaaatgtccatacatctctcgttttgatctgttcaaagtagtgataatgttgtaatcttcggcttgggggaaccactattgacttctaagtttgaataactacccaaatacctagccaaagaatcactagatgatgaaccacttgcttggagtacgagttgatcctcaaagagaaggctgaggaggtctgcgtctatccagtgttgacctccttagtagaagcgagggttcattttgcaaaagggaagagggaggtgaacatccatacaacataaaaaccatacgggcaataccaaattagctggtcacaataaaaacaccatacatagattgaccagggttgttaacagatctaaataacctattctacaaaaaaaccatgaaaaccaggttatttttattcttcaaaacccatgatcaaagatgtggaaaacaaggaaaagattcaaccttttttaaggtagaatccctacattattctaccctaacatgccttgataacccacgaagggtgggtgtggaaggaagtggaggcttgatataggtcttttttatttaattcccccccccccccaaaaaattaaatggaaaatgcattccctataaaatttctataggaaagtgaaaagtgaaaaaaaaaaatccatttatgggggattgaagatgtcaacacgatcccccataaagtgtgatttgaaactgccattatgacaactaacacctgatggctagttgaatcgactgaagcgtgaccgttcacttcttcatagaaaagtcaccagagtaccaattatgtggagcttgcatgtctgccaacatctgtacaagtatcaaaagtccctatccgaatagatgtttgcacgaggacttagggggaaaatgttatctcaaagttttcacatctaatgtggcacttacacgtgccatagtcgtgctgacctttaacatgacaagagacttccaggcagaaatgtacctggcagatcccatatgatgctgatatccatgtgctctagatgggcttctagaaagaatctagctggcccattaacatgctagctagagaaggcgagattgacttaccttgcaagaatgtttcacaagtaatcccacaagagagacaagtctcggaaagtgtctggccaggttgtcaatgtgttggctaggagaaacgatgccatgaatgatagacaaggctacaaaagccttgatttctttctcaaacaactttcacaaatatctttaactgaatcatacaaatgtggatccaaatgatctacccaagattgtaggagcttcaacagatgctaactgtacctaataatataaaaatatctacttttggatcacgccttctatggagctaattgtatcaacctccccccatataaatagtgagtgagttcacaagcagaagagacttgaaatcataatctcacacttaagagcactttgtcgaatattctctgtaaacatcttgagagttgtagctagaattcactttatcttccttagcgatctgcattgatttatctcataattaatacaactaaaaggggagtaactcaatacccataactaagggatcgaagctctataattctatgtgttctttctatttatttattatccttaactccttattggtgattaattagaatttgttaactccgacttagttggcaattttcccatccaacaatgtggatcactgtattgatcatcattatgagcagacagtttctcccctcctagcattggttaggtagagtattagcttgaaccatattggccttgataagaagatttattatttactttttctagcacaagggtaaaccatttgttgtatgagcaacattaatacaaagaagataggtgagggggcttagatccttaagagaaaacatctgatgcaagtgcttaattaatgtattgacaacaagagtggagttacttgctagcaatatgtcatccacatataccaaaagaaatgtggagtaaccactggtatgtctataaaataagcattgatcagcctttgcataggtgaaaacaaaaagacaaaagaataaaccttaacttgtcaaatcatgctcttggagcttgccttaatccatagaaagctttatgtagtttgcaaacaagatgaggattcttagtgtcaataaaacgaggaggttgggccatataaatctcttcttgaagctcctcattcatgaatgcattatttacattaagttgtcttaaagacctattgtaggacaaagtgatagttaagacaatcttgattgtggctggtttgatcgctggactaaaaatctcaattcaattaaaaccattttgtttcaagaagtcctttgcaacaagtcttgcttttaatttaaaaatggtaccattagggggaaagggtaccaaagtacatgtacctttcttttggagatcatacatctcacatttcacggtataattctgctgtggatgctacagagctgctttgtaagagtgaggttctggggtaacaagaagaaccttgggtttagttataccaactttagcctaggtagccatatggtgattttttgataggagcagatggtgctagggtcaatggagtagagctagtagctctagtattaggtgcagcattagttggaagagaactagtggaagaagtggttgtagtagtgttgttatttgagttagactctaaagtttttgcagtggttgaagaataatcttgagcaggattgtgtggacagtgtagcatagggaaagagatgttcattgaaaagaatacctcttaagatgtaaatccttccagtaagggagagacatttgtaaccctatgtttgatactatattcaaaaaaaggtacacttaatagacctatatttgagtttatttttgttgtaaggcctaatatttgggtagcaggcacaccccaaaatgctcagctgggaatagtctatgcttgttgaaacaaaagggtgagaagtgttttattgttcaaaataggtgtaggaagactattgacatgataaaggcaaaagatctaatagcttcatcccaaaaagataaaggcattgaggcatgagtaaggaatgttaaagaagattcaattagatgactgtgttttcttttgctacaccatttttgtcatggttagtaaggcaggataacctatgtgaaataccattagttaataggtaggattgaaaagcttggtactctcctctccagtcagattgaagagacttaattcaacattcaaactctttttcaaactatgttctaaaatctataaaagtttaaattgccttagatttcgctttttaaaaaaaagacccatgtatacttactataggcatcaatgaaattgatatagtaatgatatccacttgatgagaggacaaaggaaggtccccacggatcattgtggattaatttaagaggctagatgtacatagtttgagaatgagtaaaggggaacttatgaatttatcctttacaacaagcatcataaaaaatagcatatgtgttattattgctagaaatattacacattgaaattatttgtttaactatcctattagaaggatgagccaaccgattatgccacaaggaaaaattggttggttagttattgcatgagctctttcacgcatgatttataaaaaaaaatgagagagttggtgcaattgaaggaggaatttgaggagatttggactgaagatgagtaggaggaatgacatagagaccatgcctaagatgctcttccattacagattcttggagtccatatccttgacaacagggtgagtacgataaaattcaaaagaagcattattagcatttgtaaattgggctacactgataaaatttttgataatgtgtggatcatgaagtaaatgattaggagtgagtgttttagaggtataagaagtattgaatagtttcttaccaacatatttcatgttcatacatgcaccatgccccgtacgcgtctgctcaaggctaaaagaaggctctttctcagtgaagttgctctcattggcaatacaatgactagtggcccagagtcaggataccaagctggatcagatgtcatgttaaatgtagcaatatttatagagtattgatcaacattagcagctcctactccagagaaatcaaaattaaaacattgaaaatagtgagctgctatgtgacctaacttagaccacaactgaaatactgatctagagccaacaatgttagaagctaaggaagaggcattactagggagattcatttgaccacaacgaaaggaagctgaggaggaaccaccacctcaaggattaatatcataagggttgattagatccagagttgttaaagtcggaaggtccagatctagtggctctacccttgtttgaatgatttgtggccaagttaactaaatcaaagccacgatgatgattctccatcatgtgttcttgagaaagtaacaaggattcgatctcaacaaccgtgtaaggttgattcttagagctaaccgagatcacaaaggtgtcatactctgaaggaagacccttgaatatagtagaaacatgttctttaacaaagacaagagcaccaaaaagacaaggcaatccacaaataaattgatgtgaattaaataactattgatggagagtaaagaaaggtgcatgtcagctagagtttgagtggagaaatatacctcaagtgtattctagacttgagctgaagtctcactaccaaccacacgagtcagaacaccttcagtcatcgaggagagtaaccacgagtataggacttgatccttccgctcccactaattgtattagggattgattgtgtgagagagacggtcttgttcagagagaaatttcttaggtggttgaacaaatgaggaaatatagtcaaacatctagtgacctctgatagcggacaacacttgaggacgccatagcaagaaattgttattgtcaagcttgatagagatcttgtgagaaagtaggatagaatgaaaagttgtggctagagtagcaacagttgctaccagagtagattctgacgattgaaaataaaaaattgagatcgtaatgaaacaaaaaaggaagaaacaaaattttttgaaagtgatgagaaaactaaggctaaagatacaagtaaagttccagttgggccggtgacaagggcgcaatccaagagattcaaagaagaactcaacaacttagtcaacagagttttaaaataagaggagaccgcagtcaacactgaaggagaacaaagatttatgcttctcattaaagtagactcaatttagactcaaattgagcttagcacgtttttcaagccatttggcagctatcctttttaattttgcttcctttattttgtctttgttttagttggaagattttctttcttttagtttccttttttttggttgtaagttggctatataaagccttgtgaacactttgaaaaattagaatattttgggaataatattttgaaatgttttcttctttagttcttgagagaactattcgaacttatcaaggagtattccttgtggcattcaacctgacttatcaaatggatttccaccacagattgtggtgtcttccttcataccaaggttcatgcttaactaagcattgggtcgcagttccacattaaaatttcgagaattcttagaggctgccataattggcatcgggtttcatcacaattgttgtgtggttcatatcgaaaatgaaactactctgataccatgttaggaaaagagagagagagagagagagagagagagagagagagaacaattgaagaaagaatgagtatgtacattgatgaatgagcagtagctctgcatatatacaagttacaataagagaagtaatagaataacaaaactattatcatcttagcttataataattgagataaatcttagcttataataattgagataaataactacctgtaacaaagctaactaacatccataatagtcctaacacaattctctttcaagttttatcacttatactctgaaagtagattatgtaccagttatcccaattcagtttcaagttgtaccatttagttcatagccagaaataggaaatgacactcccctcaattttaaaaaggtaaaaaaatggaatgtataattttattttacatattgtttctctaaaaacaaattgcctcattaaaacatcgagattgacattcaagagggaaacgtattaaggatgaagatgccattgataattgttatctattatcacaaaagttgtattagactacacaaaactaccatgctttatgatcatcttctagcaaagttaacttagctaactctaggataatgatgataggatacatcaaaatatcgttactgttaggtttatttttatgcatttttagagtctatattagtgtgtgttttagtatttttattactttattattcagatttatgcttgattgttgttgttgttgattttttagaagaaatgttgggagatttccatttttggtaattttagtgttttgcatagcctaaactaggttagtaaacatgtcagcttgattgacatgtgtgcttatcatcttcacaccaaatattttcgcaacaatgacatctctgataaagtataactttatgtctatatttttggatttctcatggaacatcaaatttttcattaaatggggtgcactttgattatcacagtgcactatgatgttatctgagttgaatcccattttctttgtcaatcatgtgagccttatagcttccttgattgcttctattgcagtcatgtactctacctcagttgatgagagtgctacaaccattttaaaggttgatatcaaacttatacaccctcctagagctgtaaacacatagctagtcaatgacttccttgtatcgatattttcaacaagtctaaatctacaaattaagatacttcttcctcactttgttttgtttctcctccatacaccagacctgtgctcattgttgctctaacatatctcaaaatttatttgagtgtagtctagtgatgttatcataaatttgtaatgtatttgcttatcacacacatacaatatgaaaaattcggtcttgtgtagaccgtggcatacatgagactacgtacataactagcataggggacttactctatttttaccatctcagcttctgttttgggagatttttcacacgacactctaaaatgcggagctagtggcgtagaaacaagcttagcttgttttattccaaacttgtcaatcactttctaaagatagccttcttaagatagagtgattacgtgtggcctattcctgaaaatcttaatgccaagtattcttttggctacacctaggtctttcatcttaaactcactcttaagttgttattttacctagttcataaccaatttttccttgccaactaagtatgtcatcaacatacaataatagatatatcttgtttaagtagtaaacacatggatcatgtttactcttggtgaaaacaattttcataataaactcatcaaactttaagtttcattgcccatgtccttgctttagaccataaagaaacttttttaaaagacaaacctggttgggatctccattgtcatatcactctagttgtttcatatagatcttctcttccaaaaccccatgtagaaaagttgttttaacatccatctactccacctcaagataaaattttgtaccatttccataataattttgatggatgtttggtttcctacaaatgagaatatatcattgaaatctatatcctgttaatgtgtgaaccccttatccacaagcctaacattgaatcttgttccttatatccctaaaattctttctattaccctgaaaatccctttgcaccctatcaatctctagtttgcaggcctaggagcaactatcttggtttggttcttcttaaaggacatcgtttcttcatgaacagcttgtgaccaagctttcccattcttccctttaatggcttcttaataacactagttggttaaaaactttcaatttcttctgcaacagccaaggcatagactgtaaattcagcataggcatattttttagtgcccttatgtctctcctttctctatcttaagccaactggtaagtacttagtccaccttgagttgcatctgtgtgtaacagatttattttttgttgaatcatttggtaggatttttataatttgatctaatttggtaccttgttccacctgaaacaataaattgtcaccttgtgtctgagatgtaccagctattgtatcctcctttcctttaatggccatttcatcctctttaaacaccacatctctacttatgagatacttcttgtgacctggttcaaggcaccctataggtgttggttttatggtactacatcatgtacgcaatagacgagtttcgtattatgtgattatcattgtatcatagcccaaaggatctccagatgtgtatacattaaatcaaagtaataaaagtactaagattagagtatacctcttcaaccctatcagggtatcctcaaaagttctcgtatgttgtgccccttaatctagttgatgaggaaattgcaattggactcacaccagtgtcatccaaattgatccaccacacacaaggaatagtgtgggctattaggataaagtgtataacctatgttctggttgagtctcaacacatgagtaagaacaatagagagaaaaactaatttacttttctctttgtatatttcaaattttgtagtataaagaagtgttatgattactcaaatcaggctcctatttatagtagttaaatcattatttaattttttaaataaatagatatctataactggatttggttactaatatttaagagggaatctctcaaccacttgagagaatatctgaacatcctagaaatatcaataaccacttttcaaatagatattgtaattgttatatccgaaatttggttaccattttagtgaaggacatgtgtcaagataaagggagtatggatcgatgaaatcacttttaatggaataactcattaattgcgtaagtggcagaatatctttggaactcgctgtctgtaaggtcttatgtgaggaaaagatatacaaattgttgtttagtgtattaacaagaaaccatacgtcattggatgtataaagcgagacatcaactctgttacatctgggaagacaaaagggatgcatatcgactgtgataacacttagtgtaaaatgcaaaaaataagtacaacagtcgagtgcactcgagacataataagcgaggtgcctatctcactataggaaggcccattcctgtaacttcccccagttaacttcagacatcttctcaatgagacttacaatcttgacgagtcagaagctaacattcaaatgagccttgagaagctctctgttaataagaactgcaattgccacaaatgaaacgttaagctttcaaacaaagaagcaacaaggcgtgcattgtcgatctcggaaggataagaaaaaaaaagctccagctcactatcaaggtcattggaaccaagttcctgtcgagacatccccaaacgctacaattaaagacatgtttaaatacacgatcattttgacccagtaaaactgggaaaatcacagttgtgcaattttcaaccccatgatttcaggggaaaaatattgtaaggattacaatcaattttgtaactaactgcctactatatgattataaatagtggaaagtaagatcaaaaaagggacaaaaaaatcatacaaaa

SEQ ID NO: 377892 - DNA, 1787 bp, Cannabis indica
aaaaaaaaaaaaaaataaattctcttttacacaattaaaaacgataaaataataataataataaaataaaaaatatctctccacattcgtatccctcatttgttttagcagtcgagtcgagcataccagggccaccccaccacgccattgttgtaactctctgcaaaatcaaaatctgaggtgagctatctctctttctatgctctgttttgcatctttgaaattttttggtttcaatgcttgatactgaagacttgcctttgattatttttgctcttgatttgggtttaaatgcttgatgaagacttatctaaaacctctgttgaaccataccacctcgccattgctcaccttctgctctcaatctgtatcatctgaggtgatgcctctctctctctctgagctctctttttgggtttgaatgcttcatctgaaaacttatatatgttgtttttctgccaatggacttatttttatttttatttttatttttattttttatacgtattaataatttattctcacagcctataagagatcaccagcgtggccattttagtcaactaaagaatatcatactcacaaacttccgattgagttgactctgtagctctcatccttgtgaccatggcttcttcttcctcctcaaccgctatagtacccgccttcctttccaccaaaactctaactctctttggcgccatacccacttcgacaagaccctcctttctaagtttaagattaaggccatcgccatctcttaacaggcttctcttcaaaatcccatctggctctgtcaaccgaagctcggtccttactggcttcagatccgtttctcctgtcatggagtggcaagattgcacgtaagtaattccaatctcttgtttgaaagttttaatctttagcttattctgctttggtaatcttcatactacttggaaaagaactcttatataactccatcggatgatttagatagatatataccccccatgctttattgggtcaggtttgatgtggtaaaaacaagatctagtaagaatttgaggtcgaacagtgagccattattaactaggaaaaacatgttccaatgcagtgttaagagggaaatggacgtgcctgcttcagttgcctataaatgttactctgaccgtgaagccattcctcgttggatgcccttcatttcaactgtaaaggtgtgcttcttaaacttaaaacactctttaaaatcgccttcttaggggggcggcagggctataaaatatagaaagaaagcagaatttggatgcaaactagtcaagtgtctcgggtgtttttttcctattacttttgtttgacaattgtctccttgcttgggaatttaccaacatttttcacccaactggagttttagcctgtctaaatagctcaaatgtcaaatgtgtaatttgttcctgctaggtctgagattcgagtcttgtcataagttttggtaactaaatattgtaaggtcagttagggaaagcttgattttaggggaaataatgttaatgctaactaggagtgttcataaaaatggaaaaaccgaaaccgaccataaactgaccagaccataaccgaaatttgatttcacgtcatcacccaatttggcggtcggttttggttacaatttttttgacatagccggtttttgaaaataaaaaacaaatgaaacaaaaaactgacaaaaccgtccaaaaccgtccatactgaaaactactaaaaatcgccaaaaaccgtacggttattttatacggttataatttcta

SEQ ID NO: 377893 - DNA, 1293 bp, Cannabis indica
gagagagagagagaatggggttttaggaaataatgatatattttacctatattgaatagattaggtttagaaaaaaaaattagtccaataaatgtataattagtcaaatttccctatctatatcattttacacatacatatatataattttacacatacacatatttacatatatgcacatatataaacaaattcaaaataaaataaaataaaatttatatatatacacatatacactacatacccacatttatataaaaaacataaatattaatatcataaaaaatacctaaaatcaaagaggtggtggatggtggtggtgcggtggtctacggttgtggacgacggtagatgatggtggtgcggatggtagcgtgtatggatgatgaaaagggagagagaaagggagatggtgcggtgcggtgcgatggtggtggtgatggcgtggtggtggtatggtggtggtgggggacgatatttaaaagaagaagatgaagaagaaggaaaaagaagttgaagaagaagaaatggcgaaaggggcttcgtcctctgaaatatatatatacacttttgctggcatattcattgtgccggcaaaagcgaagaatgtgccagcatatccatttaaaattaatctaaattgaaacggtgtgtttttggcaacacttttgccggcacatatatgcgccggtaaaagtattcccatctaccaccttttcatgtaggattttttccacatttttttaggactttttgccagcgtaaaagtaacatttccccgctaaaactaaaattctttttacctgatacacttttgtcggtgcaaatgtgcgccggcaaaagtttccccaaaaaaatttagctaggcggtaaaaattcccccaaaaatttattttgctttttgttggtgcataactgtgccggtaaaagtgaatgaaccattaggaattgtttgcaccataaggcagttcatttcacaggtttagtcggcgcaatttataaattgtgccggtattaagtacttgtaccggtacaatattgcgtcggtaaagtgcaatatgattttgtttaattttagggccagcaactttccctagcaacctttgccagcgctgttggccaaatgcgctggcaaaagtccactttcttgtagtgaatagatctttaattttttgaaacttggtggtgtttggtttggtgtaatgtaatggtaatagtaatagtaatggtaatggaataagaatagtaataggaattgtttacaatgtttggtttgtagttggaatgaacatt

SEQ ID NO: 377894 - DNA, 8691 bp, Cannabis indica
aaaagataactgtgttattataaattaaagaggataatcatttacaataacagagttgatcgatggaggaaaattttccatccaagagatagactcatcccgccctagagcatattttgctaaacaatcagcaaccgcattcgcagatcgctttacatgagtaacaactatgttagggaaaaaggaaaggagactagtaatatctaatatcaaatcattaaaagaggaaacagccattagtttattgtttaaagcattggagaccataagagcatcagtttccacaatcgatacttgtagttgtaattgaagagcccaattaaggctgaggaacatagctttagcctccatttcgtgcgaagaatagagaccaacagtcggcatggagaaagctgcaatggcatggcctgaagagttccttacaaccgcaccaacaccaatagtatgcttagttgtatctatggcagcatcaatgttcagtttgaagagacctgggggtggtggctgccatctagcaggtgaagatgcaaccgcaggagccatagttgtagaggcaggagaagcagattctggttttttgtatcgtagttgtgccgctcgataattgttcagatagttggaagaaaaggcagcaagtgatgcagcaggtttggccgatttaccatgaacaacttgattccgctcagcccaaatgcaccagagagtacaaaaaatctgctccatttcagtttttgagtgtatagtggagaggtgtttaaggtaatctcccttatgtaaagcagtagccaagttccaatcgaaagttgaagaagcataacgccaaacagccgttgcatatcgacatccaaaaaacacatgtccaattgactcccaagcattacggcataccgaacaagtagcatcagtaataaccttctttttgactaaagctgtagccacgggaagagcatcatgaataacacgccatgcgaaaatcttaaccttttctggtagttgcagcgaccaaaaaaatttccaccaggatgtgtcgtttgtggaacttgatgaattgttctggtctgctagcttagttgcaaagtggtatcctgaatgtaccgaatatacaccattagtactgtgatgccatatcagtttgtcagagctaggaaagtagctcaaggggatggtaagaatcctttcaacatctgtagggtggaagcattgttgaagcagattaacattccaatagcgttcttcagtaataaaattggccaccacagcagtcggaggtccttgatataggtatggcaaaaaggaattaaaacctggcacccatggatcagatccacaattgatatttcgaccctctccaaccttccaacgcaaaccagccagcaacagttcccttccataaagaataccttgccaagatagtgaaggtgaatgaccatgaggggcatcttggaaggagttgtgggggaaatatctactcttcaaaagtcggaaaatcatggaggatgggttttctagaagtctccaagcttgtttagctaagagagcttgattaaattgctcaaaagagcggaagcccaaaccaccttccaatttggttttgcaaattaatttccagttgcgccaatgaattttagagccagattccgttcgtccccaccaaaagttagacatcattgattctagttggttgcacatggtaactgggaggcggaaacaactcatagcgaaggttggaatagattgaaccacagcttttaacaagatttcttttccacccgctgagaaaattttttcattccaactattcaataacctccaaattttgtctttaacatcactgaacatgagttgtttatctcttccagagtaggcaggtaaccccaagtatttttcatgacactcacaaatcggcatggaaagcgtctatggaaaaaaacttgagcagccaatgtagtgtttggtgagaaggacattaccgatttgtcagcattgagagattgaccagacgcccgatgataaatatccaagactctcttgatggcaaggcatgactcctcattagcataacaaaaaagtaggctgtcgtccgcaaatagtaaatgagagatgggatcggatcttcgtgtcagcttataaccatggagatgacccatgtcttcttcttgttgcaacaaacgagaaaaaccttctgaacaaattaaaaaaggtatggtgataaggggcaaccttgcctcagccctcttgtaggaataagggaacccgatgtttccccattcaattgaaaagtgaaactgttcgttgacaaacaagtcatgataagtgtgatccattggctgcagaaacccattttttccattactcgctggacaaaacaccactcaacccgatcgaaggccttactcatgtccaatttcattgcagcaactccctttcgtcccgtagttctgagtttgattccatgtataagttcgaaggccaccaagatattatcagtaatgagacggtttggtaaaaaggcgctttggctttcagatatgacatgagggagaaacaccttaaagcgagccaccaacactttagtgataagttttgagataacattacagagactaattggtctgtagtccttcacatagactggtttttttttcttcggaatcaaagtaatgatggtggagttaaggggagttgggtcagcaccgtggttaagaatgtttagaacagcagccacaacggaatcgcccacaatgttccaattattttgataaaacattgccgacataccgtcaatcccggggcttttatcagagcccattgaaaataaagcttcctcaacttcagaccgagtgaaaggtttggcgagttcaaagttcatgtcatcagtgatcgtacatggaattgcagtaagaacggcatcaagcgcgggtaaatcaacaggctgggattgaaatattgcagcaaagtaatcttgaatagcctctgacatttcgtgctttgaagtgactttaattccggcttcagtagtgatagagcgaattttattattggactttcgtgcagatgctttggagtggaagaacttggtgtttcggtctcccaactgaagccaatctatgcgggatcgttgctgccagtacatttcttcttgttcaagaagatcatcaaggactgattcatgtgctttgagagaggcggctgtagcttcagattgtgtatttagattattcagcgctgccaccgaagcttgagcatcagtaatttttcgtttcatatttccatactttcggatgtgccatcgttgaaggtgaacagcacaattgtccaattgctgaatgacatttgagatgggatcagtagcaaaatcattacaccaacagtgattgataatttctttgctttcagggtcagcaagccacaatttttcaaagcggaatcgagtgtgcggtttgaggaggtcatgatcatgggccacggcttttattgttgcagaaatagctctgtgatctgatgtgaaaaagtcgagatgtactactggaggtgattcgaaatgttgatcccaaaaggtatttgtgaaacaccaatctaatctttctttgatagtgatggtggctgttctatttttaacccatgtgtaatggtttccttcatatggtagctccttcaattgacagagatcaagagcctgacgaaacccttgaatttgtgagtcattacgcagagctccaccagatttatctctttgggacaaaatttcattgaagtctccaatgataatccaaggtgaagttggagcaatatcgtgtaatctcttcaaaagtgtccatgatagtgctctgtttgatgtttcaggggctccataaaaagaagaaaagtgaaaggagggaccatcttcaaaggacatgacacaatcaaagtaagtaggaccaaaagtgttaagggaaacattaacattgtctttccatagtagcataagtccaccaccaaggccaacgcgtggtgattccagaccgcaactgaagtttaatgattgacggaaccgtgagatagagttgttactaagacgagtttccataagaaaaagtacttggggtgactgctgtttaacaagcagtcgcaaatgtctgaacgctttgggattccccagccccctagcgttccaactcacgattttcatggtgaagagcggggttgcatctcaacctccgctgattcgtcaatgaaaccatcagaatccattattagagaggaaacaaaatggtttgagctatctccttgggacgaagaaggagcagccatggagtcgtgttggctacggcaccgttttaacaattgtcgcatagaaagttggtcctgctgacgctttgattgcttgtttgggttatagttttctttgtcaacaccagaattgtggtatgtggaaaaggatcggatggtaggaggggtagtggagaaatgggagttgtgatttggcattgggagagaattgagagggatgtttgtatgagggaagtaagttgttggaggataagtggctacaggtataaaagaaaggtgttgagttccaatatcaggagtgaaaacattgtctaaatgtattgtggtagaactggtgtggcttttcagatcagcggcaagtgtagtaggatggatggcattatgtgtagtgttggtggaagaaggggatatgccctgatgagaggagataagaggggtagttaattgatggttggaatgatggtctggagttgggcgatggtggacagcagtagaagcaacaaaagaaggattaggagaagtggcattcggctggtgcaaaaaattaggagaggaaggcaacaacagtggagaagaaagggtctggtttgaggtttctccgtgtgataaggtttttggttgaggggagaacattttgttaagttgtgggagtgacgtagtgatggagtttcgagcaaggcgagtaagaaaaggccaggcattcccttttgagaagtcttgtctatatctgtcatatccattattgggtaacttagcacctttcatccaagggccatattcaaaatcatcattgtttccattatccattctctccataaaagccacacatttctcaaatggatgaccaagacgaccacattcaaagcaaaattcgggtagcctctcataacggaaatcaacccagaaatcatccctgactcgtggtagactaatcattcggcctctaagcaaaggctttgaaatagggagtttcacacgtattcgcaagaagggaccccacccttcatcaagggagtcttcatggacatcaacaaattcaccaacaatattaccaagtgccttagcaagtgattttgatttgctaaggaaaggaagacgataaatttgtacccaaaatggtgtgaaagccaaatctgtgattgagacattttgcagaacatctggcgtgtacattacaatgagatggttttgaaagtgccatggttccttatttagaactcttagtttatcacctgcacatccaaaggtaattttgaacatatcatcacgaaattcagagacaatagtcagataacggcctttccagtgacttgacatttggctgatgaaagtaggcttatggatgaaagattcagtaacaactcgggcaagtaatacatggctttggtttgaagcagttgcagtcgtggcagaggagtcctcgtcagtgaggacaagggttgatctttcctcatcagtaagagaaagatcattttggattgagtgcagaagagggtccataatcgggttgaataggcggctgaaaacaaaagtatagcagggaataggggaactgggaatagtgtatcgtgagatgaagaaggaagttacttaggcaagaactgctctagatcaaggagaaaaggataaagcaaggtagttgagaaaaggaaagtggttaaaaacccataacggcaacagacctaagaaaggcacacatattctcaaaaccataaatactttttttgagtacaaatataactcccgtgtccccacatactaattaaaagatattttatccataacactttaatcgcaaattttaaaaaaataaatttgtgtcgataacttggtatctccgtttaattgtaacggtaacggatgaaagagaatgaaaaagatgatccgagtgggcccaccgcgtgtgacagcgttacaggtaattttggcggtaagaagggattttccctcgcaaatttcaaaacacggcgcctaaacccatcttcttcttcttcttcttcttgaaaatctccgcatctcatttctccattctctcccaatctctctaccatggatagcgacgacgaaattctccctttttcctcccccgagggagtttctcctccagtccgcgaaagaaagttgaagcgcttgaagaaagcaattagggtttcagatccccaaatcgagcagcagtctgatgttggatcttttatggcggaagctaattcatcccactgcgaaaacttaaactttgaagtagtggatgagttattggtgtctagttcgggatcggaggatcttgatgagggaaatgatcttgattctggatttactggtttgggtactgaggataatggtttgggggctaagagggttttggattttgggaactttagcgtgggatctggtgaatatggtgtagatcgaagcaataagactggagatggcagtggcgatgatgcttctgttgaggaaccggagaagattcagcttgattctgaatgtattgtggaacagaaggacaagaagaagaggaagaagaaagatgatagcggtgagggtaacgagactgatatcaaacgaatgtcggagaaggtaagactttgtcaaattctgagtttgaatttgcaatgagttttctcgtgtgcttattcttcccgcgcttatcaatctgcagaaaagaagagaacatctaaaacaactccacgctgaatctcagaggctgttgcgaggtatgaacacttaactgaatcttcattctatctaatgcataaacctcttacactcggctatctggttaaactatagtacttacttgaaaattgcacttttttttttccttgataagaaactagagacgcaaagtttaaatcagcaccacttgttcagaagcctatatcttcagttttggagaagattcgacaaagaaagttagaagttgcgagaaagtgagtattccatatctgattttgaatttgtaggttaacgaagtttataatgcggcgaagtgactcttgagtttaccattttttggcttggtgacagatctgctagtattagaggtatgtctttcattgacgatagtgacagtttatcaggggatgattttgtacacccaagtacagaagtaatcgagttagatgctagagaaggagatagagctccagcaactatagatgaggggaaagttgcaggtgggactgaagcaaagggcagtatccatgggctgcagaaggatgaatctaatcatagcattgctaatacccgagtaacagtttcacctcagatggtatgttactggatgttgacttaaaaaacatttctggctaattatttaatggatggaaacagtagatatctggttctggcaatttcaacttgttttacatgggtttttgaattcaggttatgaatgaggaatcaaagcaatcacaatcgtttcgtgctcctaatgatgatactcaggttatttttcactttctcacttaatggtttgaaaatgttctacattccagttagtttgtattacaactaataacttgttatttgatattgtaggatttgttttctgattcccaaacaagtgactctaaaaatgagacaccaagcagtcctttggaagaagcttttgtgccttcagtactcgcaatgaacttgaagtttgactctgcccctccagatgatgtgtaagcatttataattctatctcatccttggaaatgccctgtagcattttttcgatctcctattctgttgtttaatttatgctgtatacaatactaataattgctttagtcattgcaattggtgtatgctaatatttggatatgtttattaagtctgtcaatattacacgcacatactaaagtcaattataagaatgcacaactctgtgtttttattaattgcaaacctgtaaacacagcacttgcagtttttaataaaccacagttcccgcaatttaaatttagatgtcatttttctttgtagtacttctgatgaagaagaggttgatgatgacaaagagaatgttaatccccacccatctgaatcagctggtttgacttcatctccaactggtgatcctgtcaaagcttttgttgatgatgaagctgaagaagaggatgacagtgacaatgacctgttacgattcaaagataatgatgaagatgaagatgatgaagatcttgaagatcttaaagatatgatagcaacaggatatgaagaacagccaattgataatgaaagacgcaatgaacttcaccagaagtggcttgagcaccaggatgcaactggtacggaaaatcttctgcagaagttgaagtatggttcaaaccttagaggaccatctttaattgaagagaaagaaggtatggaagatgaggagtctggtgatgatgatgatgatgaagcatcggaagagttgactccatcaaatct

SEQ ID NO: 377895 - DNA, 3617 bp, Cannabis indica
tattaataaaacttaaagataatttagagaaattttaaattgctaatcatatcagattttaaaaatttattatttttaaaatatattttattaatttaaattataaaattaatttaatttgaatagatattttagggttttttaactataaaaattttcaaatttagaatattttattttattgagagagagactccattgtagagtgctttgagaaagaaagaaaactctataacttgtaagaaagagttgttgttcacactgagtatagcattgtaatgagactgtattttgtaatctctaccaagccaagcagaatgtaggagactcatgaacctggataaaaagctgtgaatatgctctttacgatttctgcatatttttcatttctctatttgttttaacttgatctgttattcatggtgcttggatatcttgctggtttttctgtgtgaatctctattttgttgcatagcatttacactttgaaaactatcatacacttcagctaatgatggatcaaaatactacacattacaggcattgcttaacgatactgtgtctggttacttaagccaataagcagtaaacattacataaattttgagtaattcctcatcatccatttccctttatccgaaactcaccagaatctagagtgctcagatgctaaatgaaagctttatcgttcatcctaacaggccccgggcaagataagtatggaaaacaaagtaaatgcataatacatcattaacatcatacacaacattcaactaaatttacaacaaaacaaaatccacctgcttttattaatgatcaataaaaccaaacaagtaaaacttcacgttcacaccttacaggggctctcatagtaacaacaaacaatgtcagtacacaaaacctcccaaattagaggctaaccagtttaagagagttggccttctcttgcagtgtatcaagcagactgtcaaaacttttcttgaaagagtccactccttcaacttcaagttgattaccaacatagctccaatcaattccaagcttctcgagtgcactgtatataccctcggcctcagagacatttgagtcaatcgtccttgatacggcaccatgatcaataaaagcttgaagagcctgatcaggcatggttgatacctacaaacgaaagaataaagttttgacaaatcaagcctacctaccaggaatttcacgtattccgaaaagctaaactatttctcagcctgtcttgaaatcatgaaaatatcatttgaatatatattttatgcaaaagacatcaagtttgactaactatatttattggtgcaagacatcaaatttgaattgtaaagtgactcaccgtatcaggaccaatgagaggtgaaacatacaaagtgtcggggtatgcagggttcttgacactagttgaggcccaaagcaatctctgcttcttagcacccttctttaccaaagcctcccaccttgggccagaaaatttcttctggtagagtttgtaagctaaggcggcttgagctaccgcagcctaaaatcgttatttagaattacatgagcaaattcttctacctactcaattctacacacaagactgaatgacaagtaattaaaataattcacctttccgcgaagatcaagggcctcaggtgttccaatcttctcaagcaacttgtcaataagagtgtcaaccctactaacaaagaacgaagcaacactggttactcttgagagatcatttagcccagaagcctcaagcccatccaaataagcatcgataactgcttcgtatctagcaatggaaaatataagctgcacaaccaaggaaacaatgtcaatatgctttcaaatgatacttgcaacattaccaaaaaaaaagagaagacaatgaaagaagcctagattttgggtgatagcacagtagcatagatgcttattatacgattagaataacatcctggtgcaaagaatggtccaaatactataactaccaagtgataagaccttagccaagagtacttacagtcacattgacactaataccattagaaataacactcttaattgaagggatgcagggagctgtggcaggaattttaatgtagacattgggacggtcaaccactttatgtaaccattttgctgcctctacggtcccctcagtgtcatcagcgagccttggtgaaacttcaacagaaacatagccatcagctccatctgtttcgtcataaattggctcaaaaagtttgcaggcatcttgaatgtccttcaccacaagttcccaatatgcagcttcgatgtctttcccagcctgtacaagctccctgtacattgattccattgaaacgagcttccttaagtttaacaatcttaagaacatgaaagtactatgaagcaaaattaaagcaatgtatataacaagtgcaagctaacttatattatataagaacactttatacctgaattggtcattgtaggcgttagaagatgaaattgctttctggaaaatctggtattttcatagattataaagaacaagttaggtggggttgcttgaaacaaatagatgaaaatgaaagattagggataactaatcagacaacattcaataaagaatataaaacaattggcgttgacccttttgttttatttacagattgcaaataaagaagtgagatttgtgcatgcatgttcgtaatcctaagtgagaacagtaatgaaagagaaaatgaaatgaggaaaataataaataccgctgggttgctagtgacacccctgacacccatttcaataagaggaagcagatcggtgactggtcggcagaggttatcgtaccagggactctgtcctccctttagatacagatcatggagaactgttttctttgttggagttccattaccaacggattgagaacatctgatgctacagtaccaaacaatcacaaaatatttaatcaaaataaaaagattaaaaacaagaagaaataaagcgtgaatcaatcagagacagagggacggggagtaagagatgaaaacatacacaaaggaagcgttgagtggggaattggtcgaaagagagagcttagaagaaagggtggcgtcgaagttggtgaggggtcgtctgaaagcgatcaaatagctgggttggaaagatctgggcttgaaggaagatgacaaagaggcagcaggagatgggtttgaaagcttggaaatcgtagccatggctgaaaggtagagaaagaagagatgagaacagggtttgagaggggtttggtgaggtctcgctcagttgctctaatggtttgtgagaggaaacgaagttatattataataaaaggagccagctttttgaggttgttggttttttttttttttggtttgaaatgacaaattttcttttttaaaaaaataaataaagcaaactaaacatagtatataggtaatccaattaccatgaaatctaatccaattatacaaaaatgaaattaaaatttttgtttttaaaaattaaaaatatgttttataattattttatttttgaattttaaaaataaaaaataaaagtgtgttcaataaagttcactttattttattttatttaagtat

SEQ ID NO: 377896 - DNA, 1994 bp, Cannabis indica
ttttaactgaaaattccaaacactgaaaattctgaaatttctaccacttcatttctctcctggctaaatattagacgtataagaataacttaacagcaaagataccttatcagggttatttttggtaaccacagctccaactgcacctccaagtgaccttccaaacacaactattctagatgtatcaatgtcagttctctgagaaagatgatccaatgcagcctaacagccggaacaaaatatatagttagaacatagctacgttataagcagtacatgaaactatattgtatcagctaacaaatacctgagcatcctttgtaattccgtgttgtgaaggaaatccatcacttgcaccgtaactgtttgtatagataagttaatatcattcatccaacaagtatataaaggcacaaaaattatatctaacaacactagaagctgtcatgcaccgatccaaatcaagctgcaaatgacataaccaagtcataaaagtgaaataaaacaggaagctatatagataccctctatatgaaagcatgaacacgttgcactgcaacctctgtagcattatacggaccatgtcaagtcggtgagcaatatctacaggccaatagtcaaggccgctcaaaatactattaaactggacatattaaatttcaagaaaactgtacataatataacaaagactacgacgacgataataataagtaggatactcccagcattttcttggaagaacaagagggttggacctgcaaaaccataaacacaaatttttaagcctaaaaaaaaacacataatatccacggataattcttaaatgattcaaaaagaaagaagactgtaaatttcacttgttcaattaacctaaaagcgtaattgacttataatatgcttgttagagaatcaaaaactagttcaacttcctaaattttctttacaattcacccaatggaatagaaacctaagctcaatttttctttccgaccacaaagttatacgacacaatcagatcttacaacttcaatcgaaccctaaaatgttcgactcaaacataaccataaccaaaattagtaaccagcttgaaattcagcaaagaagaaaataacgggttgaaagaaaagaaaagcggatcggacctcggcagtcgggaaagagcttgatgaaccaggcatgaaggcgtacgccatctgaggattggagccagacgtcctcgtaagagagtcggaggcgagcaggggttatggggtaggatttagtaagtcccggtagaacaggtacatagaccagacgctcctggagagcgaccagtaacgccattccggccaccaccaaacctcccactccgtacagcaaagcgttcacgtaagacaccattttcgagctggaactgaagctttggttctgtctgtctgtatagttattgagaaaagaaaaggggaaagggaaagtttcccccacacacacaggaattttttgttttgtttttaatttctggctggtatggacttgtgtttgtgccttttgaattgaatttcgcaattttccaaggaccaaaggaattagaaatagaataatattatcattattgttattacctattattattattattattattttttgaaatggaatattagaataatatttttactggattattttaaacaatttattaattaatatagatcttacttcaaaaaataatgcttaagacaacgccagttttcttaaaacggacaactaattcactaacattgatagagtaataatacgtgtacactcaatactatacatgataccgttttatgtacatatattaatattactaataatttgcgtgattaagtaagcacataaaatattgggtaataatttgttgatgcatagtgtcacgggctcaccttttcagggagcggaacacccgtgcggcaccttgacttctctaagccaaggtcagcctttcaaccatccgagtaacaatgagctca

SEQ ID NO: 377897 - DNA, 2341 bp, Cannabis indica
aaagggtattcttctagtccaccattaagaatagcaaagagatgtctcacaagcaaaatcatagtaaactgtgaaattcaaacaacaaaattaattaaaaaaaaataacccataaaaatgaagaaacgaaaaacttagcatagcagcaagaaaaaattgcattgagtttttcttaaatacaatcaagaagattaaccctttgtaaattattatattgaagaaagagtcaatggagatttaaaagaaacccatacccatgtggatatggatgaggagttggagttggagttggtcatatataagactaacgaaataaaatggtcaactgtttagaagtttaaggtaccccatttcatacattttcattgagttgtgcccaacttggcaacaaccaactatcttagtatactgctactaatctatcgatctaattaatactaataataagtttagttttcttttgttgaaaaaaaaacttgaccaaaaccaaattagatgagatgacagtttgtcatgaatgaaagttgtttaagtaaactaacttacaagtagagccagcctacgacagcaagacgcgcttctatccgcggcggacgtgcattgagagtggtcgttttccgccctcactcccacgctgctgccacctcttcttcccctttcttcttctcttcttggaatttgtaaactatctctgtcatagtatcaaatattattcatagttaataagaaaccaatctaattcaaatgaatattagcttttaaagaaacccttttgcttgaatatttaaactcaaaaagaaaaacatacccgaaacaaaattatgaagagaaaaaaaacagcttcttttagcttaatgtttaaatttaaagctacccttttgtttgataaagtgcagaaagaaaatgaccaaactttttttaataatggaaatttgtgtacctaatggttactgctgcttcaattagaggagaaatttttggaggtgctgtgtaccctggttcataattctgcatatacaataaaaacccatatttgtttttattagaaattttcacatatttgaaattttgaatatttcaaaaagaatgtgtaagtaatacaagtaatggaaaaaatcggtgtcccaaggagggcatataatttaataaaatttatattttactttatattaaaatacaagagtgaaaaaatatacatttatttatgaattttgagaaaagaactcaataactgaaaacagagtagttcttgtaaacataaaaagaaaagttggaagaaaaagacaaatttttagtcacaaaatagggaacaaagttaaaacgatgaaaacttggtttgatcaactcaaaaccagaaaagaagagagacccagttcagttttctgagatgaaatacagaacaaggagaaccccaaaccaaaacagagaaacccaaatcgtttgaattcttacatgaagacatatttcacaggttgtattccctttctcgttacaccatctctgtatacaatctctatgagcaaactgaaatttttttgaacaagaaagacaaacagaaaaaaaaaaaagatgagaatcagaatcaaaattcaaattgaaaaatattaataaaaataagaaacgaagaaaacagaggttttgagctttggcctttctttttttaccttaacagttccagagcaagcacaaggagcttccaaggtggaagaattttcaaattcttcttcgtggcagattctacagtgtgaaattacataacttgatttcaaatcctccataaacagtagtacttctcccatatttttaaaactttcttctctgtttttcaaaaattttgaaaacgaaaacaaaatttaaataattaaaaaaagaaaactttctcttaacttaggcaagaaaatagaagaattttattatgttttttcgttcacttggtttcttatttccctgcgagcttggaaggccagtctttataaataaaagagaactgaaaacgaaattccaaaactacccttttgtttttcctccaaaggagaaaaaacaaaaaatcccaagtgaaagaaaattatttgtaccgacctgaaaatattttggatgtggaaagaccatcatgtaataataatgccttccaatatgaatgtcaatatatagtttaatagagattttcttatagatatggattgattatttgttttattattttagtttattaaaattcagagtaattaatgattagtaattttacaagatgttttaagtaaaattgctttgtgaaacaatcctattatttttggtagaggtgtgctaattacaatctcttattacaattttttaaaatttc

SEQ ID NO: 377898 - DNA, 2700 bp, Cannabis indica
tttttttttttttgaagatagtacttctatggggtttaattctactatcattggcgaaaattggcgaagacaactttattattgactgctcttctttttctttttatctcttcaccacaactatttactggctaaaatgcgcctgacatagataccaatggttgcactaatctgagccgtcagatcatcatcaatgggaaattatatatatattttatttacatataaatacatcaaacaggactgaggttgtcatatatagtggctcttctaccacagtccgtggcccatcccggcatcccctatggagattatattatagattattgttttctacagagcgcacgttaccacatcattgaaagaaacttactaacgtgcacctgtacccattatgcgcacagtacataatagtccaaaaataaattattgttgtgcaatatatttgtaattgtaattagatttattatgttataatcatcaaagtaattttaattattcgaatatatataatgatcgatcttctcaggcattggagaaaatggtaacgccgtcaccttcaccgtcaccgttaatggttccgagatatctaagcggaattgggtcgtctccgccgcggtgtttatggaaatgcgggaactgcacgccgtgtaagccagtccacgtgcctgtgccgcccgggactccggtcacggctgagtactaccccgaagcatggaggtgcaaatgtggcaacaaattatacatgccatgaaaatatttatattatatatatttttttgaaattatttaacttttgggttttgctatatataaatcaaactatatgagttaaaataatattaaagaagaaaagaaaaagggttatatatatgcttctccttctataatattattattagctactttgtgttttgaatataatgtgatatttgtctagtttatatggattgtgttagttttataaattaatataacagataatcaagagtatataggactttattagttttgtgtattttacataattaatatttgaggtatatacattagtatcatgatccttaattaacatatcctataacttataaggtttctcattgctataaacatttgtgtttctaaattttggtttgaagatcattattggtatgtagaaaaaacacaaatttagataaaaaaattttaacattaaccaatgtcagttctcatgtgtgagtatatattgtgatcctaaacactgtgtggtgtctcaaacatctaacaagaaaaaatataaacaacaatttcacataacaaagaatgcagtaaaaaaaaattcaaactcaaaacagaaatgaacaaaaaataagaacacaggagcttgcctagttgggcaacaaaaccagattggttttgagcttaatgctggggagaaaatagccttcaatgactttagtagtgttgccagaacagaattacaactatcttttttctcgcttgtatatattatttcttccaaaattttatagttctattttgtaaatataaaataagtacacatttttttaatttatgagctttagcgattaaatctcttttcctatcgtttcacttctacttgtaaatataaaataattacttttttttttaatttaaggtttcttctgtttaattgctattatgcctccttatgtgtacatatgtcatatttatattggtacacctaatattattatttcaaaaattattttaaaattaaattaaattataaaaaataaaaatatatatcaaaaaatatatatcataaatttttaaataactttttaataattatcaaataataatattaggtgtgtcaatataaagatgtcacgtgtacaagaatgtacacataagcaattcatgttgatagttaactataaaaaatagatgacaccttaaatttgttatcgcgaaaaacaacccccaattgctgatttcttcgatttcaagaaattggaaggttttagcactaaaatttgagcttggagatgattaagtgcaagtagaatgatagttgagagggtttagccgcaaaaaacttttaatttattttaaaagattgaggttaactttaagaggtgatgtaactagagcttctccaatggttacagtattttgttgtactttttacagcaatttggtgtagaatcttttactattgctgcaacaactctaataattcacactaaataccatgtcaaataaatatattttacttaaaaaattattattttttttttttttaaataaaatgtttatcaaaatatttcgaggtaatcaattgcatatgagtcgatactttaaagtgtatcactttatatttcccacattgtctaacacttccttttattcttttcagatgactttattcgtggagcagttgtctgaaactgtcaatactgtggcagtggagttggcccaggacaaggctgagcggaaggcgtcaaaaacacagaaggcggagctcttgctcgagatggagaagctaaaacaagaagtctctaaagctatatagaaaaacaagctaaggagaaatttgaagcccatctcaacaatgttattgctgttgggaatattttactaggtcctaaatattaatctctaaaacaatgaaattaaacacataagagtttaaaaaaccttacattggttgtagcagaatataataactccttc

SEQ ID NO: 377899 - DNA, 4454 bp, Cannabis indica
tctatattataaattattttaaagctctcaaaattttactgaatgtcttcaataactatatataacgtatacaaataaaaaaattagattaaaaaattcttttagataccaaaatagttaggaatacagcaacagtgacagacctagcttaggaattatgggggttgtagggtccaccggaaaaaaatcacatataaaaccaaatatttttattataatttaataattatataccaaaattataaaatagtccccacaaataattttttataacaattaaaccttttaaaattaaataaacttattaggaaaaattttattttttattaaagtaaacacaaatatattttataataattaaactcctatagatcaaaatttttgaatccatcactgtgtatcaatatacttattttagtgggatgcattataaaaatacccttaaatatatacttaaaaaaaataatagtgtgtatgcatgaacctcgtggcgtgttaagtgaaattataattttttaaaaaagtctataatgcacctctttaaaagagatgtattgatgtatatttatctattttggtatatgaaataatcttttagtcaatttgttttttcatgatcatgtacgttatagctatttaagatattctacaaaattttaagaaatttaaaaaattttaacatgctgaaattagggttcaaaccatgtgctgcacgtgtgactatcttattttatatgcatgtgaaatagactatttgaacattgcttatttgaattttttaaaattttatagaatatctcaaataattataatatactcgaatatgtaaaaaaaaatttgactaatttttctttaaaatgtcaaaacggtagatggtaatatattccttttattaaaagcaccataactttatattttgttaaaaaaaaaaaacaatgattggttaatgtaattgttaaaaaaaaatatatgatgtcaaaatgaaaatgtataatattcttttgagacataaatatttcaattcaatctaggggatgcccctgtttgaatagtttattctcttattatatttttttagcaatgatcagtacttataataataaattatttaaaagttcaataatattatgtatatttagaatgaatgggagaatatacccactgcatagccgtttggcattactatattgaccaaattaaagtccccttattatattagtattaatatataattaagaaaaaagcagtgccaatgttaatggttaaatatatactaaaatatgtaaatttttctatgtagattccgatattttgacaacaaataaattaactaaaaattagaaagcaactcattattcgttttatagaacatatatatatgcagtaaagagttaatttcctgttgaatctaataataatatataacttgttcaaataataatatgtatatcaattatcaagtgaacaaaattatattttatatacaataatattattttgacatagggattagattactcatgaatttatgatgtctatatttgcaataagtctaaaattctcctcaaaataagataactcaccgtctaaacaaaaatgatgctttgtcaaatcatagactgctaaattattgatgcgaaatacatgacaaaagcctttgttttgtagattgaataagccttaaccaagtggccttgagagtcctgaacaatgaccctagcactatagccatttgcagcttgaaatgtcgcccaatccacattaatcttaagcatattagaatcaagtttcgtccaatgctccttaccctcaaaagtttcatggtacataaagaaggtcaatttttcgagattgagaatgtttccattgagtaaggattaaacgtacataaaagattataccaactgcgttgtacatctttttattccatataatgtcattcttggacctccaaatggaccaacaaatcatcacagcttcctccaacatgtttgaaccattcgaacaaaccagataatgaaaccaagagtagacattatggtactgtgtggtagagaaatcaaaaccagatctgctccaacaagagagaatgcaagaagatgtgggaaataatttcttcatcaccatgacagaatggacactctaaccccgcataaacatgtttagtaagaaactatgttcgagttggaagagttttagtaagagccttccaaactagatgtaaaaccttgggaggaatcctactttcccacagtttaagccacacctcaattttcaagataggatcccaagcacccttcatctcttaaagataataatggtaagtaaattttacaaagtaaaaactagggtatcttttgcccaaaaccagttatcaaaaccattcgaagagctcaatggaacattcaatatcaactcatagtccctagaatcaaaaagatcactaagcacctctgtatcccactccaacctatccacaatcatcaaactttgaactttgttatgttctagacccaggtgagtgggcaggacataagggtgagtgtcatcgggcaacaatggagtgtttaagatatcagtatctctcccaaaaccaataagaattctagcccctgctttaatcaaactttaggcttcaaagatgctacgctaaatgaagctcgggttatttcctaaggaagtagtttgaaaggagccacaagggaaataccttgccttatagacacgtcccataagtgaattttcaaaaagcaccaatcgctaaccttgctaacccaacaaagaaagattatagtcatagagattatgaaaaccaaggcctccagcactcttgcgaaagcacaatcgattttagctcaactagctcacaccccaagacttcttggaatcgaaattccaccagatgttggccatcaacttttctaactaactacaagttttcaagggcagcaagaagactgacatagcataattgggaagggcttgagccacagtctttagtataatctctttattggcctttgataaacattgaccctcccagctttgtatctgttgttgcattttatctttcagaaatcccagaatggctgttttatttctccccatattacaggggagccctaaataattactgctctcattttcttctaccatgcccaatcttgcacagagtctagtatgagtgttcacacaagtattagtgctaaagaaaatggacgattttgcaaaattgaccttttggtcagaagcattctaaaaaatactcaataaatgcagaacattaccagcttccctattattggctcgacaatacacgtaactgccattagcaaataacaaatgcgatatgataggagccccattagtcactttacaacccttcaaatcccgcatctttcaaatctctttataataaaagtgaagcctttagtacataagagaaacaaataaggagataatggatccccttggtgaaggccacactcggatatgataggacccaactcacaacccccattaacaaccatgtaccaaacaagataaattatagctaggataagagcaaccaattgtggatcaaatcttatcttaagcatcatagtacaaagaaaactccaatcgatacgatcatatgccttgctcaagtctagtttcaaagcaatataaccctccttgcccttgtgcttctgtttgagataatgcataacctcaaacgaaaccaaaatattatttaaaatcaatctaccatgcataaaaacgctttgagtatctgaaattacttgggggaagaatgccttttagttgattagaaatcacctttgaaatcattttatgaagcacatcacacaaagatataggtctcaagtctccgatagtaactgaatgtttcttcttagaaataagaacaatattagtttggctcaaaccatttagtaaagaacaaggattaaagaactccctaacccgagaaacaatatcttgacccacaacatcccaatatttttggaagaaaccaggagtcattccatccggggcatgagatttatctggatgtatttggaagagtgctttacgaacttcctcattagagacatcatgaaggaatctatatcctgttcagttgaaatagagggcctgatattatccaccacatcattctagctctagcattatccaagttgttatatcagtatttatcaattaagtaacaagtctcacatgctttaataaaatatttctataactatttgtaaaatgctacctcagatgttaagcatgcatgtatttaatagcaatattcttttctttttctcctatgataaaattttaggtaaataccattttgagccctgtgttttgtaaaaattattaattggactatttgttttgttaaatgacaaaatggaccctgtattttccaaaatagtacaaataggaccctgaattgattt

SEQ ID NO: 377900 - DNA, 3374 bp, Cannabis indica
agaaagaaagaaagaatgtgagacattttctgaaaataattttaatataaaaaatattaaaaaaaaatctaaataaaaaaagtttttcggtatattgtcaaacagccgagtatattcaggcattttcttctacttttttattttcatataccatttccatttgggacacacttgatttgcaaaattttcttcaaccatggatacgaattccaacccaattctgaaactcgctttcttcctatccctaattctcaatatccattccttgtatggtgctgattccatctctacaaatgatatactctctggtcaatctaccattatctctgcaagcagtgtatttgaaatgggattttttcgaccaggttcagctcaagactattatttaggcatatggcgcttgaaagatacttctcgtaggtcagtttgggtggcaaacagagagataccagtctcacttgcgtcagagctaagaatcacagatggaaatttggttctctataatgagttaaagctaccagtttggtccacgaatttgagctccagtaatactacctcacgttctgtacaagccgtacttttagattccggaaatctagttataaacgacaaatctagtacttcatcaataccattgtggcaaagttttgagtttcctagtcatgcatggctacctggagccaaattagggtacaacaaaacaagcgacactaggaagattctaacttcatggaaaagcttggaggacccttctccagggctgttctctgctcagctagattatacgaacaactctgtttttattcagtggaataggagtatgaactactggaccagtggtccttgggatggagatctctttagcgggattcctgagatgaggcgcaatgctgaaaactactatttcacctttgtatcaaacgaaaatgaaagctacatcacctacaccatgacaaacacttcaacattgataaatcattttgagattgatgtttcagggcagcttacacaggtgaattggcggtctgatgatggttggactgtgttttggtcggttcccagccaacgatgcgaagtttatagagcttgtggggcatatgccaattgtgatagtaatgaggaatccttgaccccttgtcaatgtttgatggggtttgagccgaattcgccgaaagattgggaattgaaggattactcaggtggttgctatagaaaaacaaggttgcagtgtggggttagtaatagtaatactactgtggatagatttctggaaatgacagatatgtccttgcctgaaaatatgcattctgaagaagctagtaatcttggtgaatgcgaatcaaattgcttgagaaactgctcttgctctggcttttcctatggaagtttgggctgttcaataattacgggtgaaatcttaaatctgaagcagctagtatctggagatagcagacaaaggactatccatattcggttagcgaattctgagtttcgaatgcgtaaggaatttcaaagatggaagctttatgctctcttgtttggggtaatagctttagtcatgttcatcacttttattgcttgtttcatttatttacggagaaggaaaagagcagccatcaaacaaggtaactttgataataataatagattgttttgtgtgtgtttttctaatttcgtttttttatgaattgatataaaatgttttgaaaatatttgcagaattaggtagcttgatagatccaaaccatttcaaagacgatgaaaaggaaggcatacaagtcccgtttgttgctttggcaaacatactagctgctacagataacttttcagaagccaacaaacttgggcaaggagggtttggccctgtctataaggtaataaactctaatactcattgaagtttggattccacaattttttttattattatttatgaaatttaaataataggatgttttctgtggaattctactttagggtaaatttccaggtgaccaagaaatagctataaagagctttcgagtggttctggacaagggtcagaggaattcaagaatgaggtactattgatcgccaaactccagcatcgtaatcttgttagacttttgggctattgtgccgaaagaaatgaacaaatactaatctatgagtacatgcccaacaagagcttagattcattcttatttggtgagtttccaatcatatatttttctaagttttgattttctgtgaatcatttaaagttgatttgttgaatatatacatccaaatagatcaactgattttatctacatgtatactaataaaaacttgttacactttaatcaaaaagatgaaaacttacgtgggttgctgaattgggaaatacgctttaatatcatcatgggaattactcgaggacttctctaccttcaccacgattcaaggttaaggattatccatagagacttgaagataagtaatgttctgctcgatgaacatatgaatcctaaaatttccgattttggcttagcaaagatttttggaggaaaacaaactcaaggaagcacaaacagagtcgttggtacctagtaagttttttgtgctaaaatgttaaatgtacatctttttcatgttaatttttctgaaccaacttttattgttgttcgttagtggttacatgtcaccagagtatgcactagaggggttattctcaactaaatcagacattttcagttttggggtcgtcacgttagaaattattacaggacaaagaaactcgaaatcttatcgattagaagaagctgttggccttataggctatgtgagtgttatttactgaacatgtctcttttcaacttaaaatgttcctcttttacattatttatttacttttttcgttttcgatgggttgctgcaggtatgggaaatgtggaacaaaaacaaggcctttgaactaatagattcagcatcaaaggagaagttcaatgaagatgagttcatgaggtgtgtaagagtgggactattgtgcgtacaagatgacccaaatgatcgtcccactatgtcaaatgtgatgttgatgcttggaagtgaaactgcaagtcttccaagtcctcgacaaccaacatttattgtgaaaagatctatatctagtacccctaataatctttctcattcatcatcatcaaataacttgttgacagatactttgtaccaaggtcggtaacaatgtaagtaaacgttttaggttactttgctctagaacaatgccacaacaatgatacttgtttttcttcatcaaatgctcagtatgtatgtgtatttgttcaaatttggtgttccaatttaaaatagttatgtggttaattaaaatttatcaagaacataaatttcaa

SEQ ID NO: 377901 - DNA, 3390 bp, Cannabis indica
taatttaaattgttccattaattattatatagatttctatataaattttcataaaaaaaaaaaaaactgcttaaaagtaaaaataataataaataaaactcttattattattattattatatataacaaaataaaaagtagtaactttccttattatagttacttttggtgttagatacgttagtctttagacattctaaaataaagggcaacgaatatatatatacatacaaaataaatttaaatttaaatattaatattaatattcaatatttaatgtagtatgtactatatagtattagtatatatacatacattgttaccaaaagtcttatcttcaaataacttgcctatttctataaattgacacaatattaacatttgagcattccccatattaatttcaaatcaaatctcccaaaccacacaccaccaacattatgagtgtaaaagactgcggccaccaccatgatgagcgaaaaaaaatggtgcgccgcctcatcatggcggtggccgccctaataatcctcttagctatggtggtatttctagtgtgggccatactacaaccacacaaacccactttcatcctccaagacgtgaccctatacaacttcaccaccaccacagccccaccttacatcctaaccaccgttacacaactcaccatttcctccaaaaaccctaacggaagaatcggaatctactaccaaaaacttgacgtttacgttacctacagagaacagcagataacggccgccacactcctcccttacagctaccaaggccaccacgacgttgccgtttggtcgccgttagttttcggtaacgccgttccggtctctccttatcttcaacaggttctcagtcaagatcttaactttgggtcaatgcttatcgaagttaagattgagggaagagtgaagtggaaagttgggacatgggtctccggccggtaccggttgggtgttagttgtccggcttatctccggtttgggaatcccaccggagggttaccgacgatgggtcctgtcgttaagcttcagttgtttcagagatgccacgtggaaacaactcttggttcttgatttaatttatttgatttattaattaatgtttgtttttattttttaaggaaaagagaaattaatataaatgtttccttttttattatatttagctattatagagaagaaaatatcattttaataaatggtgttatgaattgtttggctattaattaatgtttctgtttattagtaatacatggttgtttcttttatgtatatgcataatattaacaattactttgttttaaattttccttttttattattacattttttcttttctagactgaaatttattaaatgatgcaatgcaaaagttttgttaattagtagcatgaacatatataatagatcgattacaatttattgagtgggtaaacaattaattttattttaattattttccaatatatatttgcttttttttttttttcatttttcttattacttttttaagactgaaatttataaaaagaagcaaaagttttgtttattagcatgaacataatagatcgataattacaagggtacgttataaggtttataggttttgtaacactaattggtaagaaagcttttgaaataaaacattttgcaacatagattacataatttgaccaaatatttgtgaggttttatcatgaaattaattgataataagtaaaattaattcatgaagtacttataaataactaaaatatatatttttatgtttaatgcatatatgaaataatattatccaataaaatccatactaagtagtgtgaattggtatgactgaaaaatttgtgagctaccaataaattataatgacagcctcataagtcataatgaattttaaaacacaacttgttcttttagaaacaagaaattcagcttcaaattgttctatttttattacatgtaaaaataaactttttattgtttgaatataagagatggaattccttaaaagtagattaatatcattacactaaaattacttttaacataattaagtataattttattacatccaatcctataaatagccctatttttaataggctagaccttgaattctatgcagattcgtctaattaatctgaatcgtgaatataaataaatagagaaatgctaaaagataacagtggtatctagcattctcctatatgttaatatcgttattggtccattggtccaactaagtatcgagttctatataatttaatataatagcttttagagagtatatatcgctagtcaattgcaatgcgacatgtcgagaaggtactaggcaccactagtgcctaatagcaatgctcaaataaatattagctaatttatttaattttttatatttatattatgagttgacaattgacatgtgctaatgacaagtatagcaacaacgactagctaagtagataaatgtaaattatgacattaattttgataatgactttgtaataagaaaatgagatttggggtttccaaaagtaaaagagttgacaaaataggtctatatcgatccgtgtcttgggggaccatatttttttgttgggatttgggtgaatttatattatagcagcgttacgtacttaattgtttaattattaaaaaactagtaggacacacagaattaagaaattagtatatattaatgaataaatatataaacacatataaagtactagatatatatactagatatgaattgattatagtttcagaggacgtgttcttcggatgaactacagcaaattaagaaatcacgttcataattactataccaataattaattcttagagacaccaagtactaggtaaaatattaattagtcataagaaaaatgaatcaatgagaaatgaagagattgtgaagcattagaatattttatattgattaataaaaaagctcccacagtatcaatattaagatataaggctaattgtataatcagtattacatgtattatcatcagaccataataatataagatgaacataatgtattaatatgattggagtcatggaaatattctaaaatgtctatggtcagcaaattgggccaaaaacaactaactctctcttattagaaatgtaagtctattaagtcattttttgctccttaaattaggggtatgcccttttattagaagtagagaagagaatggtaatggatcttaaactactttaagtaaaattaagaaaatgggcccttttaatttatttttttctgacctttgatttgctttgttctcttttatttttatcctcttttttaaagtctattatttttacctctttttttaaacattgtaccaattttgcctctgtc

SEQ ID NO: 377902 - DNA, 8957 bp, Cannabis indica
gggtattttcacaccctttagcttccctttttataaatggggttgaaaaaactgcctctaaaggctaacattgtagtagtactctacctacatatggacgtagatagtacaatacttactccaattatcaagactacatactacgaaacacttaacaccacatgaggagcaaggaggagttgtctcgggggtacaccccgaggtgagtcaacacccccatagggtcagtcagtactcttgggggtagccccacacagaccgacacaaccaatactctcccagcataatccaatcccgcatgaagctcaaaagtgtacaaacccacaaaaataacaaaacattaccacaagtatcagacctcaaccaatcccaaaaagcaagagaatgattgatatattttagcatcaaagttgcatctcctgaagcgagatacaccgacccttcacctatataatgaatcacacaagacctgggaaggatatccaaaatttgacttaaaaagcataaattttcatttttacttcttgcattcaagagtttattcttgactttgcaactcaaatcaataaaatacataaatatactattaccaacacttgaaatcaaacctctttaaattttggtgtcattatttacatttattgttcttgttaaatctcatttactacaactccatatcagttgactaaaaatccaatcaaagtaatgctttgtaaaagataataaaaaggaaaaatctctcatgtggatcatttagatggcttccagctaattattctatgtccaatacagttatttagtctgcaataattgaatagaactgcaaactctccaatatttaattattcaatattttcaacgaaaaaacagagggttccaattcaaactttttgtagattctaaatgaaaattcaccttaaaaatgggataaaaaaaaagtattaaaatgtctttaattaatagcagatggcatctttcttcactgaaccaaaagataacctgggattatctgagccaaagctgaacttaatatcggaagtgtcattttggattgcagaactgcttgtagaagggaaagaaaatacaagagatggcgtagttgatgatgagccaaaggtatatgaaggaatggcatgtccatctttgagctgaagctgagtatttgctgaaaacgatggcattatggatggcgttggtggctcagagctcactccagaggccgtagaaacaggaaaagtaaacccagagctttgatccgacgaaaatttccagatcgagttaggcttgtcaacggagatattagacaaaagtggcttattagtccctgaagctgcaggcttcttttgtagggttaccacctgagaggaggtaatcttggtgacctcctgccaatttattgtgttagtaacatatttaacttttgaacgacgtaaagaaatttagctcaagttatatcacaattcaaaaaatatgtacctcgtgtgaatttttcatttgggacactccatcaaccccattgctaaggaaaacattcgaccgaggattggatatggtatcaactgattttacagtactttcctgatgtggaaacataaaacgggaattgctcttgtcagaagtatcttgagcaggtttattctggtcatcttgattcactatcttttgagattccaaggctgttaaattcagtaagctattcttagacttgtgttgatttggatcaattgaaggggtactggaagaatcaggtttcttccattcaaaagctagcctcaactcctgtgacttgtccttgggagtgggcgggtttctgtctatatgatccaagattgtcctagctatctgactagaatgtggatgaacagttgggacacccacatcataactgtgatttttcctgttagctgaatgaaattgggagccactaatttctcttggttcaacacttcttataaaagcaggcaagaaaccttgagatgtactagaattttcaacccttgaaggcccaacagatgatggttcaataaaaccagatcctctgaaaggtgattgtgtacctggagaatgagtagcaagtctgtgttgagtaccaggagtttgtgtagcacgtctgtgttgagtaccaggagtttgtctgccaaatctattttgtgtaccaggagtttgtgtaccaaatctatttcttgacctacgaatcggtcctgttgagccatggttatcctccaatgcatcactacttgacttcacctatccatattaatcggcggaaacatataaactaatgtgtaaacaaaatcaacgaatgaatagaaacattctaacaattattttatttagggtgtaatagtatattatatactatatgattaaaaaactacgtatatgaacactatgaatcattgaacaaaaaaataaagttggataaaaatcagggaaaaggatatgagttattgaatttcaccattgccaaagagttaatgcctagttaacatatcagtgctatatgcacatcacttgttccaactaaactttactcaacagcttttatcaatttacaaaatacattaacccaagcagtaagccagtaaccattaaagcatatagttgagttcataccaaaatgattatatacctaaaataacataacttagttactgcataaatttcacttagaagatgactaataaaaaataatacctttatcaaaaaaaataaaaaataatacctgcccataaacaggtgtttgagatgtttgcagagaagtagatggtctcgtccccttatcactatcacctagtgagggcattaactgatagcagagaatagtgaaacattatatcacagagattgccaaaaaatactaaaatcaactcaaaagttttgatctgcataccttggacttggactttgaaaagattgttctcgagtagggggttcgtggaatgttgtgaagcccatatcttccactttgactttggggggttagatgatcttgctcatcctgtagcatggcacctggccagcatggcttagaagaaggtgaagacataaatggctttgatacaaagtcagcactatataatgaattcctttcttcttttgaaatcattcccttaatagaatggccagtttctaatgttcggcttcccatgtatgctttggcaatatctattggtgaagcacaaacatcatctggcatctgcagaacccagaacagaaaaaggattctgttataatatttatacatatgaaaataaggacaacatactataatacaaaatattcaaagatgctatgtaagttgcacaaacacaatattttgctaaactggcaattccaaatattttctttgctattaaatatattggcagggatgcccaacactcatacatccacacacacatgtaaaatggttccatctgcaagtaatattgagccctcaaagattaatttggttacatgccagcagataaactcaaaatcgcaatgccacatacacttgaaacaaattttcttaccctataaacagtaataaattgtagggtgcactatattatattaaatagagtatgtttatgtgagtttcataaaatagcacatgaacctcaagctgacaaagaaaaatacgaaaaatgtgaaccaatgacttttcagttttcacaagttgacatgattaaggaaagcatatttaaagaagttaaaggtcgctcaccgccgatttaggaaggggtgttgaagttttccataaagaaccttgcaaatctctctgatttctatcagatgtactgataatttcatgagatgctgcagcccccctggagggagtacgttggtactcgtttcctttatgtacatctggaacttcagctgcccttgaatttattattagcattaaatgatttacttcatccctgcaagacgatgaagtgtaaaataattgcatatataaatttaaaaaactggacaaactgaaagcacataggatagtgtttgtatgtgtgcaaagtaaaatctcacacggtggtgtactgaacaaaagaaaacaatatccgatgatacaaaatggatattgttccattccattttaaaaaaacaagtgcactaaatacaaatttgaatgaattaagtttctatacaaatatgatattaaaaacagaatgagataattaaaaatactaataataaagtaagcacttcctacaacaaaccttacaaaaaacataaaataaaaaagaaaatcataacatgcctcgaaaaatttttcccctttaataacttttcgatttcggaaagtccgctctcattgggaaggttgcctcctttatctttgttgggcagaaccaaatcagaaatgttctccgaaacatctgctgctgttccaggacctactactccagttgttccggacagctcatgctacaaattattaccagaagtagcaagagagttactaaaatattatattggctgagaaaagctacaaataacaagatacaggggctccatatagtcacacatcaaataattagtcaagttaaaatatatgcaatttccactatgtataagtaaacctgctaatctaaagaaagaaaactaatggttgtgaaatttaaattcaatatgatgatctcattgatgaaacaagtccatattcatttattacaaaaaaaaaattaacagttcaatgttaactgttcgcattaaagcaagtactaaacacataacgaaataggaggacatataacttcacagatttcaaaagcaagaagaaatttcatacagctatgccaccaatgtcaatagagaagctctatcaacagaacacaaactctacgtggttctaaattagttctgtgtgtgaaacagtgtgtacataataacaatttcgtgaattatttttggtgcgaaacattccaatatgcatgtacatgcatacatgcatataaaccaagtactaagaataaagaaaaaatcatataattaactctgataattgctaagttatcattttatttctaggccacaccaataactaagtagcccattcacaactaggctctctcttaatttattaagggacatcttagttaccatgtcccataaagctaaactcgagaaaggctcaaacataagaaaaatacacgaagcctcacatttacagtgtcattttgttcgttaccattggcctcgtcttgcacaactgtctcagcctcctgattctctgtttcaaaagaattatgttaaaaggggcaaaattacttatcaaagttaactcaccaatgagaaagtacattttctacaaaacaaaaaaggtaaacaggacttaatagatattgtcacgttgcacatacacacaacacaccataaaacagtaaggtatggaaaggcagagaggggcaaataatactttgcaacacgccaaaaagaaacatagataaagtgtattatgaacactgaaaccatataacactattctggagacacaatacatacgcacaccacttcctagacgggaaacattatacaactgtgaaaacaacatcattattgtacatttaatactttccagtttgataattaataaactttttctggcttagaaagaatgtaacaataataaaacacaagaatactgaaatcccactagaaatcctttattgaatcttctaggattacacaatcaaactcttcgagaggctttcttcctctcttatttctaacctttcaagagggctagatctctcctacttgacattactctctattctcatccaacaaaaggaatctgtaaaattcacctactctatttatagagtatagatcttgctacatcagcagccttattgtaagcaataaccaatgaaaatagaatgcctcaccctaaacaattaaaaagctagtacaagttcaataaaactctctatgactaatcctttagtaaacaaactgaatacgaagcttataaataaccccctaaaaccttcaccttgtcctcaaggtgagtgatcaaagaatccattcttaaatgtttgtccagcctctgtcaattacccaatcagctgtagtacttccctcttcagtggataaaacgagatgttgtgaaagcgtatggttaagtttttatattgacccggcctttcaaattccctgcattatttcttgttgcggcacttgtatgttgccataatagagttgtcttcctctatcaaacaaccaacccaacagagtaggattctccaacacaatagattgaaccagatgcttcttgaaatccttcctccaataagacttaaagcactcttctctcttgtcctgcccatgtttatccttacaaactttcctgagcagctggattttcctcaagctgcaacaccatctgctttggttcagcaattcccacacccagcggcgaatgtagaacgttctttccgtcatccacattgttttccatgccatcagaaaattgaattcgggatttgagtcgtttttccacaataatagccttgaaaaataccactaagagaggtcaaggttgaaaagtttacacttagaccagagaatagatcgcagagaaaagatgctggaattcccagaaattttgctgctcaaacttagaccagaatttcttcgcagaatctttgtattcgagtgtcatcaaatcttggaacgaaccgtcatcaatttgactacaattgttgaacaatgtaattctaaaagtaaaatctaaccagttcttgattggttcttgttcttctaccatctgaaatcatctccaagcaacccctccaaggcattctttagcaacgaaaatattcttgctttcactaatccaatgaagccaaaaatattcttcaatgtgcacgacccactcatacggatcatctccattcaaaattggtaataccaccattttcgaacctactgcaatggtcctgaaattacctgctgttggtgcactcgctaatcctctgccatgggatgccgaagtctccaattcaccatgttttgggctgttaacagcagtaaccagaggttctagaagctttcttcgctgttcttagtctctaggaacaatttaaattgggaattgttgttgtaattgtctccccatttctcggatagattcttgaatggagcctttcatttccgacacctttgttttcaaagcttccatatccatttcaggtagattggtttccacactctccttcggccccatgttccgcagctcaccacaccaatttgatagaattttcctagattagaaagagtctaacaataataaagaacaagaatcatgagatcccactagaaactctttattgaatctttaagaattacacaatcaagctctttgagaggctttctctcctgtttctaacctttcaagggggctagctctctcatactaaagattactctctattctcatccaacatgagaaatctgccaaattcccttactctatttataaagtatagaacttgccacatcagtagcctaattgcaagctaataacaaatgaaatcaaaacccttcgccataaacaataaagctagtacaggtcaaatgaaactctctaagactaatcctttagtaaacaaactgaataggaggctaatttataatttacacgagtaatgatatgcacacaaaaatatgcaccaaaacattgcaaacagtgacgtggtataatttttcaactatgtatgccactgtcacatcattgtgagttttgtgtgcatatattattactaaatttacatatcctctacggaaataacagaaataaataaagaggatctcttacctacattgaaattcgctttagcaattatgccaaaactcttatgttgatactaaatggccttctacacttaatattttttagagtttccggatctttcattctcctccatagacaaaataatatttctttcctcgacaacatagattgtttttccatactaacctaaccttatattgatacaaaaacaaatctttctgtatttaatagtttctacagctccattgtcgtttaatattcctctacaaatgaaataagatcccgttcctcgaataccaaaattgttatttgtaatagtgtaataaacaataaaaccttttttcaaataataactcttatcttattgtaaaaacactggaacacccgtttatgtactacaaatcatacttgaaaacaataaagtagaagtagccaagcccattaataggagcaataccacgatcatctaatcttcaaaaattgtaaaacaaccaattaaaaagaaagaaatttccccagctaagtcaagactcaaaaaaattaaaccccatttgagcaaataagcaattaattaaatatcagaaaaaaaaatattctttaaattgatcctgaaaccaaatattctccatatcaaacagccctaaaaacttattttcttccttactttatcagttgaatcgggaacagtatcattaatggtgagaaaccctaatcaatcgaaagaaagcttgactaagaagcatagagagttgaatatatatgtaaaacccaccgtgatcttcagtgttggcatcaatggtgaaaggtgattttgagaagaaattcggaaagaagatggaggcgccatcactaatgaggcggtatgcgggatcaacgagcttggacaaccatcgccgctgacccctatctatttgggtcggtagcgccggaggacgagagtagggagttgacggtggcttgcgagccggcctcttgagcttacctccggcaccgcgttgttctccgaacgacgtcgtttgggcactcgtctccatcggtacggcccacctcaacaacacactccacgggcttcggccacttctctctcacacacactccctctgagaagcaactaaaccaactttttcggcctttttcttttcttttctttttgaatattaacaataataat

SEQ ID NO: 377903 - DNA, 5098 bp, Cannabis indica
aagggctccctttggggtaaagccctacaatcctagtacaattttttttttctgtgtgtaatttattattttagttatttttatatttattcaatgatatttacaataaatatttattattattattaaattattaaacattttaatgtgtgcagggtcatgcaattacaattattgtgctcttctttatgggatgtttgacaaaattgattaaattttgcactaaaactttttggctttgattcatttaagggaaaaatgatagctaggttgattgaattcttaaaaaggacttacttggctcatattgattgggcttgaaaaactgctttggccacacacagcaatgctttttaaagtcaacattttttggcattttgattattcaaactgagaaaaccgaaatacaaagcatttgtactaatgggatatctctttttatttgtaatttcatagtttctttgtacaagcaaagttgtctaattttatcaggcaaagtgacaggtggcttatcataaatcaggaagaaattgatccactatctcttatctactagtctgttgtctattttatacatgtgatgaaacagttttaagttactttaacttcattgaacaagatttggtgattgagtagctttatctaatgggaaacccgatgcttctgcaagctctgaaaattctagctcaccactcagaacctgccaaattgcacaagctttattcagcacttttattgaaaggataaagatgagctgaattttgggatgggatggaatgcgagggtccaatggggatatagatataccattatgttgtagataatagataagagattttattggattaaaatcataggcatgtgtgatgtgatgtgatatgcttaccttcccattaatcacccatgttgggaaaccttcaattccaacttctgcacatgatttctccattaaagttccttttttgaatccattagggaagcattccacataattcaaatgctttgctgcttcacgtccaaacatctgttacagtagtaacaccaaagagtttcatttaatattaataggattgaaaacagtggcaaaacatgcacctatataaaagctaagcaaagtaacaaagaagagtgagttttatcagcctagtccatggggacagaaaagcaaaaatccaatatcagttaagacacatatttcacatagggaatatatggaagcctatatagataaagtttaaacatagttcagagagatgaagtacctctttttgttctaaacagtgtgaacaccagaatgccccatacattttcgcacctattgaattcaaatgctttgctagagatatagcaaaaggagttgattctgaggttatctcagttggaaagtatggaaggttaatattatccatgctgttgataaataaaaaaggaaaaatagcaaaagaaagaaaaataaatcagtatgtatgaacgatcaaaaatctccttatgcctcaatcaataggtaacaagttcatggttaagtttttcccacatgaaattttaacattatagtctcagtaaattatcagtcatgattcttatctccatcaatacatatttttttttaactaactttcccgcttaactatattcgaagaccaataatctatgctaattgctaggaaggtattcaggagaaactcaaacttcagcttggcaaactacatgcctcactatttgtatgtattgggttgaagactaccccattatgcatgtataaataaaattcactaaaagttgaaaaccaattcaaattcagcaagagacaaaataccaaattaacaaggaacaagataaatcaccttgagggaccagaacgagagttagtatatgatgagttcagagtaacaatcaccaaaccggctacaaagagttgtaaacccaattcttttttaatctctggcaacccaaaatcctacagcaaaagccccaacaatcaattctatgatctatttgttaagtaatctataagaacacagtatcaaagaagatcaacatacacccaccttaagagtaatgaaaaataagctgaacgatagcagagccgagaggagacaataggagcaagatgacccagaaaacttagtgcttaaaatgtaaaggaagtatccactggcagctgccatggaagtagtagtactaagtaaaactaaacgagcatcagtttggttaagttcaaaaggcaagctcttttgagtaaactgtaaaccaagtacggtaactaatccatatgcaaccattccaataactggaagaggaacaacacctgagaatattaaaaggaaaactaccattgaaacattttgtgggaaatttcaatacctcaagatcaatctgttcaaggcaaagattaaacaaaacagagataataacaatgaaacaatcaacaaagcaaagaactaaaacagattacattgaaaatacacaatgcacaaggtttatcgtcatggaacttttattgaatgaagcttttaagtacaatcttcacagtcaagaatggaactttagggtgcgtttggaactaactgtaattaaactatattttaatatacaaggtgtgtttagatttgaggtgataattacttgtgaatttctattatgttcggcaaaatagttagaaattaaactgaaaaatagttagtaaatatttagaatagaaagtttttagtaattacacccaattctcacaagggaggggcaagaatcggagggtgtaattaaaaccattgaattaccttaaagacgccaaatcgtgtaattacatctaattacactcaaatcaattctcacaacatgtgttaacttagcactctctttcttctctcactctctgagattcttcagcttgttccaactggttcaagtaatgaaaaccagtttacatagggtaaagggggaaggagagttacaagtggagttagttaagttagttaggatttaaccaaatcaataaatggttaagtatttcaaaaacacattgcctgcattgcttaatgaagatgattttagtaaaagaaagtaccgaaaatttgagcataatcgctattgagtatgttgctgcaagaaccgcctccaattgggcaaaacacactggaattggtgagctttaggtatgtcaaatacgtcgtttccaataacccaatcgctccgagtccgctatacaaattatacgacaaatctctcggagaagaagaagaaaacggagacgacgaagaagacgtcgtcgtatttggttccggttcggaatcttgagaggagcatcttagaggaagcaacagggttctacttccacgaagccaggtaaaagctttgttctttttctgaaaaatggtcaagctgagtcgagttgagcaaggattgaagtgaggaagagacgaccggcatgagaatgagggagttgagaaacttgccatggtcgccattgactctctcagtctgtgttcttccgaacaggatctcatggagacgaaggtgtggactttttacttgggcttttcattgggccaggtcctcgtcttcagccacttttaatttctaagttagttttatctaaaaatattttcaaaaataccattattcttagctttttctaacagaaatatgacaaccgatcaagccttttcgaaaaatcagattcagataaaagagaaaaaaaaattacaatataagatatgaaatcattttatttttcagttttttttgcccatgttaattggtgtcaatgctttcaaagagttcgagtttaaattggtagatcgtttagagtcatctcgggtcaaagataccacatcatggtgtagtttgtttagagtaatctcgagtcgaagattccacattagagtggctcttcactcattaggccctcaaaataaattgaggcgccgtacgaatagtttggttaaggcccagcctaagaccgataaccctaaccaagtttgtagtgtgacttggcttggagtcctatctcaagtccaacacttgtactaaaataacaaatctttagttttcctttattccaatatacataaatatattttttttttgacaccaagtataaatttggaaataattatttgacaagtggtgacaaatatctcatcaatcataaacttattttgctttcacaaaattttggaagatggagaaccacaaacttggctagtatggaatggctattattagcttgtgacattttggagatatcatagtcactccattactttagacaagtccacaaaaccattataatgatgggcccatagtaagggcccaagtttctaagttccaaccattcaggtgagtttggataggggcattattaaaaattaatgacacttggacacacattttaacataaacatgacatatttgtacagtattggatcaataactggaactcatactttaaaaaaataattagtaactaggtatccaccatcatgaaatgttgttttacaaatggttagcaacaatttttataaatttttttaaattaaattatgtgacttaatattaaattatactaagagtaatattagatttttagatatgtgtaactttagaatgtgttgtacataacatacatattattaggataatagcattgttatgggacagtaatgtccctagcactactataaaaaaacgcatgtcgtgttagttaacctagtaatatcataaatcatagtatagctataaaaaacgcgtgccatgttgggccataacaaattatagatcgtgttgtgttgtgtaataaaaaaatatgagtcgtgttgtacttccaagtttattgtttgtgtaatttgcggcgaaaccccctcaactatcaatttacttgcaaaaaaccatctaatctcatattttggtgggaaaaccctccaaagtactgtttcgtttacatttttaaggtgtcgtctattcagcctcgttaagtcctaattttgcccacgtggcaatgacaggtcattaaaaaattatcctatgtggtcatattttacaaaataaaaataaaaataaaaacaaaaaatttaaaagtaatttgcggcaaaactccccc

SEQ ID NO: 377904 - DNA, 4714 bp, Cannabis indica
agagagagagagaataaggagtgaaaaccaattctattttctcaaactttattaccgtgtaactcaagttatttctcttttaatttatgatactatatatcctatatatatagtgttataaatgttggtttttatggttcatattagagttataaaaatggaggtggaatttgttaaaaaagtttttatctaatataaaccataagcccaagaatctcaaaataatatatatagattatgtaatatctcaaaaatataataatatataattgcatattttattaagatatgagaatatgggagtaattgtagtataatgaataagattataatcttattaagctaattatattataataagaaatttagtaaaaatgagtatataagcataatttattaagtttattaattacggagaatttatttgaatatatgggtattatatatattattcttaaaataaaatatttttaggtccgaaaactgtggagacccgatcggtggctagaaatgccacaatggtattagtttatggtaccgattattttattgggcttgatgtgttatgtatcagggttttttttgggataattggttatgactaatttacccctaggttagagatctttttaagttttgataaaggatagttttgtattttgagaattttgtctttagtgaaataacctttaggttaattactcagtccttatcttttattccatttcttttaagttgaattaaaccaatgtattagttagttaagtgtgttcttatccttagataaaagaaaaattaagaaacaacatcatctctttctctatctacctttgaccttagaagagaccaagaaccaagttgggttctcatttttttccatcaattcaccaaggaatacaactaggagttgatggaaagaattaaggtaaccctagctttatctttctctttaaagttttggaagaaaagcttagttcttaagtttaaaattgatgattttttattctgtatagattattatgtgttaatggtatttttaatctttgtttaagatggttgtgattgattttagttagttatttgttgctgtagttgagttgagtgagtttggagttttaaaactcaaagctcactcaacaatggtgagttttgaattctagtatatttgttaattttgaatgatgggacatgttgtttgtaagatgttaaattaatttggaataaaagcataagaacacacttaactaactaatacataatgtttcctagggacttcaaactcaaagaaagcctaaatcgatccattgcacaaggtggcaaacgagtctccataaaaaaaaagaactgaaggtttgtgcttcttcaccatgagggagagtcttctgaatgcacgcttactacctaatccctgtgcattccagctaataagagttatttttctaggtaggtgtgctcagcatcacccgcctattccaaagaaagggaagcaaaataaggtccatcatcacgatcattggcatgagcttgtttgagcatagaacgaagagagccaccaagagaagcttggtgggattgaaaagaagcacgcttcactcctgaagcaaaatcaaggcctttacctcgcacagaagaatcaggttgaccaacctgatggtcaacaatagtaccagaaatagaagaacctcgaagaatcatctcttgagcagattctagagcaacatcagcaacagattgagtatataatatacccccagaaatagtcttgctagactggtcagcaataatgacagaattcgtcggataagagacataaactggggaggacctgttagtaacagaaccagtattaccagcagaaggaagcaaattctgggtattagggttaacgggtgtgggaatcataacttcattggatgaaggagggacattgagctgattttcagcatgcattctattgtggaacaaagaaggaaactggatagcttgaggattgatcatcgaagaagcaaggttaagaccactatagttcatgtgggcaacagagatagtagggaggtggggatattgaaagggaataggtttattagtgatttttccctttcctcgaagaagaatagtaaagggacaaggtggaggggcaaggcactcatcatacttttgtaaataggcatgtcaatatttccttgtatgatcaagctttacaaaaaaaaaaaataacagaaattaggcaatctctcatacttaaaatcgatccatttaatgatttccctccccatctttataaacctaacattcatccctctcctaataggcaaattaatatccaacaacattctaatcctcaaatagggcccaataccctccttaatagtagactgatctacttcaataagatcccctacttttgaagcaataaatttggctaattcataagacttacacataaaagggatcccataaatctgaatccaaaatggaacataatgaagttgattaggggtaatggggaaagaactgtcaggagcagcaaaaatagttatagtttgagcaaaataccaaggctagccctctaagatcctacccttatcaccctcatacccaaaggtaataagaaacaagccattagcatgttcagagacaataacagggaatcaacattgcgatgaccagattttagatagagttttcatgagagaggaacggttaaagtgtctaatagtgtgtaacctaagaaggagactaatagcaacatgagactcagtagaacccacatcataagtataaactgtattttcctcagtggttaaagctaaagaattcaaaacattagttagaaagtcatccatagttaaatttgagaagaacggaaacaactcaaccatagaagcaaagaaaagatgaggatgaagagtttgatgcattagacattctttaaataggaaaaaccagaaagccctatttattctcttgaaggatcttcgagtcccatccaatatcgtaggggaagtaggagaaatgatgaaaggagcatggttagcctcgagtttctggatctttgcctccattttgccaagatcaaagcgacggacgggggtaataatgttcagaagatgaaaaaaggagagagaaaggccagatggaacaatttggcttaagaaaatggaaagtcctgccaaaatatattgagatgatatagaggaacagtaagatcctcagagcaattaatgctgaaataattgtgagaaagattataatgaaaagggaagagggatcgattagagattagtggaggaagataaccaccacaatacatttttgggtggactagagacgccatgaacagtacaggaggtttggtacacataccaatagaaaactctagaagcctatttaagctactttttgattttataaatgcaatatatattttttaatgggagggtatgatgtattggattaaatattaaattgattagtctttaagataggaatattgaaaaatcactttatgtttttggaaacaatatactccttaataataatttaaaaattatcttgttttatgaattaatgtggtatgattattgaattttggtgggttagaattagaaatagttaggtgataatacgttgttactagccaaagatttttaattgttttcattaattggtattttattgatatattatatttcatcaagtgatagaatatgagaatttagttttttattgatatattactttgtttgtatattactattctaatataatttattttttggtatttgttttgtgatgtttgatgtagttttttaatattataagctgaagttttaatttttttgttgtgctgtttgaagacgttatatgtttattgtctaaatttttaaaaataattttgtctcatgttgctttcttaattttgcagtttatagtttaatagtatttatttaagaaactatcttaattcaatgaccgatgtcacaatgataaattccaataataatctttatcactatctaaaaaaaaatttaactatctcttaaaaaaagtaaaggtagtcataataattttaaaagaaattaaactaatatttggtaggtggcacgtgtgcaatccttacctagtctttatgaatgagaaagaacaaaaaaaaaaagaagtggtcattttttgtgattaatacctcacaaggaaggtaagctatggaatattcggaaaagcataacactttgttttgttttgtattctccactgtctatgtagatttttttattattttttgtaccactttgtaagggtttgactatactaccccttatgattaactctctttttcataatcaacttttttatttcacttacttttagctgtaccttcattcatggcactgcctccgcacgagggcaatattgtcatcacacacgttaatgttgtcctttgcaattgatgctgccacctctcatcaccaatggtccctttacatttttacggttttccataaaaacaactcgaaaacaactcgaaaacaacaagaaaattatataaaagtaatataaaaataacatctaaataacattaaaataacaacaaaaaataacatacagataacaaaaaatcaataacaaattaacaagagtacaacataaaaagactgtattttctgtaaataaaataagaaaaatcgtaaaaatgtttaaaatttcatgaaac

SEQ ID NO: 377905 - DNA, 4195 bp, Cannabis indica
gggatatcatgaggggaggtagaggagagactcaaatggtagccagaattaacaaagtaaacacctgaattagtgggctcccatattaaagtatcactggagggttgagtgggaaggggtatggagatgatttcttggacaatgtgggatgggaaattgtttctaagaaggctaagatcccaggtcatttcgttcttgataaagaaagataccttgtccggtactgagttggacggggtaacgtagtgataccccgaaatccagtaatcacgggaggtgaatgtgttttgcccattaccaattttggagattagacccttctgcaacagctctttacccaaaaaaatgcttcgccacacaaatgagggggaatgtccgcgaacagttaatgaaggtggagtttgggtaatatctagcagctaaaaccttagcaacagttgagttcggatgtttaaggaggcgccaagcttgcttagcaagcaaagcctgattgaaatggaccaacgatcgaaagcctaatccaccatacttttttgatctacaaagcttatgccaactctgccaatgagtcttaggacagttgttttcattgaagccccaccaaaaattagccataatagactcaagagagtggcaagtggcaaccgggaggcggaaacaagccatggtgtatgtagggatagcttggatgaccgacttaagaagcatttctttacccccttttgaaaaaaccttatgtttccagctgtttaggtgaccccaaactttatcatgcaggtagtgaaaaacttgttttttttgtacgcccgatatgttggggaattcccaaatatttttcaaaacaggttctcacaggtatcagcatgaagtcagagataagtgtatgatccttgagagcaacattcggcgagaaatagactgaggatttttggaagttcacttgttgccctgtagctttctcataaagagccagtacctctttaatgatattgcaggaattaatggaggcctaacaaaagagaaagctctcgtcagcgaacaaaagatgggagataacgggcgtagtgcgggccaccttgaaaccgataagggatctgcttctttcttgttgcctgagcaaagaggaaaggacctccgcacagggaaggaagagataggggaaaagggggtcaccttgacgaatacccctagaaggagaaacatggcttgagattttgccataaatattaaactggaaagtggatgttgagatgcaagccaagataaggtctataattcgcatcgggaaatcaaactttctgagaatagctaggataaaagaccattcgaatctattaaacgctttggccatatccagcttcaccgccatccaacccttcttccctttcgatttaagcttaatagagtgagcaacctcctgggtaataatgatattatccgatatgagtctactagggagaaaggtgctttgattgggagagatcaaattattaaggaccagcttaagcctgttagctatcgtttttgagatgattttgtatgttatattgcataggcttataggcctaaaatccttgactgtattaggttgcttggttttggggatgagattgatgagtgtggtgtttatgggggcaatgttcccatttcgattaagaaagctaagcaccgccgggagaacatctttcttaaccaatgaccaattggctttgtaaaagttggagttaaatctatcaatgcccggagctttatccagagggagctgcttgaaagctctttccacctcctcaattgagtaagtttcatccagaagggatttgtcagcgttagataaagaacgctcaattccttctagaacattatggatgtcctgaggagacggattagaggaagagaaaagagaatggaaataagatttgatttcctacgtaatatcttcctccgtagatgcccccattagacttgtcaagcttgaggattttgttagttttcttccttttagaagcgaagcgatggaagaacttagtgttcttatctcgctgagcaagccattgggttctggccctttgcttgcagtatgtctcttccttgtagaccaaagcatcgagctgggattgagtattcttgatatggctaataacattgtcatcccaaatggcggtatttcgggcactttcaaggtctcgctcaatcttgttaatacgcttattgaattggaaatcttttttgtgattccaggcattaagatgagtggcacgggcggtttgggtggctacgaggcgagaaatttcctccgagggaccagagggattgatccaagccgactccaaggttgtatcccaacttggttcagcgagccaaacattttcaaagagaaagcgcttctgagagcgattaggaggagaaattgtatcactgacagtaacaatctcaagagctcggtgatccgagccaaaaaaaccaaggtgagagagaagagcgtccaggaaaaggtcggtccaggcatggtaaacaaggccccaatcaatacgctcctggatgtttcttggcgaggccacattattattccatgtaagtaaagggccttgcagttcaagcggagttagattgtaggagctaagcagtagcctaaattccggagccggacctctatcgggatttcctccctgcttatcatccgaagaaagaaaagcattgaagtcccccataataagccagggatccctgggattgttgtggccaatcctattaaggattttccacgtttgaggtctatgagactcaatgggcgatccataaaaacaagtgagatgaaaaaaaacattattcgaagagagagacacatagcaatcaaaatgactaatggattgagagagcaaagttaaagttacatcattagtccataataacaaaagggcccctcctctgcctatcctagggacttccaaactagagtcaaaatgaagtctaaccctaagccgatcaacgacattcttagccagtctagtttccataataaacaaaatattaggtttacataaagtgaccaaacgggagagatgacggaatgcacgatcactcccaatactacgtgcattccagctgacaagcttcatggttgcgggcaggcttgctctgtggctaggcctgcgtttctaggagagatctcagtgtcatgatggccgtcagagcgggaccgcttgatctgatggcgaagctccccattgaccatctcggtttgtctcttgaagctatccttggaattggtcttgcatttctattttttgccattggagcttgatggagttgcaataccaagttgataagaaagattcatagcttccaaccgtttgctagtgtcaagaagaggaatgttgacaggcaaaggaacattgcagtatttggaactagtagatttagagctactagagttttgtgaggtacttgaaaaactaggtggtgaggcttgtggagctttttggacactacagttgctcaatgtggcattgaggagtgttgtgaaggtgtgtgggttagtttcggcttggggtaggttggtgatattgggttgcgtttctccatgggtccaggtgacagtgtcttgtgtatttgatgaaggacccaatttgtataaacccacaagttgggtttggctgtgggttgggggtgggtcttgagggcaatatgtggggaatggggggcattaggtccggggggagacacacacagcgctagcaggattggaggtcatgaaagtggccaccggagggttggcgaagctaagctgttcagagcacaacaaagagttagtagaaaccttaacttttccagaaatggatttgatatcatacctgagctccagtggtggaaggggagcttcatcacaagctttcatatagtccacacaccccttattatagctgtgtcccatgcggccacagaaaaagcagatatcagggagattttcgtattttaactcaagccaaaccaccttgtttatgcctgagaaatggacgggaattccccgggggagggggtgggccacatcaaacatgattcttatgcaaaaacatgggccccaagtttcgcggaatgatgggcgatacacttctagcaggtggctgagggaagccgaaactaactgcgcaagttgttcggttcgcttaaggaatggtgtgttgaaaacttgcaccca

SEQ ID NO: 377906 - DNA, 11080 bp, Cannabis indica
aagttgcttttctttgtaaccgacttatagttaggagagtgatagttggatttaattccaacaaaaagtattagaataaaattaattaataaatttattatggtaaatttaacagtttgaagatcaattataattggcttaagtatccatatacacgtttaacacatactgatataatacatcagaacattcaatttatacataatacatgttcatatacatgtagtatttcaaatttcatgttattgtaagatgttatgatcagtcaaaaaaaaaggataattaacaagagaaaagcgtactagttactaaaggcatataatttaacactctgtctagatcaacttacatatatagtttgaacccatcaccaagtaattccttttacttttcctttttgttttattatgtccccttggtcatgttctcataatacataagactctttttcttttaactctaaaagaaaaaacaccactcattatatccttaaattgttaataaggcaaaccctttattctccataccctccttcaaatatcctaataaattgtcttaataagactactactccattcctctctatcttttctcataataattactttgttattattgtatcatattatttcattctaaaacttacaaaatatgccaatggctgagacagtcaagcctagtggctcatcctcagaaggaggaggaggaggccaacaccaaaagaacaaactcgatcgcgaagttagagatatggtgtcagccataactagttgccttaccaacattcacaaaatgagctccaatcaaggccatgatcaccaaaataacgacgatgaagacgacgatgacaatggtgttaggatcatcactcttgcgggaaccaacacaggcgccactctacgtggcgagctggatgacaactcggacgcccttcataagggcgtcgagcctcccctgctcggggagtctgagaccatgaaaacatatgttaatagcaactttcaagctgttaacaactccatcatgatgggtggaagctacaacaccaatgatcctggcgtccatgttgagatctctgattttggtgagcctcatgagtctaacaataagcctgagtacaagagaggatggaaaggtaagaagaagagtaaggaagctttaaaaagtgaccacaaatcgtctagctctgactgagagctaaatgagtacgtaaaaaacataaatgcatgcaagggtggctgaattttaagctattattattattatatatgatatatctattatactttactttgaaatctttgattatatagccttgatgaattaataatattacaaataatgagcctttttttggctaaaataggatgatttaaatgcagttgagagttgcttgagagtgctacctcggaataagtttgatggttttaagcatagtgtaatatttaagattaaaaaaataacattgcatgtgattatattaaactatccttaaatgctatgttgtgttgtgagtcaggtcgagcaataaatttgtttaagctctaatttgtacttcttttcttttcattttttgtggttgctgttgttgagaaaaaccatattatcctatttattgattttgttatgatcactcttacgtgcttatttgttttgcaataataaaaaatctggccagaaaatgcaaagagattatgttttgtgcaaatctggttggcaagaaaattaggttataaaccttccatgcacatgaattgtcatggtgtaagttagtggagatgggggttttttatttcaatctaatccgctactattttagttcatccaatccgcattcagtgagaatttatattttaaattcaatccgtacaatagttcaaattcaatccaatccaatccacaaaagtgcggattaaatcggttattttggattattactttctaatatagaattatttaatatttattaaaaaatattttttcacataaataataacaaaataaaacaaattgtttattgttttatgtctctaacattaaaatgaataaaaaaaattaaaaatttaaaggaagaaaaaatatatatatatataaaaaaaaaatgtttaatatttttattttaaattatactttcttcgtatataagaatgaaatatgtatttgatccataaagttttaaaataatttgtatcatatttattagatttttaaattaatatttttatacattaattaaaataataattatagacattttttaaaacaatgtataaatatgtgtggattaaatttaatcggttactttatcatatcaatttacatctaatccacacaaatacaaattttaaatttttcaatccaattagcataaatacatattaaattgatgagcagccctagactggtgatatatttagtttttttaatttgatactaaattgttcactggagcaaagaaatttaccttaggtgacgtttggttgggaggaataaaaatataagaagaagaatgagaatgggaataagaataagaataggaatagaataaaatttaaaatgcatcaaaaaaattgataaaaaatcattaaattttttctcttgttacattaaaatggtcattcttttctttttaaaatggaataattagaatgtcattctaatactttaaaatgcaaccaaacaaaagaatagaatgaaaattgtttccttttttatttcattacctccaaccaccacttaaattcttatagtgaatttatgattaattccaaaaaggttgttctgatctattaaacatgcagaagagcagcaacataaaatataaggctaattagtaatttttcctcctgaactttgacatgtactaaattatgccccctgaacttttttggccgttaaaaattctccttgaactattaagattgttaaatttaaggacttttccaaagtcgggggagtatgatttagtacctgaaagagtaaaattgaatgaatttaaacaaaagtccaaaaaaaaattactaattaaccataatataatattttaattagagttaatatcattttaaaatcgttatgttataaaattttctgattaatccttatgtagctcaattgtgaacaatttttattattatataattaattattaataatttttagtacgaacaaatacagaaaaaataacccaccatattaacacttttaaattgaatattttaacaaaaaaatcataatatatttttctattttgtaccattttaaaaaatagtctattttatcatttaaaaagacaaaatccaatccaatagtatttaccctattaattaataattattcagattaatcaaaggtcgtgtaatgcatagcacaatctcaggccaagaatttgaaatgtctagtcattgattgatatcctttacttttaactatctaaggccgagcatccaatcaatatgaatatgatgatttcataccttacaaatgaatgaaaaaattccatggggaatatttagactcctcaaaaattcaagaaaacttgaatggaaaacctagaggaatatccatcgagaaatatcaattattttcaaaccaaaacattatgtaaataaatgaaggtgaagagagagagagagatagagatgtatgagcaacagtttgtgattaatcatctgaaattcaccctccaatcacaagccaactacatggagttcccatatacaagctaatggggtaagacctaggaaaatcataatttaaaactaaaatcaatataaacatctactcactaaattgttatgagccgactaaaacaaaggaagcatgagagattcttttcctagttttgttccctaatatcgatatacacataaactatgctaggttctttctttggtactgggactgggactgggactgggacgcctcacacgaaagagctcttaaccatgattgttccctgccacaaccaagcactcagtcaagttctattattatattctattctattagatataatatcttaatgggaaataaagtttaacctctaggggtatttctgttttgagctctgggacctttgtcatgcgacatagaagagaactttggtaacaccagtgaactttgcaatccttctaatagctgtgtcagcaaacaaaacaaaggaatcaggctagaaacacaaaaggcatcagagcataatataaaaagaagagaaggaaaggatatgatggataatattgcaaccgaccagtgaaaaataattgaattcccgtaaaaatagtaggaacataaatcgacacattagatgggcactcagtttcatttgaaagagatcaaacaaagtagacacttactctagatgttggctgaattcttcgattagatctccgtggctcaatggcttcagaggtcgatttgaaagagtttccactaaaagctttatcctcatcaattttacccaattttccactaccaggtgcaagatttcctttatttgctctctccactctagatgttgacacagaatttttcttagatggaccatctaatgttggggcatcagaagaaaatgcaaatgaaccttctgcagctctatcagaggtagagaaagatccagtttccatcacgctttgctttctggacatattatcaacattgcttaaagaaacttccttgtctcttgctgcaagttctccagtggtaccctcaacctcaccagatacagaaactgcatttgttgtaaagttccgctgtggaatggttctacctgacacactttgctgcttaccagacttaagacctttaagcttcgagtcagccattcgtttttccttaggatcacttttcactgtccgtgatcctgatccttgaggagccatgtatttttgatatttaatagattcattagcctcactattcttattgctccgatctgccacataatgcttgctaacttccataaactttctcttctttccaggcttaggaacaccaaaattactcttgatccctctttctgcaaaccagttcgagctactctggatgagtcaggcttgctcacatttctagcattcttacccatcttaaatactttatcatttgcagataaatctagtaattgtgattgaggtttccctgaatctaagatgtccatactttttgacaccttatccttgcctttggcttccatagagggactccctatctttagtcgcttctcctgtggaagatcaccctgaacaacgaaattaaaagcaaaatgaaaagtgtctccacactagtaaccgaaaaacagaaaagacgaaatgaggaagtaatacttcgagtgaagagggatcagtttgcaagtttgagcactcaacccattctccatccttccaaatgagagaaggacgaaggtgccatgctttcacaactgaagtttcaccatgagctgcaaaagtaaaaatccgagagtcatcaagaatcaacaaaactagagcaggaagcattaggtcccaacaaagaggaaattttgaaaaggaaaatcacacattaacataccaggaaaatggactgttaccgatgtttcatcttttttattcctttccgtcactactccttcccaccagctgaagaatcaaattactaaatcatgagagcaggaatatgcatagagaaaagtgaaagcaaatcgttgagaccaatagaaaataaaaacgtgatccagactgattgtctggcaaataagtccagagttttgatacaaatgagtttattaatgcatgttgattttcaactttacacctacagatacaaggttcatgtcttgcaatgttggtacacagaaaatcgcaaatgatcttgtttctacagctccacaaaagttgtacttaaataaaaacatttgtgaaaattaagatcataaaccttttaagttttaaataataataaaatgttattattattgtgcctcccaccaaatgaatatttaaagaaatagtgaaatactaaaacttatattattgtgcctcccaccaaatgaatatttcaagaaatagggaaatactgtatagcaatgtcttttggaggtaatcactactccaatctccttcatcaatgcatttcacgtttacagccactctagaaatgaaataagcacagaagcacttattacggtacgggttataattaaagtcatctacttttattaatatttattacaataaataggaattctttgaactgccaaatccaattcagttaaacagaacagcttccagatttcaattgaaacatgttttagttgacaaaatctaggaaaatatgcataagtgttctgcctaaccctacaatatttggagatcagaaaactaaagcaattgcaatggatgagcataatatgactcaaacttcagttcttgtgagaacaaaccacaagactgtctgagcaacccaacttgagtggaaaattaagcataatcaaagtatactctaagtttctttttcatgatttggttattatattgatagagttaattacccaacaagtgcatatcaagcatacctatttgtcatccatgcatcgactttatctccaacagaccaattataatcccccatggctgccctgcgtctcttcctagtgccttcatatcgcattgcagtgacagggcgagcaaagcgaattttgggtgggtcactgcccacaccttcaagagacacccattcttttaactcatttgagcctataaaaggtaaggtagtctttagttatcaaaagcaagatgcccaagcaaatacaacagatctacacaatgccaatgtcataaatgagatgaacaaaaagaaaatctcacttctgcacacaaacacactagacagaggcacaatatttataacaacacccatgggaatagtttaccttcatcctgttcaatctctgtgtatgatacacaagctttaccatcattaaaactcaatacattagctccataccagcctgccttaaatccatcaccatctttatatacctgagttaaacagccaagtaataacagtcatgcaagtgaccataatttcagaatattcaaatatttttatcaagtttgattactactcaaaaattcaaattaatttttgcccatatacctcaactttagagccttccttaatgccattttctccagggacatcttctgccttttcaacttcaacggaagacaattttgataaactatcagactcaagaacaacaacaatgtttttggtcaaatcagaaactttacgacccttttgtcctttcatttccttctcacttactgcagcagagcccgagattccatcgatcaatctcaaatgctcctctattgactccttgctcatccctcttgaaatagcggacttttcactatctttcttatccactcttccatcttttaaatgcttagcagaagtatgtgcaccttctccagctcctaagtttgactgttctctatccatgtcaactgattttgcaaccaactcagaagaagcttgaggtgccctccagtaaccctctggaccagcttctatcagctccctcaaaggcacgggatcacccatggcaacaattttccctgcttgggatatagcttctgcagcaagctcagcagccctaacaattgcatccatgttttcagctcgctttgaagcagctgaggcagcttcaacctttctcctagctgtttccctagcaactgtaattattgaactagaactgtttgcaccatcttcccccctcaaaatagaggcaggggtagtcttccccaatacatttactccatcataaaatgagcttcttgtaccttgacttagattttcaaagctatttgaaataaaagcttcatcagccatcaatttggcttgcaatgcggcatttgatgcaacgttggcagcggcagcggctgcctttgcaacagcagcagctgctgctactgcaacagctgcagaagctaatttagcttcaacatcagataccaatccagaatttttctggttctccagctgactccatatttcctggctatgaccaacagctgcagcagcaagagaagctgcgtcctctgcatgcttactagcctccttaattttactaagagtatcctctgacaaggaagctctctgcatcacattgtctgtctttctaagagaagcggaagatgtaggagatgcagacataactaacttctctgaagtagaagcgggggttgtgatggcaacagatgtagacagactaccagaaagtactggtgctaaaactggttcactctggggtagagattgcaaaacgatctggccaatttcctcaggaactggattcttttttctttttctaggcctggggtcaaaggaatgttgcccagatgatgatgtcacctttttgaaatcctgcatgggagagactgcagtcaatacacttgcaggagctccagtttgaaccattggactggacaagacatgttttgtaccagttgaatgaggcatagctgtttccttaacagaagtcaactgaatggcttctgtacccggatatgttgtcaagcgagtactggcctctggtagagaaggttgtggaggagaaacccagggaccacggaaagaagtctgaggcatccatgaagtgttgggtccaagaaggctcctcataggtggtgtttgaaaatgatgcaaaggagtaagtgtttgctgatagtccataaccgaacctcttggaatggcactagattgcattgcatcaccgactggagtggaaacactccaaagtggcgatgaaagtggtatcatggggcttacaatagcttgagagcccttggcacttgatcgaccaacaggcgtagagataactttactttgaagagcactctgtttgctggaatggtcaatagttctagcagtggcagaggtagtatgacgtgaatgcaatggagtttcttgattaacaacattagtcttttgattttgtagcctctcaatgcatgcttgcaagagattcccccacatgctccttccaccatctatacttataaaattgcaaataattactatacaattgaaaaatgtaatagaaataagattatttttcatattaaaaaacattaagtaaataaaaaattaaaagaccaaccagatcccccaaatgctgacagcatatgtccttcttcaggtggtgtcccttggctgaaggaaaaagaaaatcaattaacacaagaaaagatgttttcctcccattcttagcataattaccacaactcacatggtaatttatttttttttcttttggccgtggcagtggaccgggagacctcccaatggccccaaaaataaaaatgaaaaacaaaaagtcacatggtaaactatgaaaataaagcattgcactcttttattctcataaaaatggattaattctactagaagtaaagcatttcagactccttgggttactaatattcctattattggtggatttggtagaaggggagtacatgccagttacgaaaattgaagtctccaaccacccaaaaaagaagtaataaatgaaaaactggaacagcaaaattacacctcagcatagcattctcctatcgcagtcctactactttccttaaacttttccaaaaatttagtgttttggctccaatagtttgatgaagtgaaggttcaactactcattatattttaaatatatatataaagagatgtgtgcacctcatgacttgaggagtgaactgtcactcattcatgtaatgtttactaatccgtgataaacaaaagaacttacatcaatgctccatatacaaagatctgagctcttaattgcacttgttggaagtctgtaaaaggctgttgaaaggcagtagaaggtggagctgaagaatttaaatctggtagaccggaagttgaagaagcaagaactaagtacggtttattattattgccttcaacatgtccataatgctgcatctcatttgattgcataatatggaaaatcccagatggacttagcgacacattacttaatttatcacctttttctgattgtctagcaggagttgtttctttcacagaaactcctttctttccactgtcttttcctgctgccttagcagatgatcgtctaggtttacgctctgaagtacctttagaacgaccacggacatgttctccatcagatacttgtggacttgcctgaaaagtattttgagcataattagcctctattcggcctaaagctgaatttgaaggaaaaccctcagaaatcttcataaaaataatttcttgtatgaaaatgcacacatcatgtatcccttgccgcaacagaaaaaggtgtgagagaagaaattcgtaaaaaagcataaaagatatactattaaatatcttagtataaataatagcaacaaaatggaaagtggtatgattggtactctgggagctgggctagcaggaaggcactgcaagttctttccaacatctcctttgaacaaatctgcagacaaaccaacaatgcttgctttcccctccttcacggaatccaatcctttttgaccgatcgtgttggatacaacaattccagtgtcactatcaatcaccttagaaactgaggccttcctcttaccaccctttgccaccccatgtttattctgagacagctgattggaaccaggagtaggtacgctgtgatcagcagaactgcctacattatctagaggaaaaaagaaacacagcatcagatacacataaagaattttaagatttagaagacgaacactccaataaataataaataggtcatgaaatgcatgtgcatatacaaatcctacatcactagctgaccctgtaatttaacaccaccaatgaaacaagataaccttttcaactgcaaaaaaaaagtgaaagactaaatagctctcagccaacacaagcatcttgtcaacatcccattcacactcaaggtggcatttagttggggtatgacatcttaaaaaaagaacgtatagagactacaaaccagaattcattaaaacctggaatgatttatacaaacaataaaaaaaaaaaaaaa

SEQ ID NO: 377907 - DNA, 4181 bp, Cannabis indica
tttttgactatgatccatttacttttagagaaaattcctgaatgaaagttatagatctttctttctactttccaaaatattttaaattgtccaattctgaattataccaagagagttgtgaccaatactattggtcgtcgctggaagaaactgaaaatgggaaacttcaaaaaacagcaaagaaaagaagaaatcgattgtaagacggcaaccttagtattttttgggaaactcgaattttcactataaagagagggctgaaggcaaagctttgtacactattcgaacttggaggccaatttggagcataggttgaaggctagaagtagaagacaccattgaagaactcaaaacaatgttctttctcatctatctttatttttaatatttttcattaatgactctttattgtgttggactattatgaactaattttctttcaaagattattatgtgaaccacttgaatttattttatggattaatatagctattcaatttcatcttcttctcttaattcaattaaaaaccggtttaattctataattatttactggccatctataaattaaatagaactaaaggatatgtcaaaaaaaaataagaaccaaatgaattaattaattggtaattgatttgtcggaataatattctatttatcattatattatttagggaaattctataatgcaccccttaaaagggatacactgatacatttctgtctatttcagtatccgaaataattttttagtcaattttttctcatggtcatgtaaattatagttatttaagacattacaaaattttaagaaatttagaaaaatttaacatgtcgaaaattacattctaatagtgtgttacacgcgtgactattttattttatacacgtgtaaaatagactatttgaacattgttttctatattgtaaattattctgaatctctcaaaattttgtaagatatcttaaatagctataatgtatatgaatatgaaaaaaaaaaattagactaaatttattttctgaatgtcgaaataagtagaaggtgcatcagtacatcccttttaaggagatacattgtagaatcaccctattatttatttcaattgtatatacttgtatattaaattttagcgaatacgaacattaccacctttagaatgtgccaagcactacaaatgtctaactactcaatagggctcttttaaaataaattgaaaaaaaaagtataaaaagaaaaaagttgtaataaattaacataaatttaatagtgtgaaatttaatacacacgagtataatacataatttgatcttaaaaattaaaatggtatgaaaattctagaagtgtgctcttacaagatcataataaacaatccattgtttttgtttaattttgtaattaacgatattatttatattagttaaaaaattacatcaaaattttttaaacaaaaaaacaaaagtaacaaacaaccaccaccataccaaccaaaccaccaactgaaaccagctttcaccaccacgagccggcttagtttaaccaaacccctatctaataagaaaaaacgacaaaataaagaaaattcttgtattttgtctctccctcagtaatttcgcctatgtccttttgttcatcatttccctgtcgtttctctattacatataatatttactccttttttatatgtttattagtactattattatttacagcttgaattttagtaccctatgaataacccaatctccaattttagccgtaggatccatcgaacggtcatcgatcacattacggaacatgcattaggattttcatcactgaacatttgaggcgcgtggtaagggtccataggaacgccgtagccattgttcatcggataaccgtggttcgctgcgtagttgtcattcacgaacgcctggtgcgcgtgggcctccataacgtaacggttgtgagccgaaacaggatcctcgtaatacatcgccgatggctgaccgtacccaaaatactccatcttgttcacaatcgtagccggagccacgtcagccggggcggcggctggggcttttccatcggctttcttttccccacctccttctttcttctcttccttcttcttttcttcaccggcaggtgcaggtgcggcatctttgccctttttatcaccggcaccggcgtctttcttatcaccggcgggagccttagcaccgtcgtctttcttagccggcggaggaaccacgtctacgcttctcttgagcttagtttggagataaggagaaagctctttcacgtccatcgtgcccttcacggtaaccaaatctttgccaccatcaatctctactgattcaactcctgcattcataaagttttacatcgttaacacacgaaattactaaactacccctcactttatttcattcaactctttgccgaagggttatctctgaatttttttgttaccacaaaatgtaaatggtacatttaacctacttatgagaaattgaaccaccgcctaactcacttggcttataaaagggtaattctactcatatattattaatttaatatataaggcggttcagtatatcaccatctaatcatcttcatcgttttccatactttattatattattgtttgatattttattaatattaagaaaaaaataatagtaaattaaatgaaaggtaacatatcatacctttgattttggagataattttctttattttatgtatgcaaccctcgcaatgcaacctgatcttcaaaaccaccgtactctgttcacaaataaaaaataaataaaattaatttcgattttttcttttttaaaatgtgagtaaaaaaaagtcatggaaactcagtgaaaggaatataagagttccaatctaaatacacaggaaatttcatcattgactctaataatggtgtggctcgtgtgatgttttattacctgttttggcttttgaacttcggcaggcttcttctcctcagcgggtttcttttccgccgccggtttagcttcttccggtttcttatcacctccggcatctttcttcggcaaaggagagacaagctcaactttcttgttgattttttgctccaccttctctttaacggctaccggatccactttcccgattacggtcagtttattagcaccgatgtcaccagtcaccttatcaatacctataaccaaaaattgtacacaattaacaaaaacctaatttttcaatcatatattttaacaattgcaatttcaatttcccttcgtctaaaaaaaaaaaattgaataattaccttggaaactcttagtgattgctcgtttaattttcttaacgcaaccctcgcaatgtagatcaagcttcagaacgatggggactggtccgtcgtccttcttggcaccggaatcaggagcaacggcggcggcggcgggtttcttatctccgtcattctttgcggcttccttttgctgccattgttaatcaacaaaaacaaattaatacaccaaaaaaaaaaaagaaaaacacatctctgacatatatatcagttctaattaaaactaggattgaagattatagaattgaaaggagtgaatggagttcagtgaggtgtactaacctcgcccatgagtgtagagaaaggagtattagatttgatacttgataagaataggaatatgaatatcgaagattgtaaaaggaaagacttgttcaaaattgaagagttgtattggagagaggaaaaagaggttgcggttgtcttatataggcccaaggaccgagttgggtttgttgggatgagggatttgatgtatgtatgtatgtatgtcatatcatctttaacggcatcatggacataataactcattagggttattttcggtatttacttttattcaataggtcataattaggctgcttctgttcaccaattttcctttttgtttcccaaaattatttacttgtgaattaagaagaatcattatacaattgtaattacaacttcgtttcagaaaaatagtaactagcgtttattaaaataagaaaattgtggagcttcattcactaattaataaacagctgtttgattttattttatttaaaaaaaaacaaatattgaacagtctgtttgataataggccattacttttttattttcttaacatttataaattattgacat

SEQ ID NO: 377908 - DNA, 6549 bp, Cannabis indica
cacattattgtcaatattttgaatttttgaaccttatcttgagcaacagatttttatttttcttttgtctgggaaaagttggtacacacaaaaagcaagaaaagaaaaataaaaataaataatagataggtgtgataatatagaaaggaaaacgaccaaagagaaggtgagggtttgagaagtcagaagtggacaggaacaacggaacattcaatcgacacaaacagcagacaaacgaaccaaaatgaacactaacagattgctaagagacaagacactgaaagcttaggttcaaactaactaaccccatttgttgtcacttctcatcaccaccattaatctttcattattattcctaccacatttccatccgattaggataatgtttttattctaactgaatcttctgaaattttctatgtgttgagactcgagtttgatgagtttgagttgagctaaggttataaacaagccctgatcacttgctcaattctgaatcttaactaacaagtatctactttgggcttcgtaaccaaatgatcaccttgttttgactttgtgataatatttatagccacacgtttaattaatattaataataaataaaaaagtagattatgtagctgtaactgcaatggaattggcttagttagttaattaatttttttttttgagacatttctaatttatgtttgttccgtaaagaaatatttatttaaaataaaatatttttaagtaggggtatagtattgttaaaaaaataaaaataaaaaaagagtatttgcttcgttacttaatgacggagctaggtgtcgaaggctgtcatgaacccccaatttttttttttaaatattttgaaaataacatgtaaataaataattaaaaataaaaataagtaaatttttagttttttgtattgtcatcataatttttttgcacgggcttcatcatcgtaattatttatcgagatttttaaaaatcgaattaataaaaaattaagctaagaaaagatgattttaaagtaaagaagacaaatttttacgtggttgggacgttaatgaactttaattcacaagtcaatattattgaagctctttgagtatggagtattatagacaagtggtcctccaaaagtttgcaacccttagcctagatttaaatcgtaaccatttgtatgaaggggtaaagtcctatttataggctagagtcaggttattgggtaaattcaaactcgttaggattttcatgagtaaaattaaacccactaatgggataaaatatattattatattaacattgggatggttaggtgaggcctagtttgtaagataactgtcatctgtatggagtaatatcatttgatggtactgacaagtgggcatacgccagtgatggtgtacagtaaatgttcgggtactggatgttggaaaaaaatgtatgtatagttttttgtgctatgtgcctttcccaagtctgacataggggacaagcccttgactatgtgggattcaatgttagaatggtgccatttaggacaacactcggatacctcttcgattgcctattctggactaccctgtgaggtcgtccagatatgttttattaagtctttcattgtctgaatgagttgcttttctgggaccaaaaagggtccaaccttatagaggttagagctagcctatagttaaatttggacccgtggtcaggctccgtcgtgggctgatccgctggcttaattgggcatatgaatgggcccaccttagctgatttgggaccttaagggtatatgtataacctattcggaaacacggataacatttacccccaagtcttcacaaaatatttgagtagaccctttcacccttacacattatccaagatttttcaattacgataactttgtaagccataaggaaattttgtagtttgcgttggggagcttagagtataaaaatgtcaacattgagggttgaacccagactagagcctcttgctttttatttttttgacttactgtgtgttttttgttatgtttgagttgactttttttttgtttctcttttgcagtccgtccttatacatacaagagggaccttttggacaccttcatgatgaatgttgagagttggaccagtgctttgggagatgacccaaaagagcgtaaagggaagctttcgagctccagggcatcgagtgtcaagtcaaaggcccaagagacaacatctcctgtgaacatagaagatgttatggtcaataagaacattgcacttctggcacaacctgccatccctttccaataggttcctttgagggatcctccgactccaaaaatagtcacgaagacagctcccatagttgtttttttagagaagagtgttgctccgaacaatgatgatgatgatacatatatgcttgtcttcctttgtaaaggctagcattgggtgttggcaatgcaagcaagaaggaaaaggtggaggctttgaatactttggtaaccatgcgaagagaagagaaaaaggaggagagcaagccaagagaaccaaaagggccaaagtcaaaagagcctaagcaaagggccaaggagacagagtcttgacccaaggatgctttaatcgctccttctcttccaattaagctaatacaacaggatgacaaggactgagttttaaactaggagaggagcttattgattttacgaatgtaagagtctggaacagaagatgtccattcatcacgtcagatttccttggggcagattaatgaggtaaactccagggatccggatgctcctcccgatcctaaaatagttgactgatccgctactacagaagggttccaagttaaactaggcaacgacttggctccattcaccgcatatctcctcaatcaagtttctacctccataagccaacttaggacagaaatatgggccatggctaccaattaagatattatgctcttgtctcacacaccccgacatcaagccattggggtaagtgtcctggttttgcaacacttattacactattgataattgtatgccaattttttactgatttctttctatttgtcatttcaaaatgttattcttgttgaacattgtgcgaacgcgacagccaaaatggccttggagatggaaagcattcaggatgaatgtgatgcagctgatggcaagaagattgtagtcatgactgacttagagtaagctaaagtagagctggagaaagttgctaccaaaaataagaacctaaaatagagcttccaagagactttggatagaaaagtgaaggcctaagttgaatctgccgtctgagcagcagttgaattcattaaggagtttctaaaggtgaatgctaagctagccatggaggtcggtgattttaagctcaattacaaccaagattattgccgtcttattgcctttgagcgtaagtgcaaatatgcggtggagaaactgacgaatgcagaggagaaagtggcaatgtccacgacaaaacttgaaaagaggaaagatcaaatttagactctggaccaagagctctgcatggtcactacaaatcaagatcaattagtgaagacagatgatgagctcaagaaaaagttgaaggtgactgatgatgataaagtcaagatggaaaatataagggttgcccaattataggaggctttcacgtccaccattttcacactttggcaggctgaccaggacatatccctgaaggcattcagcgccaaagaagaagaagtctgtgttaaacttatcgcttgggagtaagaggagcttgctattgaaggagaagcggaggaagggtctctagatcaatgctctgccattttggctgaagaacaaaaaattgattgtcctgcccaagaaccaaattcatcacttttggcttccgttctaacttaccttgcaagttcaaattcaaatgttgatgcagatctctaactttgagtctagccgtttactttatcggttcttttgtttttttttttttttgtttgggtccccctttttgttattgcagagatagtagttatgccctaacagtggagctttttattatgtaattaatttctcaatcttttgatagtccttagacgactgaaataactctttaattactctgaatatacatttgattgaattcattaagtattgtgacttttcatgaatttcttgctaggacttctagatatcttgaggtccaaattccaactgtcgaggcctttggatttcaatcttgcacctagatctattttttaggtttttataagttatctactcctggattgtaaggcttcggttccaaaggcctaagcccacagtcttcaatgtgcttatttcaacccattgattctaagatggattttttttataaagttaatttactttcaattctcggaggttttggttccaatggcatggacctcatggacttcaattttacttttcctttaaagtttctcaattttggaagcctaattttttttacttgtcaaccttatgagggcgtttggatatgttccattaagtattttcttctttggatgagttgtccttccattaggttagagttggcctacaactaatttcggagctgtggtcggactccgtcgtgggctgactcactggcttaattgggcctgtgaatgagcccgccttggttgattttgggaccttaagagtacacacatcacctattcagaaaaacgatagcaataacttaccataaactcgaccctaacttcgaccactacccaaattcaaggtccggggttcgaggccaaccgtctgaaaatgggggttgggttgaggtttgaagtctgaggtcagggtttgtggttcggggcatagtccggggtctagatttggggttaagggttttggggctgcttcggggtctggggtagtgtcggggtttgagttctagggtttgggttcctagtttggggcttgttcggggtctgagttggggtccgattcgagatctgagtatggggttcagggttttggggctgggtcgaggtatagggtctaaggttggggtgggagttagggtccatggtcggggtttggcactgggtttgggtgtgggtccaaatcgaggcctggcacgggtcggggtcggggtcagggtccgggtaggggtcatgggttcagggcctggtcggggtctaggttgaggttcggggtccgaggcctagtcggggtccgattctgggttagggtcacgcttagggttcgaggttcagggttcgggtccggattggggtttgaggtttggggtttaggtctaggtcggggttcggagctgggtccgaggttcaggtccaggtcttggtcggggttggggtctggggccgggtcggggtccaggtctagggttgaggtctgaggttgggtcaaggttcaatttcgggtagggctattcgcggtgcgggttgtgcaattttgactattttttcaaaacaatccgcacatgcagtttttctaatttcccaaactacactcggaccgcaaaactaaaagactgcaaaaactacaccacaaaaaatagtgcggtgcaatatttgtagtttggactgtaccacaacattcaaaatcacaaactgcaccgcgcgttttaagaaaaattcaaaccgcgactgtaccgcaaataattttaaactgcattttttgcagtgtgggtgataatagcggtttgatgaacaatcctagtttcgggtctgggtctagggtctgggtcggagccatggttcgaggtcgggttcaggtttgggtctagggctcggggctgggtctgaagttctggtcccggtttgggttttggggctggggccaagttcgaggtttgaggttgggtccgacatctggggtccaggtttaggtcttggtcggggtaggggtccagggccggggctaaagtcggggccgatgtccgagtttaaggttcaagaccgggtttggagcttgggtcgcaacctcgtaccctttataaatattataatataggctaatatatattatttattatgtattaaataatattatttatattttattaaattttttgttgtaataattaatacaataaatttttttatccaaaattaatattacttgttattaaatacaatacaatttttatagggcctactaaatgagtcttattacaattagtttggtacatgtgtgctatagggaaaatcagttgtagctgtgctgtgagaaaatgcaactgcagcagaattgtgaaaaaaagttgagttgagtgtttggtaaatataaattttaaagtgctgtgaatttttaagattctactataataatgagaatgttataatttagtttattataatcataaatctatataaaaaattatgttatgtaaaatttttattttttatatatttctaattattatttctcacaatataactttatacacatttgataaaaataatttaaattatatttttataacttgtagtttataattttttttttaaattgatgtggtttgttaataataaaaataaaaaata

SEQ ID NO: 377909 - DNA, 4709 bp, Cannabis indica
ccgtagctccagctgttcataatttaaaaggccaaattaattctgcataaagaactattaaaaacaaatcgtatggaaacttaacgtacatgttaaccatcaatgatgcatgttggaaaatcattcaaaaagttcattagcacaatgcccatgagtaaattcaaaagacttttaagccctaatgtctctgagggagaataacaacacagcttagcaaattttaaattcacaaaaaacagcttttacaaatatatagcaaaatcagagggtgccgagaagatattgactgatatcctgaagcagccacattgtagaaccaactcaaagtcctatctagaaaatgtgaagatcttgttatagaggtaactagaggagagcgaaacaataaccaacaaaacaacaagaatgtttaaggaacacaaaccagattaagcacttccactacacttataaatttataaagaggaaatcatcaaggctagctctatacctgttaggcttttaactggcatattcagagcaagggatacagcatgacgagctgccagctgtgcctcagaaagttgtgtgccatttgaatggcctcccagattcaagttaccatgtctctttctaataatggcccacctctgcatatttcaatatatgtcaccagttagtagaatgagacacatgaaaataaacatccaccagagatgaaccaaaataataggatgcagacgaggtggaggcaaggattgttgaggaaaagaaaaatattggaagtgtaaaaaactccttgggcccactactttctatcctttcactaggaaggatttgaccttacccttctcttataaaatgacaaactaaaatgattaaaaggaacatatggaacttctttatataaatactaagatatccttcagtctttccacccttcataccatttactctctttctaattctaatttatcagtcatttctgctatctctccctctacataaaaagtgaaccatataccaaccaagaaaatggtgatttaaacagataccggatattttttttaaaaaaaaggaagaaaagatcgaacataaatgacgcaatgcttggtaaatttccgttgccgggatttgaacccgggaaaactgggtaatacccagacatcctgaccggactagatgacaacggataattgaactaaggtggaatttgatattacaggctagacacttgaattaaaaaataaattatattattattttagacctatgaactatgattactattgatgttatttctgctaccatttattgttttgctgcataaatttgacccattccagcttgctgaaaaataaaatcaacatttgctaatgatagacatgatacaccagtgataaaagagtatatatttaagaaaacctttatgacttcagacaaaacaaaccaagtgtaaagataacctctaatctaatacatcaaaatgtactaccaaatgttgaaggaagaacaaggtacagacgtcagcacacaaaaaactttaaaaaatgatagtgatttcattaaattaacttttgaaaagaccaaatgtaattaccgaaacatgagatgtaaatgaaaattggaaacctcataaacatttcggggaaaaaaataccttccaagcaactaaccctttgtatctcatactggattgttaaagataatggctttatgtatctatgagtaattgatatgtgtgcgaataaaccacacacatatatgtggcaagtcactttaacacgtgggacctatcttaaataaagatgattggttgaatttacttactacataggtgtgtgtcaagtttgtgtgtgcatatatcattattcgtgtatctatatcgtgatttgttcaatctaaacacgcgcgcgcacacaaactatgtgtctcacagacaatgtctctattgtagatctgctcaaattaaacttactcacgctcgcactcggcctctctcactcactctatctcactcattcaatctttggtgctcaacattagagatgaggtaaggttggggtatacaattaaaaattaaatttcaatagtccaacccctcagcttttagagggtatgaaaacagtcaagagagctagaatgacctgagaaagctgcgaggcagttcggtcgcccttaaagtctcctcttaggatattcgcccaattcccttcaccacatttctgcacagcagcaataagttccaaatcctcagcctcagaccatggttttctcttcctcctctgcaagttggcattagctaatccatttagatctgtctcagcaattgttgctgagggtacaggttgcttctggacagagacaggaactgtaacattcgtcccttgtatggaacaacttggttgttctaaagctttagaagactgcccatttggtacgtttatggtcaaaggtgcctcaacagttgagccacaagggatggagtcacttgatgctccagatgcaatcagcacctaaatcaaataacaatttatattgataagatggctatgttaaacaaatacaagtttgcaacattgaaaatttaattatacatatttttatatattattgaaacgaaagacaaatttaacatatatgcgagtgacctcctcccaggtttatagagagccctcacttatagcgaaggaaaatcgtggtaacaatttgtaaactttaacataggcactagagatatttttacatgatcaactagagatagtgctttctaattctagccttgatcacaaattaatcaaattagatgaaagtttgattaacttgtccatcctcgattaaccaatatcaacaaactacaaattcctatattgtaatcatctaagaaaacctttttggcctccaatatgctttacccactataccctaggaggagagtcacttaagagtagtcaattaaattgtccaactgtacttttatttcagttctttattagccttggggggtttcttggaaattaactaatttggcagtatctagccaaacactataatcatgtgtgttagagatattataggattgtcaaagtttttcagagctaaactctgagaggtatagacaagtctatactgtggagaaatatccggcctcttaaatagcccaaacaattggtaaagagttactgcctagacgtttttccaattctagttgcaagtctttagacacttggatatctccacaaagagttattccttttccacaatcgaaccacaataatcagctgtcaaactcagagagattaactactatacataataagacttaacaaaataaataccccaactaattacaaatacactcagccaattaagaacgtacaaccttaacaacaatccacacaaggagtttcaagcttccagcgggccatgaatcgttaaaaaaaactcaaataacacaagataccttaaattcattgatataccttcacacatgctgcagcctcaactaaagcttcaccactaaccgtagggaatgcttccaactcatattccaagtcactatcatcatcctgcaatccaagtttaaaaccactgaatatagagcaaatgtacaatattctttctactgagtaagcacatgagcagaatgtacaaataccctcatccaggcagaattattcattatcataactaaacacaccccgatttaattcatctaacagccatttatatatataaaagtaaaaaagataccaccatgtcccatagcttccattaacagacacatataaagcgagggatggatggtttaacagtacgaaagtggtaaatttccaataagcaaaatcactgaccataggctgagctcctgttccatcttcaaaattttcaagcaaagattggcgataagctaaatggcgccacagcatttgatactcattggcattagaaatcccagtcgaggtcttctccaccaacgcgttccaatcaatattcaaatcttgacaattcgacacttcctgaagtaatgtcaacacagctgttgccgaatacctgccacttttttataaagaaaaaactcaatcaaaacctaaaccataacgaaatataattcaaaaatagaaaattacaaaagacctatttaaaagagttgcaatgtcttcttcgctgatcgaacccttcatcgacttcttcgcgttctcaaccatgtttgatttacttacggagatattgcatattccaagagacccaaaacagtaatattcttcttccctttctcccgaccaaaaatggtttgcttgaaagaaaggggaaaaaaaaccctaaaccctagaaaggaagaagaaaaaagattgagttttgggattggaaagagcagaagaagatagcattagcatattctcctaaaataaaccattgttcttactcaacaagtttggctcccatttcaatttcaatttcaatttcatcttccaattgagaatctcttctcttgtcttgtcttaagaatgaaccaggacccaggttgaaaattaattctgactgccagacaagacttactttgtcttggaggatagaaaatgtaagaggaaaaggaaatgaaaagcaaagaatgtttttcttccttaactagtttggtaaaattagtaatttttccgcccgaactttaacatgtaataaatcgtgctctttgaatttttttggccgttaaaaatttctcccgaactatt

SEQ ID NO: 377910 - DNA, 2008 bp, Cannabis indica
gtataaaggtaaatattctttcccaagatctaattgaacacttttgattttgacctcaaacattctttcaacataagcattaaagtgtttaaagattgtggtggcttcggttttggtttgcatagggtagatccacacaaatttagtgaaatcatcaacaaagctaatataatacttgaaaccatcaagggatacaagaaaagaggggccccaaacatcggaatgtattagctgaaaaggggcagtggttttattaacaacagatttaaaagaaaactgatgtagtttgccatattggcaagaatcacaaaaagctacagtattacatttgacattaggacaaacagtggctaacactttgcctaggacagatttggaggggtgtccaagtctgcaatgccaaacagaggcagtattatgtttgttgaaaactgggttgctgttggtagtacaattaaaagcagcaggaggttgagattgatggaggaattgggaagactgagaggagacttgtgtggatttaacagctgcagctggtataggccatcactgaggataccccgaaaaagaacttggctggtcttcttgtccttaataagacaacaagtgtcatcaaattcaagcacaacatggttatcttgagtaaattgggaaatactgacaaggtttttggtcatattgggaacatgcaatatgtcttttaatactaaaggatacgaagaaagatttgtatgcactgagttagaaccaatgtgtaatatagggatagagtggccattaccaactgtcactttagccttccctatgtagtcttgtttgtgatcaagattttgatcattggaagtcatgtgatgggttgcacctgtgtccaagtaccaggcagtggagtaatcttctgtgggatgagtagtggacattagagcctgaggattatctgtattatttgaggtggaggcaccattggggggtggtggaggtccttggaaagagatatcaaaacgatggtaacatttctgcactgtgtgtccactacggccacatagttgacagataattttgtttccacgacctccacggcctcctcctctgtagagttgaccacctctgtatgaaccacgtatacctcgattaccactgaagttctggccaccacgactggttcctccttggcgagaaagaccagcaaaagtagcctgagcattgtcgagagtggcactggtttgttggcttattctcatttcctggccgtgtaacatgaactgaacttcttgaagagagagaggttcagttcttgatgttaaatttactaccacagcttcatattctggtctaagaccgccaagaatgtatagggccaagtcatcatcggagatcggttgatccgcggcagcaagcgaatcagccaattgcttcatttttaagaagtaatcatcaatactcatggatcctttctttgttgattgcaataagccacggatttgaaggagccttgctctggatctcgtggcaaagagttgagcaaacacattccagatctccgacgaggttcgacaattgataacataaccaagcattggttcagaaattgaattcattagccaatgcattatgaattgatcaaaactaatccaattttgataggctggattgagaacgttacctgcaagaaattgagctggaatcggaaaggtgccaagaatgtaaccatcaagattatacgcacgaactgctgcaagaaccaaggatcgccagaaggagtagtttgatcgatccaatcgaaggttcagaggtaaaaggttgttgttaggcaagccaatttgaactggttctgggactgggagttgagcttgaaccggaggaatgggcggagctgtgttatcttcattttgagcttcaagattgacttgtgcaccagtgacatttcccgtgggtgtgaaatttcctgtggactccattaaagctctgataccatgaaagagttcaaagaactcaagcaaagataagaaaa

SEQ ID NO: 377911 - DNA, 4499 bp, Cannabis indica
gctatggatgtggagataatagctcttcttaataacaacacctgaacagtagtgccccttccaccaaacaaaagagccatcagttatagatgggtcaacaaaataaaatacagcagtaatgggagtgtagaacgattcaaagcctgcttagttgctcaaatctatacccaacaagaaggacttgatttttttgacatttttcccctgttgccaagatggttacttttaaattgttatttgccacctctaccgtaaaacaatggcacacatttcaactagatataaacaaagtgtttttaaacggtgatctagatgaagaagtttatatgcaaataccacagggtttcactactcattcttccacaacatggcttctactaattcagtaagtgggccaactcagaggtcaataaaattgaaggcacggtttctaacattggagattagaagtcaaaaagattttatgcgttctctctgcctgagattaagatagactttaattgttgacctcgtactttgcatacttttttacttgtatcatttttattctattttttttaaagatttttgaccttcgtattccgcagggaggccaactcgaacaaagctcaatggggatcaattagaaattgcagaggttctaagttgtctattgatcaaagatcgcgattggcatatactttgtacaatggcaaaactacaagaacatagactgatttgaagactctagcaagaactcgcgtacaaagagtcttctgagaaacaaaaggtgaagattgaaagatgtctctccaaacaaactctaaggcagcttgcaggtaatgtgctcctaatatgcttaggaacttttagtaaattcatgtgattacttatacttagtgtatttttgcagatatgaccttccttaagaatgccaaagttcttaatcgcaagtcgaagaccaacaaggagctcataattccatttgtgaaccctcttcagaagagaaagattgatgttgtcaatcctccggtcatcgacttatcaaagaagcaatagagagttgctcaagaaaaggggaagaaacctgtggtggagctggtggtaaaagctcgcagctttatggcccttcaaaagctctatgttgatgacaacttcttttctaacttagagaagacctcgaatgcagatgtcatgagtcgggcatcccatcagttggtccttggaatgacggaatatgcttgctcctttgtggccatgcagcagacgctaaaagacttcgagctcttgaagaggcaaaaccttgctcttcaagaaggcttgaagaaaactaagctcgacatggccagcaaagattaagaaatcaaggatatcagtaaggagaagggaaaagcatataagaagatcaaggagcgctggaggaccaagtcgttaatctcactcgcgacttgaacagcgagaaagaagaaaagaagaaatcttatgactaggcagttaatgactacatctatactactctgagcaagtttcctaactttgactttgctatctttggtcaagaagcagtcgagatggccaacacttttttgcaccatgtctccaacttaaacccaaggcatggcagggactctttttcctaaagatgctgctcctaaagctaaggttaaggaagtcactaagaaggtcgcggaaaatatcaatgcccgtgctccttaaaaaaatatctcttttttattttcttatttctttttattaggagtacaagggtactcactttttgtactgtactcactttttgtacttatttgaaagataaatgggccatgtgccttttatttcctcgcagtttctaaacggtatatccttcgcggatatttatttatttgataaatattttctaagtatgtttgcctgcgatttatgttatatttagcatgattgtaaatgcaacttagtgcatttattactaacttaacatttgatgcaatcatgattgtaacttggttcaatttttgagataacgtgatttctcatactgcaatttacgaacatcttggtgttctctaaaataagaaaatcattatgtaaatcaatatgcaaaaataataaaaaaaaattgaaatttgtgcagtaatgagattagtgatactttattaatgtcataacaaggatacattcatcctccctatacttagggaattgaaatactgaagttaactaagtatacacatgtgtgtactactaataataaaatttagatgctcagtgttccaagccttgtcgaagactgaatcattgaggtcagaaagacaacaagttgcagtgctaattttttctgcaatgaggtacggtccctcccaattattactgaaaactccatgtgttgaattccgtagtattgggcaagactttgtagagaactaggttacctactccaagactttcttcccttgacttttaagttaaaagaatgtggtgtgcattgttgataagttgtgtttgttagtcgagcttgatcttgtttttcctccaacaaatcaaaattgagatgtttccctaaatcattgtcatcaatattgaaaatatcgcgacgaagggaaccagtacctacctcgaccgggaccatggcttcacacccataagacaatgaaaaagagatttagctaatcctttatcacggtgtgatgctgtacaaccacaatacttgcagtagttcttatggctagatgcatttcttttcttcgagctttccttttatggtatgcttgattattttgttgactgttttggttttcctgttactttggggatatgtgactacagaaaaagccttctgtattcccaagtcgtcacatagtgaccattttcccttacaatcaaactgtttaccattgtcaaaaattaacttgtagggtatgccaaacctacatattatagcttaaaatacaaacttgtgaagttttgcagcaatggtggtgctaaatgcttctgcttcggcccatttggtaaaataatcaactgtgatgacgacatacttgactcctcccttgcctatgggtagcttgccaattaaatttatgccccagactgtaaacggccatgggctggtgatagagtgtaaatttcttggtgggctatggacatatgtagtgatattatggcacttgtcgcatcttttagcaaaacgaattgggtctgcacaaagtgttggctagaaatatccttgtcgcataaattttagggccaaagaatttctactagtatgattacagcatattcccccatgcacctcacggaggatatagtcacatttgtcaccatcgatgcactttaagagtggttgattaaatttttggtggtatattttctcatcatagattacatatcaagctgatcaatattgcaatcttttttcctcgaggttgtcattaggatgcttgccaattcttagataggtgatgattagagtcatccaggtgacttgatcgtcaacatctattggcataacttcttatcaatcaaaagtcagtttttcgagtatgtcaatgggaatcacatttagtaatttatcttttcaagttgaggtcattcagggcaaagaatacacataagagttgtaagctccaagtattcggctgaccgcaactttcttgaacttggacaataagttgcaggtgtgagctagacatttagtaagtcgaccaccttgatccaagtattctttgttgacctggcaaataatgatttgagaatcactaaaatctttgagatacttgcctttcatttcaagagcaagttttaaacccacgattagggcttcataatcaacttcattattagaagcatcgaattcggaccttaaagccacatgaactttgaatttatttgggatgattaacatgattcctcctcccaacccttcactgttcgaggctccatcaacatatagagtccaactcgggccctctagaacatttgggttaattcgttcttcggttatggtagccaactattcatggagaaattcaagaataaatttagcaaggccttggcctttaatcactgatcatggcttgtaccgtttattaaaatggttgagatcaatcgaccactcaagaaggtgtccagacgtatcgggcttggccaatacttgtcgaaaaaggcaattgcttaatcttaattttatgggtctgaaaataaggttgcaccttcaaggaagccacgactaaggcaaaagccaatcgttccatctagggataacgtgattttgcatccactaagcgttttcttacgtaatagatgggaagttttctaccttggtctttgcgaatgagcactaagctaaatgcatagtcaaacacagggagataaactaagagcacttttccaggcagcgacttggagagtattgggggtcaccccagttgtgtttttagagcttgaaaagccttttcgcacttttcaatccattgaaactttttattaccttttaaatttaaaaaactctttacacttatcaa

SEQ ID NO: 377912 - DNA, 2276 bp, Cannabis indica
tagccatccagtgcatctggtgtgtttgacattgatcttgctttgaaggaaagatataacaagtataaagaatcatggtcaagacttaatgtttcagaagaaatagctgctatattaaccagaagaaatcctgatgccaaatgcatctgttggaaaattattgtgtcttctccaaagaataatccagaagctgaagtcagaaaagggagccaaactgcccattcttcagctagtccatggttgatctcgaaactcattccttctagaatagacgatgatgatgatttgttggtttcatgtcctggattgtcaatttggaagaagtgggtttctggtgaatcacgtacggatctgacttgctgcttgtctgtagtgaaggattcaaattctaatgatctgattgagactgtttctggtgcaagtgctgttttgttccctgtatgtgatagcatctcttggcatcttcaaaaagctcagcttcataaacttataacttcgataccttcaggttcttgtttgcccctactaattttaagtaactcatcatgcaaggatgaagtctcagatcttacctccataataataaatgagttgggcctcctcaacattgacaaatcacgaataagcagctttctcgttgtttcccttattgaaaatgagcaaatggaatgtttagatgggtttctcagtgataaccaattaaggaaaggactacagtggctggcaagtgagtcacctccacaagttgttcttcactgtatcaaaacccgtgaacttgttcttgctcacctgattccttccttggaagcactagacaggatcagtgatcgtgaagtaaatcctaatagctttgtcatagccttcaatgaagcattggataagtcaattgtggacattgaaactgccgtgaaagcaaatcatacaagctggccttcccctgagattgctttactggaagagtacagttatgagcgtaaatatgtggaggaatgtgctcctgaaattgggtggagctcaatggagagaatcgaaccactgatagctgcattacttaattgcaaacttcctcttttccatgacgacctgtcttacttggcgaaaggtacaaatacagacagggagattaagatccagaaagaagaatttggaaagagccttattagataccttgcagaatcaggtattgggctggctataaatgaggctagcataatgctgcaaagttctctgcttgagttgcatggctcatgctaccgaattgttccagattgggttatgatcttcaagcggatattcaattggcggttaatgggtatttccaatggtgcattttctttggcttatgttctggatcatcctgatgtctttccagcttttggtgatctagacgagctggtgcttgaaggcagtagactttcatcgtattatgtaaatcggccatctctggatgaaatgatcgaagttagttgtgttccccttccttttagcaagggacaggtagtgggagctaatcaacctcctcctcagattaatgcctatagtgaagttcaagaacctgtcgacataagtgatttcatggagggtaattcagattttgatcaggatcatagactggttgttgcagatagtaacgttagagaagcacgggagactgacaaagtgaatgtagaagctgaaaatttgagtaagttgctagagaaatgtaacatactacaaaacatgatagatgataagctatctgtatatttttaattttttgtaaaattttgtattttatcgtggacgtatgaattactcgagttatgtccaatttttaaagggcaataatcaatagcaaaaaagcagaattttggtcaaatttgtttcataatgcaagtgttaatagctaatgattatcaacgaattaaagctaataagagtgctaaactagtagaatctcttgaaaaatagtgtttagctaaatgtagttgcaaacatttttaagttttggtgtataggtaaatctttttattatattttgtgttagtgctgatctttttccgagatacggccaatttcccaaacatccaattgctattttcattcaacaaaacttcaaaaattattacaagtctttttatactcaaattcaaaaaggcaaacatcatgacagaaattagagctacaacttcacacgaattcagcgtgacagcagtagaacaaagtctcggaaccagcgcggcttggcttgctttgttagaaaaattaataatgaacccaagatctatttgtatata

SEQ ID NO: 377913 - DNA, 7049 bp, Cannabis indica
aatctcaattatatgcaaattttataatctcgagataaattaaacatgcaacaggcattaaacacagaaattctataagctatctaaaccatacatgtactctcgtcctatatcgaaattcagttctatttcactataacatattggcacccacttctcagatcttgcatcaaaattataaaagcaattaattgatgaccagacaattaaaaataattaagtatgaatgaaatagaatacatagaaattgagggaagataaaatcatattaaaaccataaaataatgtcaacaatatccatctaaaccctaattaagtgtttaactacttatatttatgagagcaaaatcacacatattaacttaagaaaagagaagaaaatagagaagaaaagaatgctgaaaaacctctgaagaatacctctagtattgcagttgatctctgaaattcgtatctatagactgctgtttatttccttctaaattgcctgaaatcaactgaatttcactctttatatagccattgagggattgaaaagataaaaacgcacatgttgatgatagccaaaccttaaatcaattttgaagaatactgtcttaccctgaagttgatcaaacagatcatcaattctaggcaaagggtatttatttttaatagttaacttgttcagctctcgatagtcaatacacattcgaagagtctcctccttcttctttacaaataaaattggagctcccaagggcgacacaccaggtcgagtgaaccctagatccaacatctcttgaagttgtatcttcagccctttcaatcttatcttaattaggtttctttcgatatttggagttggcgcctacataataaaaaggagagtaagattgaacaaagtaaaatatgtgaccaataagctaatccccattgatatgaagtggatcactttatatattgggtttggaataattaggaatgttgggcagtgacatggacgtgtctcccaagtctaattttaatttgttataataaatttcaaggccatgaatatggtgttcatgcttattagggttagaagatgcaaacgaagatgaagacagagataagagataaggacgaaatgaataaaactttgttaatcgagagagtagtagaaaagatcaagaaccttaacaaactatcttatctaagtgttactatggtaaagtcattttctaataaattagttgtcaaaatattatttaatttattatgaatatttaattcacttaaatatatttttcttgtggtaaatgacgttttatggctgtactatattgtttaggaattgttttgataagagaaaaataattctctttatggaatgtttgaataaatagtttatatatatagtgtaactgatcctaaatgattgagatttgatatttttaatttttgctatgtatatagtaaattgtgtaatcattttatagcaagaaataaaattaaattcgtgatcttggctctacatgaaaaatttgttgattccgtctgagttgtcactacagagtgtgtttcaatcgctgcaaatcagggtttattttaatgaagtttcatacaattgtaaaaaatatattgtgactgtctttaggatttttatatgctataaataggatctagagagctgtcaatcgttctcatctcttcaagtcttattattttatattttgagatttgtgtgaagagtgtttattgtgagaaaatttacaatattctactaagttttagtttttgttttaatgttcttttattgttcttaaaataaggtgaagagcttcgttgaacaagagaaaaattctttaaaagaagacttatctaagatttatttaacgtctagctcttgttttttaagattgtattttaaaaaaactgatgtactatattgtaaatatagctgatttttcatgttaatgttagttaaattttattagaaaaaatgcacatttatagcatttatgcactaaaattatttttttttaggaagaaaaaatatataaattgttacccaaattatttgttgtagtgtaatagaagataaaacttatctacggaaaagaacaggcccccatgcggaacaaagaaacctcacttaatctaaaccgttcatttggaatgtacggtgtggattaaggacatgtgtatgatcaaacaaactctaataaaatttcttaaaaaaatcatttttttttgtagataatgcatgtatgacacgtctgtagacgagtatatatccaaaaatctgatttttatgtctccttcatccatattcacactctataaacactaaagccactatctttccccccaaaaccctcactttcttgcattttctttctcattttaactcaatccaaacactttttgcaactacccacaagctcaaattttctgatcaaaaatggctactttactaacttctttgcagacaacccctcttcactccctttattcctcttcatcgtcatcttcaatggcaacaacccttttatctggatcatctgtaaagccccaaatagcccctttaacttcaactttcttgaacccatgtaagtttgtgaaaaccatttctgagattttgcccagaaagaagtgtagtagtatgtcttgggatggtccgctttcttcggtcaagctcatcatacagggcaagaatttagaggtagtttacttgatcttacttgggttttctttcaattcatgaaatatgtaatgaaaatttctcagttttgtggttttaattgtgttatttgattataaataagcatttgaagaattttaatcacaatcaaggcattagctcaatgattatattggagttacatatgtagtgaaatttcaaaacccctttagtgtttaagttttgactagattgtttttccatactaaattctaagatgaaattgagtcaattaatgttttggattacaattgtcactaatactacacagtgttacacattgaactaaatcgaaattggagacttgttcttacactatgaaaatagttcagggactcattaacaattttatagttgtatgaaatgcttatagatatgtaatgtcattttcacaaatggataatcaatgaaatgaatgagaattaggagtattcctattggagtttggcactaactcgaagagtgcttcccttttgcataatgcagttgacagacacagttaaaactcatgtggaagaaaaggttggaaaagcagttgtaaagcatagccacctagtgagggaagttgatgttcggttgtcaattcggggcggtgagttgggaaaaggaccaaggattaggagatgtgaggtacaaaacaaccttacttattttggtttttgatactacttttttatgggattgcagcgaatagttcggtgtttgagggtttgtgttctctcaggtgactttgttcttgaagagacatggggtagttcgggccgaggaggaggcagagacaatgtatgcaagcatagacattacttcctctattatacagaggaagttgaggaaaatcaaggagaaggaatcagaccacggccgacacatgaagggatataacaggtcgaaagttagagatcctttgactcctcctttagagcaattcgaagaaccagctcccgaggaaaaggaagaggaagaggaaggaaacattattgaggaggttgtcacctaactttttcattaaaatcatagtaaaacttatggaatagaattagattgcatcttgatttaagtctaattatatatcttcagtttcctttagctttaatcatcattttcaccctgataatattctcaatacatttcagattgttcgaacaaaatacttcgatatgccaccgttgactgtcaccgaagcaattcagcaacttgaaaacttagatcatgacttctatggcttccgaaatgaagaaactggtaaaagaaaaaacaaaacaatgtcctttgcttattaagtttacatcattattagtttaatatgtccattggttgattgctctgcaggtgaaattaacatagtgtacaaaaggaaagcaggcgggtatggacttattgtaccgaaagatggagcttcgcggttagaaactaaggtggtggtggaaccagctaaggaacactcattggcagaataaaaaattggagtttccttctgtatagactcgaaattcgcatcaactaatttgaaggcaagtgctgcataataccatgtggatttctccccagagaatttgataccatttctagccaaagttccaatatgcattgcatgaacaaagttttttaatccagatgttcttgtaaaatgagataccccatgatctaattttgtgtctgaacacaaagacatcacatgtaacatgttttagtctgtaatttctatgttatataaatggtgaaattcaaattatatgcatgagaaaactcatatattaagaattatcatcttgattctcataccatagtgttagtatgttttttaggtactataaaagtgttatgaattgcatagtatttattaccatttagagtaaattctaccttaaatcacaaaatttatagtatataataaaatacattccattctttttttcccataatgagtgacaagtccatttcctatatatgtaatttttaaagtgtcataatgcttcattttgaactttattgaaggcaatcttgaacattctacaaaaaagtgttgctcttttggttctttctcaagaaaattggtctcataatagtattaataaacataagaaaatggtctcaaactaacaaaaaaaatagtcatatatatatagttttaaactttattaatattagtcttgataaatcagcaacattttttgttgctgttttttgttcctctcttcccaagaaaaatgaaaatggtctcaattaaaaaccatatataaattatggtataattagaaactaataattaattaattattaaaagagaaaactctaaactcagttctgacagaaattggagttgtaacaagatgaacaccatcactccaagtcaagcttccaaaatagtaaccagtagtaaccttatgagatgaagaaacagttactttaaaagacaaattctttgttgttgagttgaacaccataaaacgaggtcgtattgatactttaataccttgtggttgattcacaatagccttataaacagagtttattggtcccacatttgtgactcttcttctcaaacttgttcttcttctaagtgatgggattgtaatggttggtaggttcaagttgagaatactatttttatttttattgtttttattattattattattagttggacataatgaattataatagttattgttactatttggggttataactatttgttgaccaagcttggttatggcagaggatttataacccattgaacagagataatagatataatcagaagtgttcatgtcataaacaaggcctggatttacagcactgttgaaattgattatgccacctccatagtcaaatgggtctgcaagtttcattgtctctccttctgcaaatattggctcaccagaaggatcattattccatgctgcaacataacagaaaaataattaatatatataatcatatagtatactacaactaatactatatatgcataacaaaacaaatatatttgagtgaattcataaattatacatgcagtgtaacatgacactattttaaaccttattatatttatcaaagctggaacaataaaccctattataaacactattatattatacagagatagatttcattggatttctaaagagaattattaattcttaattggaaataaaaataaatagttcatgcatttatatatgatatttagagatttattgtttctgactttgttttcttatagagttacacttcaaaatcaattagtaatgaaatgaatagttaatgcatgttatgtatgatatttagtttcaacttttaacacgctatcaatgtgggaatctctaacatccccacaacattatttttttctcacttgcacagcttgatcacaagtggctcgtttaccttacaacgactccttttttttggctcactatcctgaatcacaaacgactcttttagctcgtttttttggaccggtttttaaatttagttcgaatacttcttagaatttaatttgactcagataccatattaaaattatacgatgcatgagattttatctcaaaactaattgacagtgagaacagtaagacttttcaacatattaaaattataccatatttagtttcaacacattatgaatgtaagacttttcaacattccctattttttctcttttgtttcaccttaactattatcttaacaagttaaagttaaccttgcttggagtgaggataccatatatcttctgcatatttgcatggagttttaagaaattggtattggttatatatatatagagagagatgaaggtataggacctgtagtgacaatggcagacttgatagcagcaggagaccaatcagggtggagagacttaaggagtgcaacaattgcagaaacatgtggagtagccattgatgttccagacatgaaagcaaacccattcttcttctttgggtcagatggagacactgctgataatatgttcactcctggggctgctatatctggctgcaaccacacacacatgtcagaagcagcaatacgagttatatagtattttgcttgaagggcaaattaaggttccaagggatatatatgacatattattattattattgcaatatgggtaccccacacattttgattatattatgagaaattgctaactacacttatagaatattgttattaagcactttaggtggcgtttggttggaggtaataaaatagaatggaatggaaaagaaacaattttcattccattcctttgtttggttgcattttaaagtattggaatggcattccaatggaatgctctttccaccattttggtggaatggctattccattt

SEQ ID NO: 377914 - DNA, 8832 bp, Cannabis indica
tatagaaaatcaaatttctcaaaataaattcagatattaaaacagatagaggtggattaatatatccattttaagggtgcattgtagaattttctaatattattttgcccaaacaaaacttcaaacaataaaagtggaggaaggggcagcaagtttgacgtggtggaggggcaatttcgtaatttacgaacccaacatcccatcccatcccattggtctataaatagaggtctagggctcgaaatccatttcttttagtctctctgcgagagagttctctccatatttacgcagttggatctttctctccccaaaattacaaaaacaatttcatcaattttttttttaattttaattttcaaaaaaaaaggaacgaaattaattgtagccgccaaaacaaaacttcaccaactcaaatttctgcttcactctctcaaaaccctaatcgatcgccatggatatccgattcccttactctccggctgaggtagccaaagtccgtactgttcagttcggaatactcagcccagatgagatcgtaattcttcattcatattactactactctttttcgtttattctaattcatgtatatgtatttgggggaattagagctgtatttgatgtttgtgtgtttgatttgcagaggcaaatgtcggttgtacagattgagcatggtgagacaatgatgggaggtaaacctaagatagctgggttgagtgaccctcgacttggtacaattgataggaagatgaagtgtgaaacttgtacagcgaatatggctgagtgtcctggtcattttggacatcttgagttagctaagcctatgtttcacattgggtttttgaagactgttcttagtataatgcgttgtgtttgcttcaattgctctaaaataatggttgacgaggtattactataagattcagttgtttttttgcttttgttggttaagttgttttagctaatttgaagtgatgatttatgaagtttaattttttttataggatgaccacaaatttaagcaagctatgaaaattaagaacccgaaaaataggctcagaaagattctggacgcctgtaaaaacaagcaaaagtgtgatggtggtgatgaaattgatgttcaaggtcaagaaactgaggaacctgtgaaaaagagtaggggtggctgtggtgctcagcaaccaaagctcactatagatggaatgaaaattattgcagagtacaaagctgctaggaagaaaagtgatgaccaagagcagcttcctgaacctgtggaaagaaaacagacccttactgcagagagggtaatggatatctggttctacaagattttagttatgagtgttagtactaatgacatgttacacttatacgttattgaaaatttttgcaggttcttagtgttttgaagaggataagtgatgaggattgtcagcttttagggttgaatccaaagtatgctcggccagattggatgattctacaagttcttcctatacctccacctccggtgcggccttctgtgatgatggacacatcttctaggagtgaggcaagttttcttttgctactgtattgtttttttttccttgacagctctagttcttacaaagattattattttaactcttttgtctttgttgagttcaggatgatttaactcatcaattggccatgattataaggcacaatgagaacctaagaagacaggagagaaatgggtctccagctcacattatttcagagtttgctcagctattgcagtttcacattgccacatattttgacaatgagttgcctggattgccaagggtatacctgcttgaaatcatttatatgatgattcatctaagcatatttatatgtattttggtgtcatatgagtttattttatgtgcatttgctgaagctttctttgctttccaggccacacagagatcagggaggccaattaaatcaatttgcagtaggcttaaggcaaaggaaggtcgaattagaggaaatttgatggggaaacgagttgacttttctgcacgaacagttatcaccccggacccaacaattaacatcgatcaattaggagtgccatggagtattgctttgaatcttacgtatccagagactgtgactccatataatattgagcggttagtcttcttttgcagagtttcactttcacctcgttatgtagttttccatatcaggttctaatagggtgcttctttatggagcttcaggttaaaggagcttgttgagtatgggccccatccccacctggtaaaactggtgctaagtatatcattagggatgacggacaaaggcttgatcttcgttacttgaagaaaagtagtgatcatcatttagagcttggatataaggcacggtttacatttcctaggttctaaattgcgtttccatctttaggaccgttttccaatttatacttattgtggttgcaggttgagcgccatctgaatgatggagattttgttctcttcaaccgtcaacctagtctccacaaaatgtctattatggggcacagaatcaagatcatgccatattcaacattcaggttgaatttatcggtcacctctccatacaatgccgattttgatggtgatgaaatgaatatgcacgttcctcagtcatttgaaacaagagcagaagttctggagcttatgatggtgccgaaatgcattgtatcccctcagtcaaatcggccagtaatgggaattgtccaggatacactcttaggttgtcgtaaaatcacaaagagggacacatttatagagaaggttagtgattgagaagataggctcacaattaaatgttctcagtatcttgtatttccagtaattggtgcgagtctaatctttttaaatttgttgcaggatgttttcatgaacattctgatgtggtgggaggattttgatggaaaggttcctgctcctacgattttaaagccacggcctctctggactggaaaacaagtttttaatcttattattccaaaacagataaatcttaacagaacttctgcctggcactctgacacagaaactggaaatataactccaggggatacatttgttagaatagaaaagggagagcttctatctggaactctttgcaaaaaggctcttgggacatcttcaggaagtcttatacatgttatatggtatgcaattatcttttttttttgtgcatatgcagcatgtcgaactttaacactcttaatttaattggaattgtaagattgcactgttttgtttataggtggtcatagatgaaatttcggagaaacaaaattttatttttcataaatacacaacagtgaacttcagccattatgatgattatatatccattcttggatagaaaagcacagtgaatggtgtcatagcagtcttaaactgttgtatatttttagttttcttgagcttcaactgttttacttgaaacctgtttgattctttgtcaatgctgtgcacagggaagaggttggtccagatgctgctcgtaagtttctgggtcatacacagtggcttgtgaactattggcttttgcagaatgcttttagcattggtatcggagatactattgctgatgcatcaactatggaaaaaattaatgagaccatttcgacggccaaaaatgatgtgaaggaacttatcagaaaagcccaggagaaaaagctggagcctgaacctgggcggacaatgatggattcgtttgaaaacaaagtgaaccaggtgcctagataactaatatgtgacttggtttgacattattttattagcttttctctgccttctgctgagaactaatatgtttggtgcctttaggtcttgaataaggctcgtgatgatgctggaaatagtgcccaaaagagtttgtctgaaagcaacaatcttaaagccatggttactgcagggtccaaaggaagttttattaatatctcacagatgactgcttgtgtggggcagcaaaatgtagagggcaagcgaataccttatgggtttatagatcggacactgccgcacttcacaaaagatgattatgggccagaaagtcgtggctttgttgaaaattcatatctacgaggactgacacctcaggagttctttttccacgctatgggtggtagagaaggtcttattgatactgctgtgaagacttctgagactggttacatccagaggagactagttaaggctatggaagatattatggtaaaatacgatgggactgttaggaactcattaggtgatgttattcaatttctctatggagaagatggtatggatgctgtttggatagaatcgcagaagctagattcattaaagatgaaaaaagcagaatttgagagggtgttcagatacgagtttgatgatgaaaattggaatccaaattacatgttgcctgaacatattgaggatcttaaaaccatcagagagttccgcaatgtatttgatgctgaagtacagaaactagaaacagacagattacaacttggaactgagattacaaccacaggtgataattcttggcctttgcctgtgaacttgaagaggcttattcagaatgcacagaagacctttaagattgacttcagaaggacttcagatatgcatcctatggaaattgtggaagctgttgataagcttcaagaaaggctgaaggttgttcctggggatgacttattgagtgttgaggctcaaaagaacgctacgttgtttttcaacattttgctccgaagcacttttgctagcaaaagggtactggaagagtatcggcttactcgggaagcatttgagtgggttactggagaaatagaatctcgcttcttgcaatcacttgtagcacccgggagaaatgattggttgtgtgggctgcacaatctattggtgaacctgcaactcagatgactctcaataccttccattatgctggtgtgagtgcaaagaattgcaacgtcttggtagttcccaggttgagagaaattataaatgtaggccaagagaatcaaaactccatctctctctgtctacttgaagcctgaagcaaataaaccaaggagagggccaaaacagttcagtgtgctttggagtacaccactctccggagtgtaactcaagccacagaagtgtggtatgatccggaccccatgagcacaatcatcgaggaagatgttgattttgtcaggtcttattatgaaatgcctgatgaagaggtcaacccagataaaatatctccttggttgcttcgtatagagttgaatcgtgaaatgatggtggacaagaaattgagcatggctgacattgctgagaagatcaaccttgaatttgatgatgatttgacttgtatttttaacgatgacaatgctgaaaaactgatccttcggattcgtatcatgaatgatgaagctccaaaaggggaattaactgatgagtctgccgaggatgatgttttcttaaagaaaattgaaagtaacatgctgacagaaatggctcttcgtggtatcccagatattaacaaagtctttatcaaacatggtaaagtaaataagtttgatgagaatgatggatttaaaccagagaatgagtggatgctggatacagaaggtgttaatctattagcagttatgtgccatgaagatgttgattccaaaagaacaaccagtaatcacttgattgaggttattgaagttcttggtatcgaggctgttcgtaggtcacttttagatgaattgcgtgttgttatttcttttgatggatcttatgtgaactaccggcatctggctatcctttgtgataccatgacctatcgtggacacttgatggctattactcgacatggaatcaataggaacgacactggtccaatgatgcgatgctcttttgaggaaactgtggatattcttctagatgctgcagtgtatgctgaaacagattgtttgaggggtgtgactgaaaatataatgttaggtcagctggctcctattggtacaggagcacctaccttgtatctcaatgatgagatgctgaaaaatgctattgaactgcagctacctagttatatggagggccttgattttagtatgacaccttcacgttctccaatgtcggccactccttaccatgatggtttgatgtcaccaaactatctgctgagcccaaatctccgtctgtctcccattactgatgcgcaattctcgccatatgctggaacaatggcgttttcacctacttcatcccctggttacagcccatcatctccaggctatagcccatcttcccctggatatagtccaacttcccctggttatagcccaacttcacctggatatagtcccacctcacctgggtacagccccacatctccaacctacagtcctagctccccgggctatagtccaacaagtcctgcctattctcctacaagtccatcttattcacccacatcaccaagctatagccctacttctccaagttacagtccaacttcacccagttacagtccaacatctccaagttacagtccaacctcaccaagttacagtccgacctcacctgcttacagccccacttcccctgcttacagtcccacctccccagcatacagcccaacctccccatcttacagtcccacatccccttcatacagcccgacctcaccttcttacagccctacatcaccttcctacagcccaacatcaccatcctacagccctacatctccgtcctatagtccaacttcaccagcctacagtccaacttctcctggttatagtccaacctcgccaagttacagcccaacctcaccaagttatagtccaacatctccaagttacaatcctcaatcagcaaaatacagtccatcattggcttattctccaagcagtccgaggttgccaccagccagtccttatagtcctacatctccaaattacaggtgagttgggttaaaaatattgggacctatatttttatcgattgcatggctgcgatttcaaattatttgacttagttataaacacaacatcttatatggttgagcttttcctttttgttgcagcccaacatcaccgtcgtattcacctacatctccatcttattctccttctagccccacatatactcccaacaggtaagtagctttagtaaccttctcaagactttatactgagaatgttggaatagcttatgttctaattctttctttatgtaactaacagcccatataactctggtgttaatccggactatagcccaagttctccacaatacaggtaaaaaacaaagacaaaacatcattttccttaaacccttaacttgtatcaaacagagttgttatttgtatcttcaacttttattttcccttctttgcagtccaagtgcagggtattcacccagccaacctgggtactcaccaacttctacgagtcaatacaccccacaaacaagcgataaagacgataatgatgataagagcactcgttgagccccttttttcaagttgttaaaaatggaatggggagattattcaaaggtcagtttctataattgtgagaataccatatatgtataaaattgtttgagcttgtaatgggttggttcaaactgatgtttatatgtattatgctgagcagctttattgggtaagtggacttaagatctgttggaaccttggccaaaatggaccactccacttcagacctaaaggacccagctttttctgagaaagttcttttgtactatactggatatgagttgattataacaatttgggactgatgatactaattccaaaagacataacaaccactgcttattaaatttctgttaaatgcaacatcgtttttgctattcttctagtattactactatagtccaaaaatattgattgagatgaggactgaggagggtctatgtataacttgttatatttgtaagaaatttattataagaaaacaactttagaattttgcattagcaccccctatgttttaatggtattttttttctcttttctaattttttagtattgtacttgaatatttctgttttattaccattttgtcaactcaaagttcagtagttggatatttcttttacttgttttaggacactcataaatgatttgccaataaagtggctgccaatcgtaataaagtggctgccaaaattctaactatttttagttaaactcaatacaatcagaaatttagactctaaatatcattaataatgtccatttacataaaacatatcccaatgtctcaactctcaagtgagctataggtggagtttccaaaaataacaagaaaaagtgtgaatatgtggtagttgtggtaggtataattatttgatgaatattattggtgctcaatattttttataggtgacgctctacgattagttcacgatattctttaaaaattattttctgacccgatacttaattatacttattaacaccgagaagagtattaaacaccaataatactttttagcaataactaactcaatctagttgacttttgatatattcttccttgtaggctatttcatcttcacactaatacatgtctaaattttgaccattacaaacataaaggtagtatgtttggtaacatgtataacaactacatatactatataacttagatattgacagtttcattaaactaaaaaaacataaataaagccaagtcctagacttaatttgccggctggctccaaactcatatacttggttattttttatatacatatcataatatacacacatatgtgtatactagcaaaaactacgtgcgaggcacgt

SEQ ID NO: 377915 - DNA, 6204 bp, Cannabis indica
  modified_base (31)..(31): a, c, t, g, unknown or other
gttttttgtttgcagcagcacagacttagcncttccagctgaacggcgtaaaggtacagcaggtgttagctttttgttttgcctttcgatgagcttgcagtccaatagacttattttactgccttttaaccgcgatgatctgccatccttctcgaacactcttagacttcagagatttggctttagctcctctttgccagttttacctttttggtatcaatgttaacacgaatcccattctggcatcgatgacatgtgtaagtacacttagctatgatggccccagcagacttcctgacatgccttttatggaaaaaccctgcatacataagaaaagtacttatatctcaaacatttaactcctacatgaatgcacagagagagagagagagagagagcacaatccctgtcactatagttttaagctcaaaaatgcttgtataacaagcacttttccagaaaacagggaacaaaagtgaaatacaaagtaagaatactgttacaactcacctttgcaatactggcagctcacagcctccctgccaattttgtgggagcaaaaaatgaagtcaataaattaagatactaaaattgaatttatggtgtttgagagtgaaaaagggaaaataatatttatttaaaaaaaaaaagacaataggatattatagaagtcaccagcaacatgaaaacaatgaaaacagttgtatatcctacaaccagctcttcaaaatccacattcaaaagcaaatactatatccacttcctattgtatattctcacacggtaatagcagaacaatgataacaaccagaaaatcccttaaccaccaatctgagcttcccttccctaataccaaaatgtgccaaagaaaacttaataaaaaaatataaaattaacccttcctaattcctgtcacctttcaaccagaaagtgtaaatctgtgtgcgggttggaaaacaataagaccatcccacgctacacattaaatacaatttatgtgcaatagaaactcctagtttacttacagaaaaatctgtaatcaattcaaaacaacttaagatggttttttctgttttttcatcattctgttatgagatgaggaagaataaatctttagctaattgcaaataagtaaggacccacacacagcttaaacgttacagaaaagagaaattatcagagaaaacagcacatagatgagtaaataatacagtaacaggctagcaacaggcaaatcaacaagtgattaataccttattagaacatctttgctgcagtggccacactgataatactcagacctttcagcttttgcaaacaaatatgcaaatccccttttttcttgagggctcttcttgactctaccagactcagtaactttcccatacttcaaatcgttagctttccggccaactcttttttcctcaaaatttttcaagagatgtaaaggaacataagattcctccagccaatacttcttcctttcactagaggattcttcaatcactgacccgtgttttttaacaacatcagggatagctcttctctttccaccaaaatcaagaagatatttgaccagtcccccttgaatgcacttcctgcggatgataactttcttgaacagtctgattgactttctagattccttatccaatgcagggagagagtgcgtattctcaatgtcatcccatttaatgtttgaatcaagctctctaacctgataatgtaaagagatttatgtatcatacattctacaaaccaaccagaactaagttgtacttgcagtcctaggcagtcaaattgcagagtagcatgcaatagaagcaatatacattgtctatatccatatatatatatattgaggagaggacagagatacatatacataatcttaacacaagtttaatgtataatgatcccatattatctcctgttttttagaggatattgatcaagttttgtaactttaattctgtctaacacaattttttcttatcctgacatattatttactatttagagagcattaattcaatttcaaatatggggtaaattgaagcatccaaacatcagtgataggatgaaataggttggcagtgttaaaagacctggaaagccaactgctctgcactagtagatgtctcgacagcaccttgccaaaccacatatttgcttcgcttagcatactctgaattttcggggtaaagtatgccctgaatctttgtacagccacctgcagaatgtaaacttcaaacaaattagaataattattcatgaatacagcactaccagaaaataaaagaaatgacaatatggaccttgtctggcagctttagaaaccaaggaatgtggcagaaccttccaattgaacatttgacgagaaagcctgccacccctccaccagaatattcccagtccactagcagtgtttagagtagggccaggctcaatatctaaactcttgagtctttttcgggcaatcatatgctttgaggatccccgtgcagagctggtcacaatatgagaagctgaacccatggaaacatcagaatccatgtattttaaccactctgttgagagtgcgagacgaccaagatttgacactagctgcgtaatgagaataagatctaacattagccccaactaccactagtaaagatgaatagattggcaagagctaatgatcaattgttatagctgagttgaatgcacggcagtaaaaatgaaatggaaagtgaaataattgggtaaatttggtaggcgagcctatacacacataataaatacttctataagcatatgcataaatgataggtatatactttctagatctcctaagaaacaattcaagaaacgtaacacaaacaattatccaatgacaagcacagtatcttacagtcagcaatatatgtttaacagatgtaatatcagatgccttgagagcacttttacgccagagcttggtatgatcttgattcaaccatggacccaatagaagtccatgcagacggttttcaattgacaggatctgatataaaacatcaataagatgactatccctgtttttcattgactgaagggtaagcatgtcgccattggggaattcccgaacattaacagtattggtgaaaaacaagcactctctgtcatcagcagcagttctacatggaaagcaccaaccacatttctctttctgcagatctacattgaaattctgcatatttgaccaacaaaattttgaaaaccttttcaaaatagctcgcatctgtcgagatattatttcttcttctaacattactgcgcccaccttaattttctctgatgatttacccaccaaatcttctgcaaccaacgaagcaatttgaccaaaggtgtaatagttcacataaccacttccacattgtgcttgtgatgtactacaatttctggtggttacggaaattgaggtgtttacagggccagcagattcagtattaagttcttgttttacatctaacatggatttcaacgggcagtccccaaaagcaatgtgtttcccttgtatgtcagattgagtctcagctgatccttcagaagtcacaagtgaacttcctgtcacagtcattgcatctagtatattaacagactttgagatgtcagagtgaccagaatctccaatgttagcatgctctttcattttgctttccttgccagtctcattgttaacatgtgtttcaggagatgtcaacggagccagggtatttgaaagatcgtgattctgtgacttcgtaaacatgtctgaggacatagaatatagagagtcaatactcttacttgatccatctaagctcacattaccccagtgcttgcagattgccactaatatgtcaccatagtaaaaatctgacgacttaagcactttaataaccatattcaggtcatctctgtggtagtaactgaatgaggactcagtatcataagaatctgacctgcaaagtaaacagtaacagtgtaacacataactgaagaaacatatatgtcaaaaaaacagtgtccatggacagtgaataaatttatatctacaggtacgatatagaagataagtacaagaaagttcaatatggtatcagttcaatctgtgatatataatgtaatataagctcctccacgttaatatatattgaataatgatgggtattctagacccacggacggtaaggtttacctatactagaagcggtgaacaaacttagcttgttgctgagttagctaaaagggtgggtattttggtaattgtaattgcggtgagctgccttttgttttgagtgaacgctagagttgattacgcaggttttggagagaattctcggcatcagtagagagcttatgctctctgccattgtaagagagattgtctctattttcctactgtagggatattatctttgttttccttttaatccaataacagctcccatatttctcttcattattgtctactgttccagtggtttatcattgctaccgtttatgtgtttgactactaattgaggtgaattccagcaggtactcatcaaagaaccgattctcggtgaatgccgtcaacaagaatgaagaagaaaattgaaggaattgaaaaaacatgcaaggcattgaaaaaaaaaaaagttgaggggatggaaactgacattggaagcatgagggcagatctgagtagtatcaagtccattctcggcgagctcaaggattacaaggtgagcaaggaccgcactatttctggtctggaccgaacaacttccggtctcaatggaacagttgcgggactatcggagcaagtaagaacgcgtttgaatggccaagcaagaatggctgacgatatgctcaccttcaaggaaactcaaggggcatctcatagcacacgccgacgttcaattaatgaggaccacgcatcgaacggccgacaaggggaattggcaagaaggtaagaattcatagctcgggaaatattgaattgcctgttaatcatggtaattatcaagacaagtggacttaccgagtcgactgatactttggctttgggttgcaatgcctatccctagcagagcaactaaaggcgactgttttgtgtttggaaggaacagctttgagttggtttagatggggaaactctcgccaaataattgggtcttgggaagagttaaaatcattactcaaacgtcggtttacgtcggttcatgaaggcaccatctacgaccaatttttccatctctggcaaactagttttgtccaggaatatcgaagaaacttcgaaaccgtggcgactgggatgggaacactgagtgaccctattttgcaggctgctttctgcaacgggctcaaaagagagatccaaggcccacttcgtttattagagcccaatggcctcatcaaagcaatggagttagcagaatcaattaaatttgaagacaatcaggtcttagcaaaaaatcacaggtatgggcctcacaaacctagcccaactaagcccacttctttactaattctagaaccacgttcttctcacgtgatgacatccccaacttagacaacttacacgaataagagccacaaatcaagttcatcttcttcatcatcttctcctacgggattcaagaaatatacagaagttgagttaaaagaaaagaaggaaagaggtgtgtgtttcaagtgtgataagcgctagttttgtgggcacaagtgcaaaaacatcgagcttgtgatcgtggtggttcaagatgaagcccgggaagaactacccgatgacccccttgaagatactaccgatctaccaccattagagccccaaaaaccatgaaaattctggctcaatctttggacatgaggaggtggtgttgattgacaacggagccactcataaattcattactacggaattggttaccaaactgaaccctgccaatctcggaaacaatggcgtatggggctcaattgggcagtggtcgggcaatgcaagtgcaaggtgctagtgtgtgtcgagggattcctttggtcttgcaaagtattgatatcaatgttcaaaattgcaaatttaagcctcgtggcatttttttcctgtgaggcgagacgtaagtcttaaggcgaattgaggcataggcctcaattattgaattaaaataatatttttagagtaactaaaaataaggaggaaggcagcaacagcagttt

SEQ ID NO: 377916 - DNA, 4892 bp, Cannabis indica
tgggcggtgggtggtggtttttcaaaatggataagaaatgggttgggttgtgttagggtttcacaagttaatttcgaaatagggaggaaatgagtttcaatgtgaatgaaatttggggttattatatttatatacaaaaattaaatttttttgctttggtagataacagtcgcaaatattttaacctctttcttcaatcgaagccaaagaaattagtgtctttttttcaccgaagtaaaatgtaaaagataatttctaaaattttcactttttctcgatttttcttttagcatcggagtaacagctgacactaattgatttcttttagcttcagttatcctctaaagcataaaacctccgcctattttttgtgtcggtcaactattttgggtagacgcgttgaccaatgcaaattaagctttttgtagtagtgaaccttacccccaacccacatacatcgcagtcaagagatcaaacaagatataccaccgaaaagcctctgggagcaccataaccatctcagattcttagcatatgatccccaacgaaaatgatcccagccgactaagaagagccaaatgatactgcaaaggtccatggattcgctgagcgacaccccacaaatctaccccaaaacaaaactacacaatgccattgaaaactggaggataaaaaatcaattgtcaaagggaaatcttaaaaataataaaagaacccaaccatgaaattccctatcagagaatcagacattactcctgaccagagctcagctagagcccaaagaaggctgacgagccctggtcggagcaaaaaaaaattgaaacaagcggctagtagagtgagataacctagcaaaaaaaaaaattgagattttttagaaattacttaagaatatttcatatactgcatttcccatttttctttatcgtgaaaaatttaacacaacatttgaaatttatattagatatggtcttaattaattaatatacataaaatattattttatagtactagacaacatatctgttggccacttggtgttatatatgtaacatgacataattttcaagtgttaaaaataataatactacgtacccattatatctaatgaaatgatttcacattattgaaattaaaggtatgattacgagttataattaacaataggcgcttttcattaggttagtctcttttagaaatgtcaaggggcgcacatatatatttggccattcatgatcatctggttttgttgaagtttgttggccattcagatatagagtgcatgaggcttctcgtgtggaaaacatcaaataatgatgtgaacattaccatgcatttaattattttataaagtaattaatttaatgtaataataatcaataagatagtttagttatatatagtttatacacatttacattgaagtgatcgattatttactaacttataattctgctttgttttgtaatgggaagattctaattgaaatgcttgtaataatacagcaattgtttagaattttatacttttattattatggtacttttcttccttctttaattttctctccgtcttatgagtcaagtcgatcgatatactcaatctatgttctcttcacaccatgcgcgcggataaaatatgtatgttaggttccatcccttttaatgttacactatgttgtattataaactatataatactgtgttgaattatattatattatgtaatattattttaagataatattatacttaatattgctatgtaagttataactataaatttgaataggccttgatcacattgagcccctacctcgtatcttgaatttgtactcaagctcagaccctaactttggacacgacacgaactcagaccccaacctaacctggatcctaatcccaacccggctcctaagatctcgaagcttattccctaaccttataactactttatgttatattctaataaacaatagtaatttgttcaatttaagcattttaattataactttaaattatacaagataaaataaatatgatgtcaaaataattttaataaagaaaatattacaaatattggttgtgttgtgattgtaatttaaaaaaaaaatgaagatcaagccgaaaattcagtcaacatgcagaaaaaacttgatattttacacgtaaatccgtaaattgcttgttacttgtagccacctaaggagaatattgatagcttgtgaaaaattagtgtctcataatatattaaatcaatttaaatgtgtttttctaaaaacaagcgtaggattatattataataaataattaaaactagacctcctggtcgttacataaaatatttgccggtacagaattgatcgggatcgatccataaacctggtgggtaaaagtccacttagcgacattgtgtgccgcaaaattacagttcctactaatattagaaaaagtacaacacatgaaagaaggagaagacttagaacaaaaggagacatagttctctagagcccaatgggacgccttcccattgagagcgttgattactagcctcgagtcactctccacaataacataattatataacttaacttattaatttaaatgtgttaacataacttattaattttcttaaatattatcatgttgataattttttttttcttaaaatattcaaattaattgatgtattttagtacattatagtatatcatttttaacataagatcttatttcacctaatgacggcgaaatgactcagtcactacccctgtttttaatccaaaagtctattttttcaatttttctaaggaaatattagtaaagggtcaaattacttttcttatctctgattcggtcaacccagtgtatttcgagtaagaaatgaagtatcctattattttctctctcctttccaacatccttcccctcctatagatgtcaatataaaagccactgctagagggaaacctcaaaccagactcagagctcatttcataatttaattttccctctctcaaaacaaaattagaaattcatttcaacaaaattccctcactagtttttttttttatcaagaaaagatttttattaatcaaacaaactgattacaaagcaaaaaacagagccaattttccaccctattaccttgtaaagaaactatatacaaatatatatggcgaaaatattctcttctccatcgcgaataatagaattcacaatcttatctggagaaaatcttcgaattgatgggagatggatcaagaaaaattccttcgtcattattaggccatcagaaggaggaaacgatcacttcagaacgacggagattgatacccaaggtggaagttacccaaagtggaacgaaaaactcgtactcgaattgccggctcaatcgccggcggtgagtattgaagtttactgcaaaactgtgttcgggaatagactcgtcggtgttgcaagggtgccggtttctgacttttcaggcgggtatgtgccggagaattacttgcatttcttgagctacagactgagagatcaaaaaggcgaaaggaatgggattgttaatatttctgtgagaacgaaggttccacttccacttccacttcctctttcagttccacccaccccaactgagtactcctcttgttcggcgtcggctcctctggttggtgttccggtggggaataatagctttagtggtggcgttgtcacagggattcctgtatggtgtgcttctcatgatcaaagaagatttaataactaataataaataggaaaattaatgtactttttagattaggaatatttaagttaatattattatgtacaattgtacatgttcgagtgaataataatggaataatttgaagacaaataattaatcaaatacagaaaacataattagttgggttattcttatattgtatgtcttttatttttttttctctttaatcatgtgtactaaattagtacccatataattgagagcattgctagaggcatgaattattggtgtcgtgtctcatttaattagttagcaaaattatatataattattaaattaaataatcagtgctatcatactagattttaggggtgttgatgaagccgtttaaattgcatgcaccgttaaaaaaatgctttttgaaatttgttgcggtgccggtgcggtcgtagtttaaatttttcttaaatcgtgcactacggtacagtttgtggttttgaattgttaatatgcggttcaaactgcaccacactacacattataaaaatactaatttttctatttatttaggtgcaatatgtgaatgcccaacctaaagcctacgtactaataattgtataattgaaacttatattttttttcatatttatttttaagccttacggtatttttgataaactttgcttaagctttattgtatttgtgatagtttaattattggtgataatccaaattgcaaaaccacaccgcactgtaccgcaccattttttgcagtgtgattttttagcttcgaggtgcgagtgcggtttgggaaattagaaaaacctcatatgcgagttgatttgaaaaaatagtcaaaaaccgcaccactcacactggaaatacccctaataaattcaaaactcatcaattaagtgtaattaagtgtgatgagttacttactaggaagtcctaaaaactcacatgttaattatgtcatttttttgttagtagaaacagttgaagatgcatattataattaaagttcatttgtacattggaaaaataaaaattcattcgattcttttgtttagttgtatgttaaagtattggaatattatttcaataaaatggtatttctactattttgatagaatgactatttcattttaaaatagaagaaaaga

SEQ ID NO: 377917 - DNA, 4627 bp, Cannabis indica
ccttcattgatatatttagttgtatatatatataacaaatgaatagaaagagtaagctagaaaataggaaactaagagctgtaatttctaatctaaaaactgtaaatctaatctaatttcctaaactcacgcttaaccgaatatacaaaatattaaaggaatatctccaattacccccccaccccccaagttggagcatgaggatcataaatgcccaacttggaaagtaaaaactgaaattgacgggtctgcaaaggcttggtaaagatgtctgcaagttgaactgttgtaggaacataagaaggaagaatagtgccatcttgtatagcatcacgaacaaagtgacaatctacttcaatgtgttttgttcgttcatagaagactggattacgtgcaatatgtaaagccgattggctatcacaatatagcccaatagcatcagtatgttgaattcccaagataaggagaagccctttcaaccatttcaattcacaagtaatagaagccatggagcgatattcagcctcagccgaagaacgcgccacagtatgttgtttcttggtcttccatgaaattggtgaatgaccaagaaacacaaaccaacccgtgagagagcggcgagttaaaggacaagctgcccaatcagaatcacaccaaccagtcaaagaaagagagctatcagcacgaagtaagattccttgtccaagagagcctttcaaataacgaacaacacgcaaggcggcttcccaatgttcatgtcttggttcttgtaggaattgtgataaaatgtgaacaaagtatgccaaatcaggacgagtgacagttaagtaaatcaaacgaccaaccaaacgatgataaggttccagattagacaataaatctcttgaagcatgagcaagctgacggttttgctcaataggaaaggatgcaggctgtgctcccaaaagaccagtctcagaaatgatatcaagagaatactttcgttaacaaagaaatataccatcaggacttcgagctacctcaatcccaagaaaatatttaagaaccccaagatctttcatatgaaaacatgtgctcaaatagttcttgaagatcttcaaagtagcggaattattcccagaaataattaaatcttcaacatacaccaaaacattgatttgagtaggaatcttagtataagtaaagagagagtaatcagcataggattgtagaaaaccatactcttttaaagtagtgacaagtttggaaaaccaacaccttggtgcctgtttcaagccatataaggactttcgaagatgacactccatattaggttgagaggaccgaaaaccaggaggaagcttcatatagacttcttcattaagatcaccatgcaaaaacgcatgatgcacatccatctaatgcagctcccaatttttagatgctgtaatgcctaagaaagcacgaacggtgaccatctttgcaacaggtgcaaaagtctcgttataatcgatcccagcaatttgatgattaccaaaaatagccaaacgagctttaaatcgttcaacactgtcgtcagagttgtactttattttatagacccattgactaccaagagcacgtttaccgggaggtaatttttccataatccaagtaccattatcctctaaagcacgaatttttgtgttcatagcatgacgccatctttcatttgtcatagcttctttaaaagatttcggttcacaaccttttgtaatagcaacaagaaatagccgatggcaaacagagaattttgtacaattaatataatgtgttataggaaagggcgtaccagagggagctgatggcgtgggtgatcttggagagatagtagatggactttgtgtgataacagtattagtaacatagtcatgaagccgagtggatggaactttttcacggaatccacgtcccatgtgagtgtcattgatagaatttggagcagcccgtgctaccccctgtggatggatgttggagtggagatgaggactgagtaggactctatacaacagtcgggttagactgtgactcattagatgtaacaggaaaagggagagcagactctaaagtggtagttgttggaatttgggtggtgacatttagtggggaggattcatttgtaggctcaagttcattagttgatggttcagcaccaaaaaattcaaagtcaaagtcatcatcacctaaactcatactggtagaatgatatgtagagctaataggagaaggattatttgcagcaaaggaaattgattttcaaagacttaacaacctagaacaaaaaactttatttttagataaaaaaagtttccatccttcttaccaaaaggatacccaacaaagatacattttcgactgcgacttgcaaatttatcattcttagctcgttgattatgggcataacacaaagaaccaaacacacgcaattcatcaaaatttggcaaagtatgaaataaaatttcataaggtgttttgttctggagaacacttgagggtgttcgattgatcaaatgagaagctgctaagacacgttcaccccaaaaatagagaggaagatgactttgaaaacgtaaggcccttgctacagttaaaatatggcgatgcttacgttcaactctaccattttgttgtggagttcccacacaagaagattgaaagaaaatcctattggaaagaaaataatcttgtaaacaattaaattctgtcccattatcgctccgaacaatcttaaccttatgaccaaattgtcgattgaccatagcaaaaaatgacataaacattttaaacacctccaatttatcaatcaacaaataaacccatgtagctcgagaaaaatcatccacaatagtcaaaaaataacgagccccacacgaggaataaggaccccataagtcacaatgaactaattcaaaaattcaggaagccttatggtcactaagagaaaagaatcacgagtttgtttggcacggggacacacatcacatgccttatttaatttattactagaattacgaaggaaaggtaaagactttacgactttctctgaaggatgtccaagacgttgatgccaaagttccaacgaagatgaagaaccatccactaagatggcttgcactgtagatggtggcttgaagtagtaaagtccatctctccgttcacccgtgccagtcagcttcctcgaaggacggtcctgtataacacatatattagaagcaaattgtacaaaacagttcatgtcatcaatgagttgtgtaactgaaattaagttgcagaacaattttgggacataaagaacatttttaagaaccaatccttcaaagagtttcacacttccctctttagtagcaattattttttggccatcaaggagtccaacggtacatgagacaatatcatgaacattaaacaaacaagactcatcccccgtcacatgattagaagcaccagtatcaataatccaagatcgtttagaaaactcaccatgtaaacgatctgtatatgaatgagtattaccaaacatagtagcgatagtttgctattgtgttgcacttagatgaggaagagaagtagtagtgtttgacatggtagttgcatcagtagaggagcttctttgcccattgaccgaagatccaaccgtagagtggttgctgtctattgccactgcctgcacagtagctcctcgtccccgactagccgcatgtgtgtctataccacgaccaccacctcctttgttacgagcatgagggattccttgagcgcgaggtctatcaccccaccattctggatacccaagaagctaaaaacaagtagcaatatcatggccagatcggtgacactgagaacataatagcccagatttgtcaaccttttctagtttcgctcggctacgcactttcggacgaatagcaaaacccaccacttttggtagagattcacgagcatgagtaatgccacgaacacgttcttcttgagcgatttgttgataggcacgatcaagagaaggcagaggttcttgagacaacagaggggtacgtaatggggcataataatcagaatttaaacccatcaaaaattgatgaaggcactcattactgcgtcgtttttcatgttctttagccaaattacattcacatttcctatgcttacaggtaataatgggttcatggttagccaattcctcccataaaaccttaagctttccaaagtaagaagaaacaaacatggttttggattgctcacacttagccaaatcagtttttaactgctgaattcaggggccattaacagcagagaaacgagcctgcaattcatcccacaaaagtttagcatcatcataaaaagaaatatctaccgttgatagaattttcatacaacaacaattatcagagtacaatagggatggctccctatgagttgttaaacggtaggaagtgtaggtatcccatccactgggatgagacaggggagagaaaatacctaggtccagagtcagtgcagcggaccaatgaggcaattgagaaaattaaagctagaatgcttgtctctcagagtagacaaaagagttatgcagatccaaaacacagggatgttgagttccaagtaggggacc

SEQ ID NO: 377918 - DNA, 2019 bp, Cannabis indica
aattctaaaagcatcaaatcttaatgaaatgcataccaaaagcatagagacatattgaaatgacaacacatcccttctctaaaatgttaaaatttgacacacaacaatggactggcgaaaaacaatgcttctgaatgcataaaattcgtaaataattgagagggttattccaatctgaagttaaacatcaaagtctaaaaaagaataagaaccaaagcattttctacaaccctataatgtcagtcaaatccccgtcttaagtcatactgctgccctattaacacaatcttctaatctgttcagcataaaggctgaagttcctttacaactagaacattaatttaaaataacagttaacacttgagatattaggattaggtaaacagatgcataaccatcaccaagaacaataaagtaatcagaagcatacccatgcaattgaagcctcaaaaattgttccaagagtccaaaaagctgaaaaaataaccatccaagtacctctgttaggagcaggaatgaactccagaaaccaagatgagagtacaggaccacctcccaacccaacaccaaccaaacaacgaaaaataagcaatgttaaataattgggagcaagtgcactcataaatccagcaccggcagtaaccatagctgtcatgaggaatcctttcctgaaggaataaaatgtttagtaaattgaaagaagggcatgaaaaattaagataaggggagaggtcttaaaactcagaataagctctagctctactgttatatgaattatcataggctcatagcttgttaaaagagtttgcactggtttgagttcaaatgtcgaaaataaaaacaaccctagtcaaaatgaaatgaaattccagttatacagatgacactattactgttatatgaatactgcatatactttaaatattcaaagtaaaagttgcatcagctgttaactttctcaagaaaaaaaaggaaatcgcaattgatcatcttagattatatttcctttaaatgaaagtactgatattggcaaaacaaacagaagacccacctccttccatatttgtccgaaacaatgccccacgaataagctccgacgagcatgccaccaaaaacaacactagttataaggctttgttgatgagatgagataccccatgctgatcgaagagctggcccaacaaaagaaagcagcatcatctccattgcctcagaaatccaagccatgcccgcgtaacagagcacaagaacatggaagtttccgaaccccatgaccagaagggcctcatccacagtaaaggttttgctgccatcttctggtggcatctatggaaactgagaagagcaacaacgagcttttaatttgtgttttttttttttgttgaaatgtacaatcataaaacgatctctatacaaccttgttcacaataacactaccaaccaatccataaattcgaaatttcaaagaaaaaataaacacatggaaatgtaaatctgaatatgaacaagaacattacaatgggaaaagatgatttatactcagatccaaaaatcacagaatgaaacaaactgataagtcaaatgatccaatctacaaaaaattaaagatattgatattgaccggctattttgaccagaaatagtaattttaaagaagaaaaaaaaaggaaccttggaattggtatggcggtctccgcgttcttgaggttgcagggtccctgtcaatggtgattttggtgtgtcctttgagagagaagtcgttcgctttcccgctctcttcacagttgtcttctcaaccgacaaatccagcttttgtgttctcttttttgctcctatgaaattttggtttgacttgttatttaaatttcaaatgaataaacgacatgtcgtattatcaatattatggacagagaaattgaaccggaaattacgtttgtagtatatagtagaaattataaatttatatgaatttttttttttatagcataaataaataatattatggggttatgaattttt

SEQ ID NO: 377919 - DNA, 2540 bp, Cannabis indica
ggttccatttgcaatgaaaaaaaattgttctttgtttgagaggtttgttcttgggtgtttcttaatttaggtttgaaatttgttcttttgtttccttattggattaaatcgacacatgggtttgaaattgaaacccaattagttgaatacttttagttgtttaacaacacaatgggaaatgctttagaaagctctgtatgtttctaatctatggattttaatataggcgacaatcaaagtcagccaaagaaattcctttctgttctaacaatagataatcgtgcagtaacaatttaccatgtaagttaattcttgttacgagttctaaagattgaatcttttcgaggttttcgaacaaattgttagtttcataacaggaaatgtaatttcaattcaactttactgatctaattacaataacacaaatgtacggaaatttcaaataaaggctcaacaaatagtcaaaatagcttgtattcaacctattcattccctcagattatgtctaactgagtgcataagacttcagttataaggcaattattacatctatctcttcacattgtgcttaacagaaaaacatttctttgtgttccctcatcgaaaagttaaaacgatttcgaacaagaaatgctaagcaacagcaccagcgataccttcttatgatttttttgtgtatgtctgatgatcaggtccaacgtcgcgagaaccggtgtttatataaggccctcggaatgttgcctgtggtgacaatggctttgttgggtcaataaccggggtcttggctgacctgaattgtggaaaaccagtaacaattaaagaatgtagaatagtagtatccaatatccaatccagttcttgaaaaagatgaacagtttacatttatatatgtattacttacgccatataaaagggaaatgccaagcctgcacttgcaaatgccactaaaccagcagccacaatcatatttctagagcgggacatggcggtgccactgcgaaccgaagagcggttaactcagatgataaagtatctgatttgccatacagtaataagatttaatgtctcagtgactattgttagacaaggaatctagttttacataaaagaaagtaggttttaaaatgatacaagttcaagggatcttaacaaaaacaatatcagtatattagcttgaaaaaaatgagatttggtaaattcatgaatgctaaaactagttcatgtgactattagcttcacctcagattgctctgcactttatatacatgtatatatttgttagagattttaaacacttaactgttaaaacagttagttaattagttaagtaactcgtttttccgtactcttggagcccaaataacgatctagagagagaattggagaagaaatttacagaatcccttaattgagttctttgtaggtgcaaaacactatttttttgactttgatcattagtgatcatccctgtaactctgaccaacattctcattgaaacagaaattggtcacaaggtggttcctgccggaaattaggtccaagctgcaatggcttgtgattgaatctcgttaaattatttgtctcctattttcctgtgctatagcatttctattctcatagcatcattctgttattactattatctttttctggttttatcatcatttgccaattagttagtttacttttagaacttttatgttctttaagagtgattattcacaacaatattttcaatagaaaaaattgcggtaaaaattcccaaaatgttcactttcatgctaatgagtctccaacttaaaaaaactgccttttttttcgggtatttttactgcattttctctttttaatactaaaaagcaaactttgaaacaagattcaaatttatgcccacaaatatcagattgggtaaccacttgacttgactacactaggctatgcccataaataagcaaatacagaaaatcatacaatttcaagcatagaattcctacattacaatgattccaattttgcaaatggggattttactcaagaaaatggaatcacccagaagaaaggaaaaaacagttgtatcattcaaagtcaaaagtaaataaaatttgaacaaaccatgtttcaataattaatgggtgatattttaatggttttatgaatttagaaaacactcatacatacaaaacacacacacacacacatatatataatcaaattctgagttcctcgaaaaattaaagaacttgtgaacagcacaaagggaggagagtgattataattttttttaaaaaggggaaaaactttattgaagaataaattgaaaaaggagtagaaagagaattacctgaattggtagttcagttctctgttcttctgagttctcccaattccaaatgcttcaaataaaccagcaaaccttttctttcagtttcatctcatgtcataatagggaatggtttgttcaataattgggccctcaccttggcccactaaattaaaccaaaagcccaataaagacttctttttttattattatttcaaaa

SEQ ID NO: 377920 - DNA, 13313 bp, Cannabis indica
aaaaaaaaaaaaagaagtgtatagtgtaattataaaaaacgtcccataaatttgtaatatttgtagagataatttaattaaaatgttaaaattagaatccaaacaatttgttatactcaccttaaataatgtaagcgtacaaaacagactgtttaaatcagtttaaattatgagttttaccttctaaattatctccaatttaatatcaattttttttatatataaataccctatattattggactcatttctcggttttattcttaataaaataataataattttatctccactaaacaaaaaataaaatctttttgagttttcaaacaatgtagggtatttatgtaatttactatgtgtccgacgaataaaatttggggcacgcgcccgacggaacagcggggttgacggtggttatatcatatcctattttcctatcattggcgccgcgtacagacaaggcatttcagaaaagaagataagaagcctcagcaaatgatatcatgacacgtttcaacgcagatccagaaaatgggagaatccatgtgtttcggcagcacaggattaaaacagcgcatgtatgtacctccattctccactgcactccaaagtcactttccttgatctggataaatttacctaataataaccgtttcaatgtagcatgttcttttgtcctgtgaggatattttcgtcatttcaattccctaggataatacccttcaaccaaccatctttcacaacaaagtctgccagcgtggcactcggacaagagtttcctattcttctttacttttggaaattacaatgacttgacgccgttaaaaccgtttcaactccatattccgtaatctagctcttttcacgtgtttgtaggagctaaatatatattatattttttataaagggagaaattattcggttattattatcttttatattgtatatatatttttgctttatttcttctttctttttgttctgtgtgagtaaattctaatacaaaccgtccatttcttctcgccgtttggttcgaaccccaaatcaatatcttctctctgtctctatctctggcgaggcttcgaatctcgccggagaatcgcggtggctcgccgggaattccatagattccgacggaagcttctaagaattttgacggagctgaagaaaaaataagaggaaagcgtgtggttttgtatgtgagcagcagcggaagtataaataaatttgaagagagaaaagtaagaagaaaaggataactggttttagttttgggagagaagaggaagaagttaacgtgcaatgcagggaaaaagggcatcaaagaagctttggaggatcttacacggcacagatgcctagatgatcccttctgcaatttccttggcgtatgccgtaatttattctattttttaaatttatgttttaaagttccttcctccttctcgaaaagattataactttccttccgaatttcccatttctatgttttctcctctcttcacatttcaatctacaccgtttttcctctgatcgctaccttctgcacgtcaaatttcgcttttcctcaggtaattcagactctcctttgttttttcgggtcctatctgcttctgatctttgctgatcttgtggatttcaggcctatagtagcactttaacatcatttcctgctatatgcatgtttagattgggtacctttactttctgttcaaatttttcaaggttgttaatgcttctcaattctcataattgaattatatgtatccgagatcttaaagtcaatcacttctttttatataatttttagcttttttcggaagtaattttgctatgtgcatgtttttctttttctcttcccttgtggccacaattataaattatcaagtttttgataatttttgttttttaatgcagttaaatttgatttttggcatttgaagtgttaatagagaggtgtgcacttgtttgtggatttgggagatagatgaaatttcattgaaacagtttgatatttaggaattagggttttttaagctttatcatcatgccatctgaaataagagacctgcagggattgtcttcctcctacttctctgaggattcatgtttccctaacgaggtatactattgacttttatggaaattaatgtcttcttttgactgttggtctattcatttatgtagttaagtttgttctgttatggagaactcgtgcattgtcctaatgctatattgagaaaacaaaattaattattcttatctctgttcttgtagaggcaagttggtttctggaagtccgaaggcatgctccataactatggttcgtttcccctttctgttagatgctgccatactgtttattttataaaaagcatgcaattgtagtttgtttctttgttatccttaaggctcaactttattagaaaaaatatgtttagttaattgatttgaagtgctgttaattaatatgtttcttgctaccttgtttgcaaatgtagaaattacatttcggttttgattctctttggtcttgaatgtagttctttttatggttagtctagtgcattaattgagaaaatctagggagttagacacgttcggtgtgacattttccgattttgccattggcatttaaaatatatctagatcaaggccctggcggcaaactatatagggtattatttatgtttttgccagatagaattgtttcatattggtgttatcacattattttcacgtagtattccagatatttgttgttgattatttgagcatagtaacaaatataacttgagtaggttataatcctataaagcctagttttaagggttgttggcttcctattattaagttcgattatgcatagggaccgttacttcatttagtttgatgaattggattcaggacataattattgtttaacttgtatggtaacttcataaatgttcgaatgtgttattagtcattcgtttgtcttggaagttggcaactgtgaagtgtgataagttttatataccattgctactaaaagatatcacaatacacacacaaatacatttatatttgtattatttttctacacagcagaatattttgattttgtttttcttaaactagtatcacctatagcagcatattctgatggaatatttaaggttttcattgtcatgggtgtatacatagactagtcaagtcattattttattaaaggtttcaggctataaatctttataggtaaatttatgaagttttgttactagtgtaaaatatcaaggagctcaaagtttattcatttaataaataaggtgtttaagcatcagcacagaaggaagtacactctactaaactcttttgcttgggaaaatagtttactttgggacattataaataaagggcttttggttatcagggttattacttctgaaatttatagttaaggtttttgcgtagtttaggagttcaggaccgttattcataatttattggctgtttttgcattttattaagatgttggatcaattatataaaggtcactaaattgtggagtttcagggatctactaaaatgtggttgttatatatgtggatttcacctttcataaaattttctctgttctaatattaaagtcccaagactcacaactaaaccctgagctcgtgatatatattaaatgtatagaacttgtacttgtgcctcaatagttatatttgtatttggatggtaatatatttattatgtagcactataaatggcaattgatgtgaatctttagttgtagccaaatttattctcttttctagtgaaagcccagttttaaaaggtttatgaatttaaattagggaccaaaagataaaatcatagaataaagaagttcttatctttttttggcctaacagttttatcattgttcccatatgataatacatttatatatttttgcgaagaaaacttgaacaggctgtcagattatggctcctttattttagtcagtaataattggtagacagagataatggtgcatttagtagtaaatctgttaagctctgtgatcttaagtataatattttctaattacttttctgtctctctatgaaatgctatattatgtatgatgattactaaagtctttttataaatcttgattgattgttatgagcagccaatgaaaactcagttgcatcatcatctctggataagcacttaccagtggaacgcttgaatatgaagcctatggaacaacccaagtctttcctaatgcgggaccagaatgtgaacggtagcttaaatagacttgctgttggagtggagagagcagctagtcattccttgccttcgttgaaacccacagaccatccagttgtgcaatctagtacaaaggcagaagcagcgccatattttgtggagggtggaaaattcaacgcaatgggttctcagtatgagagtagccttttctcaagttcaatgactgagttgtttagtcgtaagtgtaagttttctccacaatgcttatttaacacacacacagatcataaatatatttatatatctatatttatttagtgtgtgtgtgtgtagctagttgcaagcttgacctcttaatagtactataatactatctttgatgatgtttcagattatgatactgcttgctgacttgctaaacaatgctgttttatttacaagatttgtttttgggtgcagtgagattgtcatcaaacaatggtctatatggtcattcagttgacactgttgcttcacattacgaggaagaggaaataattgaatcccttgaagaaatagaggctcaaaccattgggaacctacttcctgatgatgatgacttgctctctggagttactgatgggcttaattataatatccaatcaaatggtggggatgatatggaggagttggacctttttagcagtgttggaggaatggatttggaagatgatggttcatctcctggactaaaatgtagtgatttccctggagtagtttctaatggtcagttagggttaagtaatggttcgattgttggagaacatccttatggagaacacccttctaggaccttgtttgtgagaaacataaatagcaatgttgaagattctgagttgaaaaccctatttgaggtgtgccattttgcccgtagtctttgaaatctagttaacatgttatctatatattgacttttattaaaaatgattgaacttgcagcaatatggagacatccggactctttatacagcttgcaagcaccgtggttttgttatgatctcctattacgatctaaggtcagctcgaaatgcaatgaaagcactccagaataggccattgaggcgtcggaagctcgacatacattactcaattccaaaggtgagcatccatttatgtcttcctgatacaggttgtttgactatcattatactgttataaactggtgatcttttattattccatgtcatacttgaactttgctgttgtattttaacattggtatattttattttatcaggagaatccctccgaaaaggacgttaatcagggtactcttgtagtatttaacctcgaatcttctgtttcaaatgatgaacttcgtcaaatatttggtgtttatggagaaatcaaggaggtgcgccttgtatttgttattggtgcacattgtaaatactttgcttgcttctaatgcactgtaatttttgtaacttttgtttctggatggcagatacgtgatgccccacacagaagtcatcacaaatttattgaattttatgatattagagctgcagagactgctcttcgtgcattgaacagaagtgatattgctggaaagcagattaaactagagccaggtcgtcttgggggaacaaaatggtagtattttcaaagtccaatttctctgtcttgtgattgtcttctttcatttttcattgtttaatttatcttactcaattaaatgctaattccaactaatatgatgtaaatgtacgtaaagtgcatctgtacatttttctttctctacaaaatctatatggtttttggatattgatggttgataagaccacagacaaattccacgtctacattttaattgctactttgatctatttactaaaattctttttgttttgtttttaaatttcagttcggggcagcagttaccttctgagttggaccaagatgaatgtagtgtttatttgcagcagagtagccctcctattaactcaatcactggcttttctggtatggtttttctatcactaggaatcatgcttgacccaatttatgggcagacaagttatatttatcttgtctaacataaaatattctaactggctcagtttcactcggagcaattacatctgctgccgtagataatgggagtactatagctgctcagagtgcaacacaaaatccatccctggaagctgcatttcatcacgggatatcttctagtgttcctaacagcttatcctctctagttagaattgaatctctaggcaatcatgctggcctttcagaatccaatcattcatcggggccactaaaatttgacatccatggaacatcaccttttcatcctcattcactgccagagtattatgatggtttagccaatggcatccattgtaatctccaggagcttttgccttctggcatcaactcctagaccactagaaagaattgaaaacagacaattttcccgggtaactcaaactcaatggacacaatgaaagtggtaagttcaatcacttgttgttttttcaagattttttcattgatttatacatttcaggttttagagtttagatggttccctgagtgtgtgctacatatgacattgctatccatgaaccagcaatttgtatgtgccttggaagaaaacagagagatatgcatttaaataaagttttctttatgtattagtatgggcaggggtgcagtcttgtgagcaaatccctagaatgtaaaaggccaatatgagagacctccctctcccaatttaaatctttactctttaaatctgcccatattctttccttccttcaatattttctgtataaaactttttcagtgctagctcagcaccaacctcccttgacactcacaacaactacctacctccaaggcttcttacaaacatcacgagtgtattcacacactaagcataacatgacacacttctcctattggtttttcctatgtctcatatatgtaaaacgaaagagatatcacaattcttgttcataaatgctcaaagtcaaatcttctaaacctttgtttccaagttgagtcagttctgtatcatacacattggttggactgatttttcagtagtagaaaaagtttttttttcagttttgattttggtttttcattttcatttttttttttaatcttgatatccttatattctcttccccagtttttgggtcttctggtagcggtagctgttcacttcccggacatcattttacttggagcaacaactcatatcaccctcaacctccaggtatgatgtggccaaactcaccctcatttgtcaatggagtttctgcaccacatccccaatcaagggttcatggactgcctagggcaccatctcacatgttgaacccgggtttacctataagtaaccacccagtggggtcggcaccagtgactaatccttctatctgggataggcgacactcctttgcaggggaatcccctgaggcttctggatttcatcctggttcccttgggaatatgagaatgtcaaactcttcccattctttagaatttgtttcgaataacctcttttcacatggtggaaactgcatggacttgccaattgcttcaaaaagtgtaggacttcagtcccatcatcagaggtgcatgttgtttccaggtcgaggccaaatgatgccaattatgaattcatttgatcctcctggtgaccgtggtagaagtcgtagaactgaaagcaactctaatcagctagacaacaagaaacaatatgagttggatgttgaccgtataatgagaggagatgataagcgaacgacactaatgataaagaacattcctaacaagtaagtattttatcaccttaatcctggaagaatgttgaaattgaaaatgtcacatttctaagcaaaatgtctatattgtttcttatcaaattggagttggtccatatgatactgttatgcaattgtgctttgaacattttaattaatattattaggatttcttcgcaatggtgtcaccaagtccttgaaatatttataataaaccatttcactttgagtcttgttctgagaaggattttgttgtttaattttaggtatacttccaagatgcttttggctgcaattgatgagcgccatcgaggaacttatgatttcatttatctacctattgattttaaggcaagttctgattcttgtttggatcacttcttgtaattaatgtgtagttgatatgttggtggatcttgaaaacttgacttgctaccttttaatttgacgttgctatgaccggtcctagtattaatagactatattgtacaattgtggcagaataaatgcaatgtggggtatgcattcatcaacatgacggatccaactatgattattcctttctaccaggtttgtttactatcagctcaaataaatgcaaaaagacttgtaaaaagaaacttagtttaaaagaataaatatactgtataatatttttcgtatttggcagtcatttaatggaaagaaatgggagaaattcaatagtgagaaggttgcttcattagcatatggtcgcatccaaggtaaagctgctctgattgcacatttccaaaattcaagcttgatgaatgaggataagcgatgccgacccattcttttcaacacagacgggccaaatgctggtgatcaggtatgatgagaatgatacacaccttcgatgcagtaagtgattgaatatgattgattgattaatcttgtgttgtataatataggtgccattcccaatgggggtgaacgttcgtataagacctggaaaagctcgaacaaatgcatttgaagagatcaatcaaggaagtccaccaaatatgggacatgggggcgatgattcttcacaaggagaaacatctacttgttctgcaaaggagttggattgagcaaagccactttttttcgtgggtgctaaccttcttattggactgagtacaacctactactactactaatctgcgtccttgcctactactacctggtgactgaaataggtggttgattcaatagaggaacacttagccaactgtgctaagtagtttttcagttttgtcgagatatttcttactgaaaatcttaactgcttatagcctatcatatcctatcctaattcttgatatttctcttattggaaaaaaaaaaccgaaggagagaatcatatcgtatcatagcttcggaaattttggatgagtaagtactactactaaacatacatcaaggaaaaagaaattcaaacttgtataggaggagttcgttccattgtttgtgttgcagtttgaggatgctcaactgcttttatgtttcctttttttttttttactttattatataaattattttttattgtgggggcttggagcattggtgcccatatgtaatggctcaggcctcagatgtttctgagtggtggtgatgagctcgtcttgaaaattttgatttgaaatgacgtactcttgctgctgttaagacaatgggtttgtaagttgtaacctgcttacagatttttctttttaacatgatctataagagtgaagaattgtttgccaaaatggtctcactaagattgatttttcatctataagcctatttggctcaaagctaaaagtaactttgtcaataaaatgcattttgaaaggtgtcatgtttttgttatccaatagtccttcccacccactgaaatgtataatcttgaaaaacagtattagccagtatctttttaacacctgagagtgttgagtttttacatcacaacttaaccaactttggcatttgcattgcacaacactgaatgtccttgtcaacctgttatcttcaaaaccttattcactaacctgtgatatggagatataagcaaacaattattagtaccacctaccaataacaaagttttactaacgtaaaaagtccaattataagaatattcaatggatgaagcaatctatcaattggaggcatttaagtttgctttctctcttatactgaaatgcattgtgtaaggtgcactgctcccatgttaaagtaatgaagaaaagggaaattgcagacaaacttacaagaaaaggtgagtgtcacttctgatagagaatgtcatagtgaccagggcgatacagcaacgtaataaaaggactagctgtcccagagctactactagcaattggtttatcaccagcaacagtaggccgaaaatcatgatgatttacacttacaccaccagtgtcacaggagctgcggtctaagtacacaacacgaatgggcacacccagtgcatctgagagagctgtaatatgaacatgatcgctctcttcccccataggttccactgacaacttgcaaaactgtaacaaagatcattcttaaaagggagaaaatgctcatagcgtgaaaggaaacattgaaattgccttttaaataatactgttactattgaattgactgttagaggttcaggatatcaaacagacctgttccactgttccattgcttaatcccagtataaatggctcaaaaaactctgagcgcttgcgtatttcaccagaagtaacaaatctgaaaaacattacgactaaccaaccaaatctgtcaggaaatttagtcaagagcaaaatcacaaccgttgtgaatttaaaagctactcaccatagtctgatatcgattgatcccgactcttggatagtagctcatcatggctgtgcaaaaaaattatatcaatatacacaaactcaaaatgtagcatcacttaggtttttatttttgctcaatccagcatctgctagtttatcactgtcaaatggaactgccacatttagtaaccaataccttacagaagtttcagttccttggagaacactttccagttgctcaagaaagagctgaaaaaaattcaccaggaaaaatgttgaaagtttctgttagactgttatagttctgttaaatagtatattcaaaagcctatatatacccaaaagcctcctaattccttttcacaaatgacataagaaaaacgaatctcaattttttcgacaaacacaatcgaaatctaaagcaattgtcgttccatttcctttctactaaaacaggtgttaatgagaacacattcttgaatattattacatttacaaagaataggatttattaagtaattaatacactagaactaaataatatgttcgtgagtcactatgatggaaaacatacaagatgcagacatctacaaagccacagtcctttccaatatctaattccaatgattgattatgtattttttctttttgaaatggagtaattcttgcttgttgcgaattccttctaaaaataacggaatgaaacaatggtaaatacaaataaaaacttaccccaaaaaaaatcctcaaaagtaaactctgcataacccaagctctggagtgttttcctacattgttcaacattggctttgatgcgttcaacttcaactcgatcttgcgacatcaaaatgtgctcctgttttagcagacagattagtagcagaagttattttcaacatatctgccttcatcagtcaagaagccaagaaacttttaattgttacagaaacagaatctcagcagtggacaaatatgcaatgtagaaagatgcagagtggacattgatcttatacatacaagatatgaaaacataaagcttcggtagaagcaattcccatcaccccgtgttctccgaatggccgcatattgttcactaagcacctgagaaaagtgatatgtagcatttcagtttctctgcatcccaataacatcaatcacaacctttgaaaacatacagaactcaacccccaataaaaaccttaattttttccaacaagatagtgctgcccgattgatattctgtggctaatgaggaaaggggttcctgcagttgtatttatcatcagtatggatatccaacaagatgaaaatgggcaaggaaggtaaaaccaagatgatgattataaaattagcgtctggggaaaatgaatgcgatcaagaatggagaggaaatgatggtatttgccttgccttgttaccaacaaatggaattttatcggcctcatcagactggattagggatttttggttcataatatcgtcatcaggaaaagtatcccattcaccgaagtcggaattggaaaaagatgactccacttccccatccgctggtagtccttcctgattctgcattgtcttcttaagggatataacgtagcataaagaaaataatcagacggttttctttggttaaaacaaagcccatacaaataaattttacatatttaacaaaattccccaagaaaaaccccattattttcaagtttttgtagtgataaactcaaatctcaaacaaagaaatcaagaaatgaagtgacctacgctagcttcccttcccccatcttttgttttctttgtactgcgatattcaataaacatagagatcgtttcggatgaaatgcaaaattgaaatatggttgatcgtgatggaattgaatggaagccctaaaaagaagaaaatgaacatgaagaattgcataccaaaagagagtggcgggagatctctgatctgagaagaacaccaaatggatggtaatcgtctccgtctcggtcgtcgtcttctttcttcttcttcgtcttcactctcgtttactactactgttactgacaaattctatttttatacttgcaattctttgtaaatataatgtcttttttattttttttattaaagtaaatatataatgtcattaatcaatcttctaaaaaaaaaaaaaaaaaatgtcattaatcaaaaacaaaagggaaatttatttcaccccaaaattttttaaatacactttattttaataattttaactttatataaaaattaaatctttaattgtactaaattttttcaacttttttcttctaatttatattcttaaaaaatatacctattaaacaaaattaaattatatgacaaaaaaataaaataaaaaattatataaaattttcttaagaaaaaataaaaacaaatatatatacataaata

SEQ ID NO: 377921 - DNA, 4487 bp, Cannabis indica
ctcggtcacttgggaggcacctacatcgatacaacgtaggtaagaaggcacatgaaaatacttaagcaaaaaactaggaattaagtatgtgcaaaaatgagaaaaggttttatcacatggataaaggctaaaattgtacaagtttaggattcaaagctgttagcaagacacatgtctgcataagtgaaaataaaaccaagtttaaagtagcttggctggctaaattgtgcaaattgtatggcccttaggccgaactaaaaaaaacaataaaggaaacatcttcagaacgtaatcacagagttcggataatcaaccatcgaggatccatcttgttgctggatagtaaaattaggatcagctgcttcagtgtactcggtatgttcatgagcagcttcaccagtagtaccttcaaccttttttgcttcctccacgacctttttggcatcttcttcagccttttgactttcatagagttcgattagctaggcatgaaattttggctcaagataactgaagctagccattgggttggcgttcaaaaatttatagaaaacctctgtgccaatagattcataattttctttgacttgggcattggcctccttctcagctcaagagcctttttatgcccttctgaagtttttttctccttcttgagcttctcagccaattctttgatttggccctcatggatagaaagtaatatttgaagaccctctgtcctcattcatcttggtaaccctggccacctctttgtcaaggtctgtttctagtttttccacgctcgacatgttgtccaactattgctttaattcctcaacctctttgtttaagtcaaaaggcttcttattcacctcggttagattagcctccttcttctgaacttcatccttagcttcctgcaaggctgtcttcagattagtattgtcataagtgttttaggaggcaaaaactctagcttaggaatagcaatggctaagcctaagggtcacctaaaaagaaaaatagacatgttaaaggcatactggattggacatacagaaaagaaaattaaagttgtgaacttttacctttgagagctcttttagtagaactctgactaagaattccatcggctgctgattagctccttacaattattcattcacatcgtgtagaacctgatcttcatagcagcccaccatatcattttccttctttgtttctagtcacataagaatagtggtcctgctagaacagaagacccatgggtgaaacccagagtagtcctttgtccaaaagagtaatatctccttgtctcactacttttgcaggggtgtcctagccagaggagtctccttcctttctcttcttcacgatactacttagcttggaaggcatggctgcacagagcacaaatacttagttaagaaaattgataaaatagattaagaataaaagtaagaaagtacaagtccaaattgtctccaccctagatcttcaaaggagcaccatcttagagaaaaaaggaagggacaccatcatttgaagagtcacctataaactcatcttcaaaaactgactttcccttgcctacaatgaaaggtagaatgggttgtacagcttcaccagcgagcttactaatcctgatcgggtgttagagtggggatgatgccgagtgaggctgggtagactttcctttgtccaatatattctgatcagtggaatccttctccttagttgtagaagcaaaatcctccttggcctcctcggatggatatagtccgtaatgtaagaaattttcactattggctagcctcaaaatatcctgacccctctaagacatcccaagaatatcatggcctctttccctaaacttcaatgtaaaaggatgaaagtggtatggatcgactaattagaaggatatatggtttccatcggaatagagtagtcctgtgcaagtccatcgatctttgacagcttggaaatttttatgtcgacctaccatgaataatctagctaggagaagtaaaaatatccttacctcttttgcttcgggtttgatttcaagtcgaagaataagttcatgtcatgtttttattgttctccccaaccttgttcaatatatagcatgacaaagcagataagtattttaaccccttcgggctgatctgggttggatagatcttgtaatagtttgccaccttcttataataagaatgaaggggcagcatagctccatacttggcatggggaccaaaccatgcatagagcctatcactagggctatgagccatctgcctccccttggtaggaatattacaacatctccgagaagacctttttcttggagattatttaatctctttgcagtgaggctagatagaggagatctctaacgagattgggtttttaccttcaagggaagtggaagggcctctgtgaattggtcatcctcatagtaaatacctcagacaagtagctacctggatgccaaaatgggttcatccgcttcattaaatcccccgtatggcttatcatcagagtcaccttccctttcttcattaaatagccaaagacccctagctcctcctactcctagggttcctcatgttctagtggtttcttggtaggttccatggcgaccatgagctggcctatgtgtgggtcgttaacagaaattgtttgcatgatccgttttgttttcaaaatttttgccctatgtgaaggaacaagctttgtggtatgtttggcaacagtgactgctatctctgcctgcataaaatgcctctttaaagaccttagataaccttcaagaaggatttttagaatgtctacccaaaacttgtatgtccacgaggctaaaagatactatccccaacctttgtgtaacacccagacgaaacggtcgtactcctctctgccaatctggtcgtggtagtgatgatgctgtacttcatgatccggaggctaactcgaaacttcccacctagaaaatcttaatgacgaagatagcccacttgaagatgacgatgatactactgtacaaagtcttggtttatctttgaagagtagttggagaagctccaaaaattaaacaacaaaaggccaagcaaatatagggataattttgcacataatcgttctagattgatatcaactatcaacattcaggttacactcattcgaatgaaaaactcaatatccctaaagtaatcgcgtagaacaagaaaatatatctagtaatgccacagagcaattaaaaatgaaaattggtaaagatgagaggaagacaacttactcattgaatttgatgtttggttgaaacttctagaaaagagtagtccgaatagatgaagaacttgaatagcttgaagaaatttatgcttctcattttagagatggaaatttactaaaaatgttgaatggagattatgggccctttatagaagctcctaggggtaagatagtatggtggttttaaattttcaattcccgccaaaatacaataaaaattcatcatcacgaatgtgaaaccatcagtgcacaactccccataactgtcaacacattctcccacatacaattttcaagacaacacatttaatgctgagatattgaaaagacaaggggagatactcacgcctcatgtggaacatgcatcacatctaggtcagcacgtgggtacaaatgcgtgtcacctatctgagtgacgagtaacctgtggaagttttgtataagaagaagttccaatgcaaatgttagggcaaatgttataaatttttttgcacaaagtgacatggcactcagcaaggtgacatgtgttccacatatttggatctagacaaaagatatatccctttggtactttccaggaaaagtaaaatccaagttgactagtccatccttcaccaatcaccatcttaacatatctcaaactcacattactttgcatagatcaagcacgctgagaaagtgccatttgccggactgctgaacacaaccagtaacgatctctagagatatttgttggaacttattttaccaagaatcagatttactaaacatgtatgttgattatatatctataatgtaacatcctaaatatgaaatcttggaaaataataaattaatcacataacagttgtagaaaatcttacattggttgtagtataataacaagacttcttccattcagttctcttactctcgttcctttatgtcgcggagtagtaacaagaactaaacctagatactccttgaattatcaaacagttcttgtaacaccctaactattttaggcgtattacgtgatttttaaacgtactgtgcagctcgttgctaatcaacgaggtttatggaaaaacgtgattaattaaaaatttttctttttcattaacttataaaccattttacaaaagtctcgggatcccgatttataaaaatatttacaaacgttttaactgttcaacttttacatcaaaatgaaagtcgtctaacgacagtta

SEQ ID NO: 377922 - DNA, 3079 bp, Cannabis indica
ttctggagtaggttgtcgtatctttgtggtgatttgattagagtaggggcatttgttagtgaagaattttattcagattaggtgtatttattttattttaatttttttcccgtttaaattaggtttaaactggaaaacccataggtgactggaagatgacagacaaggaggagaagacatcatgtctcgtgggaatgaatgggaagttgtttcacttacagcatcaacatatgctgctgcccctggtccaaaagaagttgagtcaaacgataatgacaagggcacatatggagtggaagctgaaacttcccgtgctttgttcatgtcagggcattttgtttttccaccaagtcagcatgagaatttgcccttggaatctgacaatgataagattagtgatgagcacggggataaagatgtggtatctgaattggctgctggagaagaggggagaactagtggcaaggataatgaaaacttgacctttgaagaactgactgtaacagatgactttccaggaatttcctttttcgacgagaagggtaataggccaccctttcatggtacagattttgaagaaggcacaaatattccaggattaaatctaattgaagaacaaaatgtgtatagtgctgccaagtatagttctttccaaactgaaacaaatttagttggttcagcaccatatagtgaggagacagctattcctgaatatgttgaaacatcagaagaaaacctagatgctggggacttaactctttcaccaaggcctttgaaagatgacaaacgtgatggttcaggacttccatgtgaagcttggtggaaaagaggagctgcatctttatattctcaagcaaaagaagcaaatacattctggtctatctttgttgcagcagctgttatgggccttgtaattcttgggcagcattggcagcaagaaagatggcaggctctgcaacttaagtggaagttcagccttaatagtgaggtttgttgattgctgttattcctttctaatgcaagttagcatgaatagttacttactttcctagttggggtcgtggagcttttgttctgttggttaagatacaaatttatgactttgctcacatatgaagttaaattaagatacttttttctttcttgtgattataattgacttccatgcatttatgaaattgttatgatagccagctttttcttgtgataatagtttgaccaataagctgcaaaggtatctaccactaccactacagtagatagagcaatgatagggaaattaataatgaaaaagtctacgtgcttgattttgttgctatactatgatactttaatttcatttgtttgctgtcaaacgaagaatgtgggtttgtcagtttttttctttattatttagtataaattaactgatgaatcatcttagtagttagtttctctgattttcttgtcaatcagtggttatctaattccttacgttgtcctttgtgatgaagttgttctgtgaatcttttgccttgatttttaatatgataattatatatgctcactttttagtatccccaagttataatttttttgtttttgaagtaattactaatcattagatggtgaattgagataattgtggacaagtcatgttagtatgaagtactaaatggggagatatgcccatcaacacgttgaaaacattacctgatccaattttttgtgatgttgagataatctgtagtagttttggcctttgttcagattattgaagcataagtattagttgcatgatgatttttaaaagatatatcttttattaacaatatatgttaatgtcacaattgtaatatttaaaggagcctacaaaatcagcttcctttaggtggtgctttagctctatgtacttttcttcatggagaatgtgaaacagagttcgtcaagactcaataatgcacagctattgtttggacaattatttatcagtacacttgtttaggaccactttaatgttatgatttatttgtgcactactgtgtgtttttgttttaacatttaaaactaaaattaatggaggcttcttcttcttttttttttccccttatttgcagagggcaagcagagtgtttggtcccatttctcgactaaaagatgtgattgtgggaggtcaccgccgtggatccctcattagaggcagcacatcaagtgagaattaagatgtttgacatcgtccccaagagaaggggccaacatttcaggtaagacttttctagatgatgacgaaaaatataagaggcaattgggagatatgtttggatgtgatatctctctagtttgctgcagtgtggtatgcatttttcttcttttctttcgtaaagttcctccatcgaacccttaaaaaggaaagaaaaaaagaaagcttgatattgtagtttatttatctgctgttgtatttctccgaatttgtatctgtatagatattcagtgctggcatttactcatttgtttatccatgtaatatggttctgctccttcatacggtgtatagtgtgatcaaagctccaaagcttcatatcattgacaactttgtaggcttaaaaagaaatttatttgtgcacagtgctagtgaaatggttgttgggttgatgctttttatgagctgatcatctaaactatactagattgtgattattgcctctctaaaaacttgctatattataaggaaaatattctgtcaatactaggtgtttcatgttaaccttaaactgtaacacaagcttcagtttcaaatccctaactttatttttatttttggttgcattttataaaaataaaaactgacctcatcgatgtttatagacttaatagtactatacctttacttacataatgcgaaactacaaattcaattccatttttcgcttgccctttgtataagaaatcatgttcacgacgctatatgttgtacatttactttagggactcttttcttaaaaaaaagacaaaaaaatgttatatgctttttataggttttatttacaaaaaaaatataaatcatactatcttttttttacgaattacaaatcatactttt

SEQ ID NO: 377923 - DNA, 7652 bp, Cannabis indica
aaaaacaaatagaaaatcgacacgtgtacgtaaatatgctaacgtgcacttgtgggggggtcgtacgcaccccgaaacagtgttctccgcattttactttacacccctcccaacaaagtcatcgttttcctcttctgctgccttccacgcactttgcgtatccaagtctctctctttctctctcctctttctcagtagttaaaacttcgttgactgaaatagccctttttctcatttcaagggtatttctttttaatttttgggggacaatggtcggttgatgaagttctttcaaatgatctatttcaacttgtcattaggtgagttttgaatcttcttcttctactacttgcttgatttgatttgggttttcagttattgattctgggtatttcttataatcacggttttgattggttttgtttatatcaattttattactgtgattttcaatcaccattttcagatttttggttactgcgattgattggatttcatatttctaaagtaaaaatgggattttttcaatttcgaatctttcacctaattcaaaatctagcatagccgccggagaagaaagagctgaggcaacctagtttgggcctgcgaattcgttccacaatcactgaacatgacatgtagccaacaaccctttacatgcctaggtttatgaatataaacgaaaccttttttcaacaattttctgctcttaccatttctctccgtttctcctcgtttccgccattaatgttttttttagggttcttccagatatatatattttatttagatgtaaactaagctttcttctttcttcttatgaattctaattttgggtatgtttagatctcagtgagttcgctttgggatttacgaaatgtcgaaaagtggaggatttgatccatcatcgggtctcgccggaaagtaatgacaagaaccaagctctctccaacgctgaaaagtacatatattctatttcactcttacgtaattaccttttttcactctacatgtagattctataacttgaatttcatgtggtttagaattaattgtactttccacatatgtatataaattttaaaaaaagataaaataaaactattttgtgcattgtagagtttaatttgattaaggtttacatgtctttaatagctgtaaaatttatgatagttgattatctttgcggatcattggttataattttaattgttgctgaatcattcaggtatgaaaaatatgaccgggagagctccaggatggtaagaaagcgatcagagcatgattttgatggttttgataggaggaaagggtttgataggtacagagatggtggtggcagcgagaatagtagagggtatgacaggaacgcaatgcataggtcggagagcttctgtggatcaaggagggagttccctaaagggtttcggtcagagcgtgaccgctcacggagagaggggagtgtttcatcctggcgaagatttggcagtggggcaaaggaatttgatgaaggtggcagcaggagtagattagaggagagaggaaagagacttagggatgtaaggtccccgacatggtcgaattcaaaggattcgggaagcgagcaatcaagggttaggtctcctccaagaggattcagggataggaaatcattgtcaaagtcaaagtctccgacctggtccaaggattcagttggaagtgaacaatcgaagtttgttgaagtgaagaaaaatgaggacgttcaagttgagagtgggagtaggagtagcagtgaaatggaggaaggtgagcttgaaccagagcctgaacttgaagcagaggccaaacctgtatcagctcctgaagttgaagctgaaaaggaagatgtaaagggttgtgctagaatggatgttgattatagagagattgatagtggtaaagatacaagtgctactgttgtggaaaatagaaataagtcagtatgtgaaggagaggtgaaggaagtggataagaaagttatttctgaagaaaaagatgtggctgatgaagctgatagtttggcaaatcatgaggataatatggctagtgaaaattttagcagtggggagatatgtaaagaaggtgatcagaaagagaaagaaagtttcaggggtgatgatgaatgtaaggatcatgcagcgcaagaaatcgctccggaaaagccattggaatctgtagaagaacacaagaatgacaagggtattgatcttgaagctaaggctgaagatgtcgaagaaagggaattgaacaaggaagtgatagaggagaatggagtgcccgaggaacatatgtcaaaggtaactgaatatgtggcacaaagcttcaaggacaaagggaaaagtgtattggtgactcctaatattgccgattctgtgaatgttgctctctggaatgaaagagaacctagagatcttttaacttgcagagaaaatggtatagaaggaccgagcaccagaggctttgagttatttggtagctgtcctattagaagacaagagaaagctgatcaatctggtgctaatatgaataaggatgaaacacttgagtcgcttgatctttctcttagcttaccaaatgtgttattacctattggtgcagctcggggtactgctagtcaagcaaggagcgttcagtccttgactaatacatttcctactaattcagatgggatgacagcatcagtgtccttttcaggttctcaatcattttatcacaacccaagctgttctttgacccagaattctatggataactttgaacagtcggttggcagtcgtcccctttttcagggggttgattggcaggcactgtctcagagtgagcctaaaaataatgaagctcctttttgtcaaagaatcttaacaaatgggaacggaaatggttctcatcaacagcctcaatccattccaaacaatcattctgcccaagctcaacaccttagggctcttgaaggcagctctacattaagtaatggattggaaaggcagcttagcttccataagcagttgtcaggacactgtaggcaccctgataatgtcaggtcaccttctcatagcgttggttcttatgaacttggatctagttacagttttgataggaagcgactaatgagagaaaaaagtagtgctagcttgtataggactagtagttctaaaatggagcaggaacaatttcttattggtggggctgaatttgttgagacaatcatttcccggatagtgtcagaaccaatacatgtaattgctagaaaatttcatgaaatgaccggacaacacttatcatgcctcaaggatagcatttgtgagatgttgcgaaatggagagaagcgtaggcatttaggtgccttacagaaagaactgctgaaaaggcctgacataaccttggagttgctactcaagtctcataggacacagttggaaatattggttgctctgaagactggtctaccagattttcttcagcaagaaatgagtgtatcatcttcagatttggctgagatttttatgaatttgagatgcagaaatcttgcttgtcgtagtccactgcctgtggatgaatgtgattgcaaggtttgttctcagaagaagggtttttgcagttcatgcatgtgtcttgtctgctcgaaatttgacatggcatccaatacgtgtagttggcttgggtgtgatgtttgtcttcattggtgtcatgcagattgtgcgttacgtgactcttatattagaaatgggcgcagtgcaatgggggcacaaggaacatctgagatgcaattccattgtgttgcctgtgatcacccatctgagatgtttggctttgtgaaagaagtgtttcaaaattttgccaaggactggtcagctgaaactctatccaaggaacttgaatatgtcaagagaatatttgctgcaagcaaggacttgagagggaaacgactctatgagattgctgttcagatgttggcaagattgaaaaataagaacgaccttcctgaagtttacagttacataatgagcttcctcaacggtaaattaattatttatttacctaaactattgcttattcttgtttgtgctctgcctctaaaattttaaaacttattagttgaaagttgaaaagaatgttatagttattagagataatacaagtcttgtataatttacagtcctttgtatctgattttgcatcagtactttctttcaccattgcatctattgaatcttcaaagtgtttctaattatttcattttattgtagatgttgattctttcaagttaaataatatgcctcttccatctgggaaggaacaaagtaaaggaagcatcagtgggaatgggattgctgggccaagccaagaacccacatggctaaaatcggtatattcggaaaaggttcctcagttggatatacctgctagcttacttcctagttacagttatgaccgaaatgacaagcgcaacatggacttggagttgcggacaaatacttccaaggagcctcttttcgatgagctggagagtattgtaagaattaaacaagcagaggccaagatgttccaaacaaaggccgatgatgcaagaagggatgcagaaggcctgcatcagatagccattgccaaaaaatggaaagattgaggaggagtatgctagtagaattgccaacttgcacttggatgaagccgagaggttgcgtaaacaaaaacttgaagaactgcaggctcaggaacgagaaaatcgtgaatactttagtatgaaaatgagaatggatgcagaaattaaagacctgttattgaaaatggaagctaccaagcggaacctagcagcatgatttgctgattaacaattttttcatagggtgtcatctcttgcagtaattatattatttctaatgtaatcttaaggcacaagttcttgatttttaggcgtttctttagtagttttttcagtgtatccgtttattacctttgtgaacaactaaccaaaatatgtagagagacagatttctgtatgttataaaagttccaacttgcttaaagaatatgtatgtagctttttttttattattttttcttctttttattcataaataaatttgatagatatattaatgttgaagtcagatgtgatggaagatttgcctcatcgtggaatagtgaaggggttcaatacgaagcaatctggatgcgtccttggattttggaatgttggtgcggttgtagtcgagaatgagtatcaaaaggaattttcattcagattttatttatttacatctttctatcttccacacatcactccatccctcaaatttaagtatgacatatttcaatctccttttttatttatatatacatgattatatgtgcagttatatatattcatatgtgggccatatgtttatagaaaatagttttcagccctaagttctatccaaaataaataaataaataaataaaaataacaatggtcgtttcatttgactacgtgttgttggctaaaaatgaagtcaatattttagtactttcattgagatttaaactatttttttgctctccacttaatatctgcattttaaggatcactcaatcatcttcacttcgagaacaatggttcaaacaagaagggcaacatcaattgaaccacacgatctaatggccactgatccaaacgttcagatcccaattgacgttggaaccgacaatgtcgataattgtcttcctccttgcaacaacacttcggtgggcaccagggttagagaccctgctttcacaggtgtcaggagtacgacaggcaatacaaacagagttactatcgagatgccaaggatcaaatttggtgcccaagagacagggaccaccactcgacattacactggagagactgcagtcgagacagactagccatctgaaggagagcctcgcatggacctggaagataactctgagttagagaacctcagagaagtcttggagcaagttcaaacgcacaccaacaccctccaccacaatcaagaggagactcgcgccacagtgaaccaagtgtttggccagtagtggcgggagtttcaagaatggatggattacactgctcgagaaatgtgtgaccgacatgaagaaatcaaccgtagggaaaagaagctactgatctagtccaacaatttgcctaacagactggaaggcagaacatttaggcccaactgcgcagacagaatgacaacaggggaaagaggatgtatattctaagtagtggacctgtgtatggactagacgagcgtccaaaaaactatgcgcaatagtcgaggagagacggacccaccatcccggggccccaagagaaaaatcgtgacagacacactgatgaacaagtaatgcctggtcactaccttggaagggacgattagaataatttttgacataggccggaaggaagagatgaagatgcacccccttgacgtgcaggagggtctcaggggtattgtaatgaccgcataattaaattatgagaattagcatattattaaacagttaattattaatttatgattatgtgcttcttagtagaaattacttattgtgtgaaataagccttaaaaaaaatatatttttttttttccaattatagagatatatttgaattctagatgtaatatatattatatatgaaattttatattttttatattttatgtcctgtaacagtggaatgcaatgatatgaccaatttgagtcacttggatatagtttagtatcttagaaataacaagacaatatagttaggcatttagaatgtcgagattttaatggttatggttttggaccattttacaactaagtatagggatttcttcatggttaagtaagggcaaatgagtcttttgtccttagttttgaagtttgtcttgtagtggaatttttttagaatatccttagttaaataatctgattttgaagataatatctaataatcctaagtttatcctcattaaactgaaaataagaaaatgggacaaacctaagtcttcttctccttcctcttgtttggccacttaaattcaaagggttaacatagcaattcaagggttaccatagccaaagcaaggtaaagcttttctctttgttttctttaatttaaattaggtttagcatgcaaagtttagactatagtttctatactagctgggatggttaaggatgtttaattgagttgtttttaagttatatgagctattttgttcgggtcttggtgattgtatcagagattgaacatggtttgagctcttaagctcaaatttggttctttaatggtggaatcgagtcaagggagttatagctactatttttggttgatgtatgtttgtcctggcctaattaggtgttttaaaaggtttgatgcaatttagggtagttttgacctagtttttgaaatttggtctttttgtagagaaaagcagtttaacgcttttccaaaaatggtgaagcggtttttcaggcaggaccccagaaaatggtaaaccattttggtgtttcggttaaccgaatttttcagatttcagactctaatcttacgttttatcaatatttagggtattgccatgctatccatcaatagggaaattttagtttcaagtttaagtccccgaaagtgattt

SEQ ID NO: 377924 - DNA, 3298 bp, Cannabis indica
taaatggagaattaactggctcattcacaccttccagagggcttcggcaaggctgtcctttgtctccatatttgtttctcatctgctcagagggtctctcttgcttgttgcagcacgaagagtatcttacccttgtctatgttggaagaccatattcttttgtaaaaattgttaccaagactattgcatgtctctgggatggtttataacatatattttttggttgtcaggttttattatgggttactttgtccactttgtccaacatataataaaaatattttgtttgtttgtaccagtgaatttattaataattgctgctaattatgacgaaagttagaatgtagtaaaaggtaaaaaaataacagtgtggacgggaataataaatttggtttacacaattggagggtaaaatttgttttccacaagttgaattactgagtttataaagttaaatgaaaattagaaatggaattgtttagtgaaattgttaagtcttgtttggtgacagagatgtttatccaacaccgcagtattgcctaattagttggagatgcctgatataaaccacaaaggatgacaatatttatttgaatattaattattcacctttcgcggaggtctcaattggattataaaaagatttattttgttgcatcgattctttatggaaaaccaatagtgtagttgtggtgcaaggggtagatgaatcccattaaaatgacttcttggtgatataattgaagaatgtaaatggtatttaggtgattaggcttatgttacctttttttttttgttaaacaatgtgcaaatgtactggctcaaagttttggtagaggttatcgcctttatcgtcatatgattttttaattatgacacctattttataattattattaaagtaacgactttgtttcaaatgtgtattttttcacaccattcgtgaattaggtatacatgagaaacattaaaaaaaaaattaacaaattaaaaatgaatttatatgtgccatttgtacaatttgaattatcaatttgtataattattttgtcttaatcataaggtattataacagttgtttaaaaaaataatagcatttataaaaatgtctcaaaataatgtgagttaaaacactttcttataacaacaaaagtcacaatacttttaatcaatatgactaaacttttctaataaataaataaagtaatgttagtaaaaaaaatttataaaataataatattccattttaccatttaaaaaaaaataataatacaagttagacgaggtcgttccacgatttttgtctgtgaccacgtggtatctcttttgaacgacgttggagcttttttttttttattcatcggcggtacaatcccacaccaccaagagattcatcggtcccgaaaacctgtaatcccttgctctccctctccctgaagcttttctttctctctcgttataacgttctctggtcgtgacaacccatctccgacggataacttttagccattgacggcgcaggcgaaccacacatgaagctattagttaggctgtttatcttcttttctctttctgataagttagttatgtaacaggtttgacagctagttatattgttacactatttgatcttgtatatatactgagatattgctcactctgtagataatgagaatgcagatttgattcttgtcttttttttttccttcgttctcttctttccgacacaagcttccttctacttctctttgtctgtactatggctctgtctctttctatctcccgatcttctctctctcaatgggtaagtctatctctttattgttttctctgttctcactataggatatatcttatatttttaataaatgtcactaatattactaaaagtaatcggtaataactttttaaatgtcagtacaacgcaaataataataatatagagcttgaagttgtaagataggttgtgagacgaatatataaaacactaatttactaacaacttaattaaggactgccactactcttgtcatacaataatataggagattttgatgatggcttgggttacatgtcttcacaacactttaacacttataatactacataaacttgaaatgacttagacacaacacaacatataatagaagtacagaaatttaagataacatggtacttattagtcccatgacagtggattaaatagtaggaaaatatagtaaataaacagtgaagagactcccatgccactttattctttactaccttactctttccacttgtatttgtattggcgaaccatgtatttgcaagagatcaccgccatgcgcactgcgtgatgcatgtcttttaacttttcaacagacattacatgtaactcgatattttctcgtagtaccgaaaatgacctcatccatttgtcctcgtcacgaaggagactcaggtcatatgagtcacaccgtgatcggaacgtcagaattcttgaaacacccgttgtattccttaaattaggaatgtcccactcaggcgatgaactcagcactgtaacatcttcagtagggttatctgccgagatagttggtgaagatatgtgttaaaataaaatctcatattacctgtacactgtaaaaattagaatattacaaagagatttacatgctgtaaaaataaaacctaggtggcctttggcctctaaacacctaagacagatcagaaacatataagagagaaaatcaaaatagagcaacaatagaaccagatctgaatatatctctagatcaaaaccgaaacaacacaaatcagtacaaaaataaacaccagagcagattgagttcttttggaggaagcttacagtggggaagctttagaaccctacggttagggttcatatgtccaaaatctcagggagattgttaatgcaaaagagaggagaaaaagtcagtactgatttagtaataaacagagagaaagagagagttttcaaaaactataaataattatagattaccaatcgtactcgtgatttggagtaatcttttgatctttgaaaatctatagtggaaacgagcaatttgaggcgagctcgaagaagatgtacccaacaacaatttatggggaacctctataaaatcggtgcactctttcctttattttcttttctgcattttcaaataattgcttgtagtgttgtatttttctgggtatttttatgttggtgttcttcgtgtttttcagagaagaaccacgaagaagaaggttcggtttaaggggtttgttcgaactgggattgggttgtttt

SEQ ID NO: 377925 - DNA, 3047 bp, Cannabis indica
ttgttgttttcgtgttcaatctataaaaaactgttaaaatatataaaaaaaaattctttaaacataaaaatataattttttacaagaaaaatagtatcttatgtaattatcgttattatttagatattcttacaccatacaccattttatctcaaaaatttagatttatacgggctaatggaaatttaaactttttttataatttttaatatatttcccatatcttcaccacaccaatctcttttcaaatacaaattctcattctttccaatttcaccttcaatttattatttcattgacttacattttatccttgtaaaggctatataatatatataaattgaaatgatagataattgtaaaaaaatgctattaaatatagagcagaaaaaagaattaatgtgcttttcaaagttaaaaaggacaactctcaaatggctaaaaggatacccataagagaactaaaaagaaacatgaacaaggaaataaggataagaatatactttagtttttagatgtaaaatagagtaacttttacttatagtacctatgtgtttatatgggccaaggagggggaatactaagtgtaaaaagaattttgaaccaataacgaaatacacttaaaaagatttttctctcatgtacaagatagagttgtggaaaactttctttaaacaattaagtttatggttattgtgcttcacctacattcacttgctccactttaagtctctcaaattctcaatatatactataaataagtacttcaccttttgtaagataatatgcttgcacattaaattagtttgtgaaatatgttagactcattggtgtgtgatattgttaatgtaattttttggttattaacgtctctaatagttatgcatttagatgatgatatggtattatttttcgttgttttgtaatttagtttctaaattagtgtagcgtaggattggtgttgtgttacttttcgttaattttttgttggtttgtaatttattctaggttgccataaaatgagattgatgcatgtcattttttagttctttgttggttgtttcatattggaatgacacaatgtggtgatatgttgaagttttggatatgtttgagtggtgtgtgtgtgtgttttacagtgttatcgatgcgatatcgataggatattgaccaaaaatcaaaatgggcagtgttgggtatgtttgcatgtttttccaatttttgttatatgtcgacatgttgtcgacgatatgacgtcaataggttatcaatagtagttgaatttttgaacataattgggttttttaatttttttaaaaggtatattgataggatgtcgacataatatctataatttatcaataatttttgttaagatatattctgttaaattatattaagtatgtcgatataatatcgacattttgtcgacattatctgaattattatgtcgataatttatggacacttatgtgtgtatgttttttcaatttttttggttatatgtcgatatgctgtcgttgagatgtcaataggttatcgatagtagttgaatttttgaacgtaactagatttttcaatttttttttttaaattgtatatcaataggatatcgacagattatctataatttatcaataatttttgttaagaatactatgttagaatatattaagtatgttgatataatgtcaactgtttgtcaacatgttttatgcattgtctgatttattatgtcaataatttgtcgataagttttcgacaattttatttgattgcattcttttatttttaattgtgatattatcgacagaatgtcgacattttgtcgataattttctgtgagggcatctttaatattttatgttatatattttctcaggtgggtccacgactcatagttccagcatccgaccattttactggccgcgtgacatatagaggcatcggtgcttttgcaaaaatcaagacgcagtttcaggaagacaatttgaatgagaagacgaaagcaagcggttttggcaacttttttagaatgccgtacctctcacattttcctcggtattatttcaccaagtaatgttgcacaagatgaaggttgatgttgaaaaggcaggggtgtttttttacattggctgaaaggagctcaaattggagtggttgagtttgcactcattacagtggacttcacctcggggccaaaataagaggagaaggttgcgcatgttgctcgctcggggtcagaccgattgatcaaaaaatatttcatctggtctgatagtgtgaagacagaagtactccaagagaggttctcaaactgtcagaactcggaagacgtgtacaagcttggcttgtgcttatttgttgaggtagtgctattgggtcgcgaggctaacattttgattatgcctgccatacttaaatatttcaaagatctccaattcttcttctagattccttgggggaagtactcattcgctagacttatacacttgcttcaaaaggacatgttgaaacacatgccaactacaagaagaagctgagtttaaaagttcaacatgagtgcaaatacataacttatggcttcgcacctgcagtacaatattggaggtatgaggtaattttagagattgggaagaggtatgacactaatcatgggattcagttttcgaggatgcttagctggacgagtaagggagagatagggaagaaggagctcagtgcattattttctagacggatatgaattttttattttatgtttagagtaattattcaagagaaatgcttgtaataaatgctaaattatttttctctacattttttaaatcttaaacaacaacttgaagtgatgaagaggctacttccacgtccagataaggacgaatatgtaaggaccatcacttaggatggtgtggagatcctggttgaggttgtgtggatgccacaggttgaggaggaaacccaagaccaattgttttcagaagacaaacagaaaaagcaacggaatatgtcaaaaatgctcctttgcccgaggcagagactca

SEQ ID NO: 377926 - DNA, 1455 bp, Cannabis indica
aacttctattttaaacataacttggctacgtaaatagtaattaaatgacattttctaagaaaaagagagaccgaaatacatgctaaaaacaaatacttcattccatttggtaacaaaatctccattattatattttattccattcattcgtcagaaaaatattcttacaaaataaaatttaaaaaatctcaaaccacagacatgggacccacagccgccgcagatccacaagaggtggctccgccattgatgacggagaagaagcccaccagttcctgatcatccacgaagaggtcctcgggatcccgaaatgcaccgtgagcgcacacgatcgtcaccccaacgatcaccgccgatacgagtagcgacaccacgctcgtgatcaagatcgccaccagcgtggtcaaaaccagaccggttagggtttgggcgtcggagtaagttctaccgtagatctccaggggttgatccgacggccggagaacgtagaggaagagccatgctccgatgaggaagataagggcgaggagtgaaaaggggtgggagatgaggaagtaggcgagtacagctgcgattagggttacgtaattgacccgaaagtaagttatgtttttccgtactcgcgaggcggcgtcggagaaggttgccggtctggagaaggcagtccggtcgacgaactcggtccagagacgacggttggagagcgcgtggcgagcgtggtggcggaggcgagtgaggattgttcgggcgaatagagtgttggtatggacggttctgattggctggtctgagtttgaagagatcgtgatctttggatatgatgacatcgatgggtcccgttggaagaccgtaaaagatttggatttgtcaaattcaaatcaaatgcgtgtaggaaatggttatctggatttttgactagcaatacaaatattaagattatgggaagaatatttaactaattcataaaggaaattagaagaagaaattgaatagaaaaggaaaaaataaaataaaatctgttgtattgaattggaacactgtagtactaaataatttataatggcaaaggaaaacgagtagtgtaagtgttaggcaaactcgatactttacaaaatttgagtgatttgtaaatgttatttttaaatttgtaattacttaatttaatctacttcaatagacagaatccaatactaaatcactttatttttctttttcagtgatataatattaaaaaatgtggagctggtttgtaattttttctgtttttttttttgaaagagtaaattaacattttaactacaaagttctcatgtacataattgttgaatttgcaagaacgagagctttagggtgtgatttagtttaggatttgaaaattattttatgtttttgaaaattaaaatagtggggtccacctaagaatttttgattagttgagtgtttttaaaaataaaa

SEQ ID NO: 377927 - DNA, 2869 bp, Cannabis indica
tacatggcatatgcagttcgggattgctactacagtatcgaaaaactcttatgctctcttattgatggtgaaggaagactctggtatgattttgtcttcatcctccattatacattcatggattatatttactaaacccccacacatttgccatttccttcaccttttgtattagggttgaaaggatctaccgtgagataaacaacagtatattggaaggatcacttattataaccttatcgcttaagaagcttccggtggtgctaaaaaagtttacagctctaactgggctcctggtactttttcatcattgtaaccgtgtttatgtttctgaagaaagcagatatgtgtaaagaaatatataagttgatcattacaacgttggtagtagtattacgatgccatgttttggcaccattattctgtagtatggtcatttccttcctttattacgtttatgctttcattataactcttggtaagagttaagggaaagctgctaaaatatgtttgacgagaagaatatttcctgtttaatagtccttgatgtgtctgtcagtcttttgcacgtgtatcaaaactttatattaagtggctcttctattgaaactaacattagtttgttgcttattttgatttggaatactggatctaggtatacatgtaatttcaattaatctttttaaatatcttatcaaacgtgtgctccagttacggaatgaagatcctgatctttctaaaggagcttcaaaagctgtgtatgaactatatgaagttgtcacacataatcttatgtcacctgatttaaggtatgtggtttgtacacatcagtttctcttttttattaccttggagatctttgaggttttcatttgtatccttgtgctgtgcattcgaccacagggagcaacttgatacctggaacattttagcaagagcaagaaatgaagggcgtctgttttctaggatagaatggcccaaagatacagaagctgtaagttttcttggtgaaatgcaaccatggacatctttctgttatttcctttgcatttatgctctgtttttgtctgtgtggtcaaagaaagagctagtgaagcggttgcatcttcttcttactgtgaaagattccgcagctaatattccgaagaaccttgaggcaagaagaagattagaatttttcactaattcattatttatggacatgccttcagccaggccagttagtgaaatagtccctttctggtacatatgagtttagttgttgtttgttataagccaattttgtttttctctgcatgaaattattaatttttcttcttctgcgtgtgcttgggaatagtgtcttcaccccctactacagtgagactgtactctatagttcttctgaatttcaaaaggaaaataaagatggaatatcaactcttttctatcttcagaaaattttcccaggtaatctttcttcgctctaattattgtactataacgttgtattatttctcggtaattaggtcaactgttatggaaatatagaagctttttttcttatttaattccttatatttaataaattgtagccctcatagaataacagaaagattctgttaaaatgttagttgtaatagtttattgttagcttatggtccaaatagagagaatttattgtcttggcccaataggcttaccaaagacgttttagagtatgtctataggctctgagcgtgttagtacattatgactatctcattatagcccgatataccatacattacagattatatagttattattacatgctaatattgacactaagtgagcaacacttagttatgcttctccacatataactaaactatcatatgatgatcttttatgcatttgagtctctttctattactcatcttctgcttttttaataagttttattttttattatagatgagtggaagaattttttggaaagaattggttgggccgattcaactggttatgcagaattgcagaaaagttcaagtgatgctttggagctgcggttttgggtatcttaccgtggccagactttggctaggactggtttgattccttctattacaaccacatatataatataaccctcactgttttatgtttttcgatttgagggcggcttaatatctaattacgtacttttatccttttccacaattttttctaaattttaataaagaaaagaaatcctctcttataattctttgttcacttgcatattataagcagataatggcttttatgattgtaattgcagtgcgtggtatgatgtattatagaagggctttaatgttacagagttatttggaaaagagatcgttccgaggtattttcttttaaaacttttaaattgcattaagttcctttcttacgataaatgacttactgccactttgtcacaattttcctgtacctgaagttgatggatactctcaaggcagcatccctacaagtcaaggttttgagttgtcacgtgaatcacgggcacaggcagatataaagttcacctatgttgtgtcatgccaaatttatggccaacagaagcaaaggaaagcacctcaggctgctgatatatctcttttattgcagaggtattgatctcatagacttttcttagattaaaaattgtctgacaataataatacacaagaataatgaaaccccactagaaattttgtttgggagttggattttattagaaaaagaaaacaaaaaaaaaaacgtaaaaaaaataaaagcatggaatctaaataaaaaattaattttcatgttagatttggacggtttatcctatatattttctaatccaatttaaattttaggttgctaaaatttaagtgcaacc

SEQ ID NO: 377928 - DNA, 2910 bp, Cannabis indica
aaacactcaattcaacaaaatttgtcatatcaattaagaattgttgatatattcttatttatttatttattttgagaaaatagcttcaataaacaccaccaaaaagcaaggagttcaaaagagaatagagctaagatatatctttaatagatggcctcaaccataataatgcttatgatacaagaaagaaggatgtccaagccattagattgtattagttgttgttgaaaaagcaaataatttagccaaagtatcaacaacaacattctttatttctgaggcaaaatttgaaactcacaaattaaaaaaattgcaagaagctttaatattcgagatgactaaactcaaagatgaatctaacttcgaagagatattaatcttctcaatcaagcttatgagttgcattgaataacaacatggtgtaaggcaagaacttttaccattttctggttgaaaagttccctccaacttccatatagttgaggttgtaaccacgccttaaaaatctcgagtcatatacccaagccacaagagccatgaaaaagatcgagggagcattggtattgactttgatcattcccttggaaggtcgaagccaacgtggctttgtagaaggaggtggaggcacgacttgcctggagcccgacagagaggggctattcttgacctagaaagacactagaaacttagaggcccacagcctaacaagctcccactactacaacaatgtgctttaggtttagaggcccttatttttgttggaaattaaaataagggacaacacaaggttggtaatctaccgaggggttgtaaaccccttatggcgtcgattttttggaaataactaacgccatagagtgtacccctatgtcgccggttattgccaaataccgacgcctaaagggtttataatcctccccagcccttcatcttcctcattcgatcagccaactcagaaacctccaaaccagagaaaccctaaacactctctgccaaccacctcgttaatcaccccccatttcactatttttttttttaccattttaactctttttttttaaaatcttctatttttatacccaaaactatatacccgaaaagatcgcttgggtacaaactccatgattgcaaacctccttactaagggtttttcacccaagctctttcatgagcacactagtcgtatgagtattttagagtatgaggaaatctagatttagtgggagtttatctttcttatcctttgtattttttatttgtttcatgaaattgtgtattcaaataactttctgattaaaaattatgttattcaatttattttactttgtacattaagttaaagttttgatttctataaagtaaagcaggcccagtaaaaaactgacccgaatagatcactacgcctgtaatttttataccacattatcattattgatctatgtaatttggttatattgatctatgtgaccattgataggtttagttgtggttgatacaatgaaaaccattttaatcctatattgatatagttaatggacaatactgcacatgcctacagttatgatgacaaaattatgagctcaataaggttaacacatttatattgatacatatgtggcccagtgagagattgttaggaatttatttatttgggaccataattatacatataaatgtgtgtaggctcatcatataaatgaatcaaatttatgtggctattttagaataaaatttatgatttaagagcatgacatgattgtcatgtggataccataaagataatttttaatttgatgaggggctaaattaaaaatagtaaacaaagattagttactattttatcagttattaataacaggtaatggtccccaattcgcattgtatcgtatttttcactcttgtatgcccatcaccaagagactaaagtttcagagaaagttttgatccaaaattagaagattatactattctaaagtcgattctatagactatggtatgcttccgctattatttaattctcgtaaattaattaagactaaattcggaataaaatttttcaaacctttattgatattagttttttattcactgcagtaaagcaacactcatgttcaactattaaggacactcttaacatttataataaggctactggtcaatttaactttgctaaatcttcaaacttattttctacaaacacttcttttgaattttttgctcttttcctaaaaatttggggttagatagtaaatttttaattagcaagtatttaggtctccctcaatctcttgaaaggtctaaaaaatcttctttcaatcttttacctaataaaggtagctctattcttttttttatggaatagaaaagctttttcaaaggcgtggaaagaaattttattaaaggttgtgattaaagttatttctccttatgatatggcatattttaaggttcttgttgctacttgtcatgccataaaaacttcaatgactaggtttttgtgggggtaaataaggctagctcataaaattcattggagcaagtgtgctgatttatgtaattctatgttttatggaagtttaggtttcaaatcactcgttcaattcaactagaatatgcttgctaagaaagcatggtgaattcttaaaaaaccctaattcagttcttgatcaacttcttaaggctaaatattttaacaaattacttttcttgaaggtagtaaggatcacgttccatcttatacctagattagccttacttttgggtagagaattactcaagaaacgtttaatatgaaaatttgccaagggtgcttccattaaaactcttaaggactacacgatcccatttgataggtatgtttcttacaaaatttaacaaagtcccatagtctgattatggttcttttttttt

SEQ ID NO: 377929 - DNA, 3971 bp, Cannabis indica
aaaaaatgaatgaaagacatgttactcaaagtatttttaatattaataatgaataaaaattaattatggtgggtctgtaaagttctggttccttccaaaacacattcattcaaatctaataaattataaaactatcaataaatggtgaaattatccccataattgttgtttcttttaaaatttattttacatatactaaattttaaatattaaataaatcatttaaaaaatattaaataaattcaaattaaacaaataattatatataaaatatatccaccaatataacaaatctaatagatattaattcaataaaaggagagaaattaattaaatcgaaattaaataaccttaaaaacatatggacatacaaatataataatagtaccctaacttttttttaaaaaaaatataacctcgacccataaataaaacaccataaaaattggatcaccaaccattcacatggccacacatatagatttattaatctaaatattttcaaccctttgaattgaaaacatttattatatggacgactttctgtttatttatttatttattattattattaaatacgtgtaataaatttacatgcatagcatagtcacttaaatgcaccataataatttgatctcgacgattggacgtagttgttttgtagtaatagtactacaaaactcgcacgtgcgaatccataaaaacaacaaaaaagtggcacgtgggatagaagctatcaatcgccaccgtatacggataagcacgaggcttaatcgtaaccgtcgctgactgtactaatataaaaaaccaccactttttcactttattttatttaattattatttcttcatagtaaactaccgacacatacttctaagttatttaattatctaaattattaatatttttaaataataataattatagggtaatttttatgggaacatttctattatgcttctcataataatatttagtgatataaatataaaatttaactttcaattataaataaatatttaaatttaaattatatttctaaaattttatcattataaaaaataaaaatttcaatattattactattaaaaatttaattaaatatttatttataagtaaaataaataaaatatctatatctcaaactctctaataataataataaaaatataatcttttctttttttatatttttttaggctaattaaaaattttcacctttaaactttaccatataccaaattatatcctgaatttttctaactattaaaactttttcaaaaactatttaaattattaaattaaaagacttttatctaatttcattcaattttattatttcaatggttgattatgtactaaatcatcaaactttaatatctatcaaatcatacccctcaaattttaacatgtactaaattaaagtacattttaatgaccttaacatgcaatattttagttctaatttattattactttttgtatgtaacattaactatttattctacaaataaaatagtcacggattcaacaaattatttggacccaaatatctacaaaaatatataattacatgtgcaatttagaatttcttataacaattttagggtgttaaaataattcagggaaataatttattatattttaagaatgattaagacaactaatattagctataccattaattaataggactaaataactaaataaattcataatttttgaatgattaatcttttcatttcataatttgggtagaaaaataatcttgattaagccaaaatgatattaattagtacaaaatcagaaaaaaaaatagagacaaaaatatatataattaataataataataataacagcagaatcaatacatctactaaaacacaagttaattttttttttttgctaaattacaataatatcaataataataacaaataagtccctaaagagtagcgaaatttgcagttttacctagtttcaaacttttctttgcattaatgcccagctcctcttccgatcatctccttgtacctaacaatggagtcaagcctctgcaacttgagctgttgcttaaacctgttaatgaaatcatcagccttagcatcaacctcaccttcttcttcctcatccttctcaaccaccttagcttttccttctctcacagtcgccggccggcgactctcaacgatatcatcttccttaaaatgagaaaaagccgatttagcactggccgatttcttcatcttcttcgaaagcttcggtggagcctcgccgttagagggtttcgtgtcggagttcgaacggacgacgtgagctccgccgttgttcttcagcttgctgtaaacatcgtccatcgattggtcgaactggtctagggtttcggtatcttcttcgtcgaaattagttagggtttttgaatgttcttcgaaatgggtctgttcttggtttggattttggtactgaggtggagataagtaggagtagagattgattgatttgagtttttgaagaacggaaggagatctgaacaaatgggtttgggtttgggtgtgttcttcgtcggaatctgatgggtttttctggaaatgggttgtgggttcttgagatctgtaagtgtaaaagtttatggatttgagtctttgaagcacagagggagatctgacgagttgaggatgaagacgatggtgttgttgctgttggttagggttagggtttggttttggggtgtttaagcttgaggtgatgaaaatggtggcaatcattaagttgaggaacaggaagagaatagtgggtgtgaaccagctgttgattgaagcccagattgtgggtatggaagaaacagagtcttcaaacatggctactactgttgaatggagaagaagaagagttagagagagaaggggaaaagagggttttgacgaagaagaagggaaatcaagaaaatgggttacttcattttcatggagaaagatgaacgaagaagaagaaagagaaagaattggtttggtttgatggactaatggatatttggatgttttatgagaatataattttatatatatatatatataaaagttttataatattgatacactactatttctttagctattatttaagaaattaaaaaaaaaaaaaattgtttaaactatattttccgcatgctctttcaaaattttacaaggtattttaaacgcagatgattataaaaaaaattagagtaaaattttttcttagatatcgaaataaattaaagtctatcggttgattattttaagaggtggattgtaaaaatacttatatatttataaataaaaattaaatttaatttagtttataaatattgaagagaaaaattagtaggagcatcatttttagttgaatattgttatttggtattatcggtacttaacaccacttatagctgacgcgattaactatattttgtaaaatttatgtcaattgtctaagcaaccgtttaatcattttatttgtcaagtgtgataaaatttgatagaataaccattttacaacaatataaatagctcggaaactattttacagcaataacaagtatgttataatttaggggtaaaaattataaatagcctaaattatatgggattcgatatgtaaatgtaccaatagtaatataacatgttggaggatattatgttagaattttttatcactcataaccgtgtagtccaatctgttaaataccactaataacttttagcatttctcattatagtcatattagatattctggttgttttttagagggtaaataccattttggaccctgtgttttgcaaaagttacaaattggaccctgtgttttgttaaatgacaaaatggaccctttattttctaaaatagtaaaaataggaccctgagcttaatttttgataactttttttttaatacaaccaacttgaagacaatgcttaatacgaacagataca

SEQ ID NO: 377930 - DNA, 9604 bp, Cannabis indica
gtggaggtaggtatgcacatatccattttgatattaaggtatgtgcaacttacaaacactttaaagtctgaaaggaaatggagcatttggattctaacaaatggttgagcattatacctgaatattcacaacctcaacctcgtgtttcctttttccctttctcactccaacatcccatctcatatttcgtttcattctaaggtatccgagcgtgatgaagattgtagtatttgcttccatgctgacagaactctaaattttagtagtatactaagttgggcaagaaccatacaactgtaactgtaagctctgtggcagtggtgattaaacatgaagaaattgttatgagcagcatatgaagaggaaactaattgcagaagatgtggttttatgagagagtttcttcttctgtgacatgtgtgattaatgataatctatttataaaacgattgcagagaaaagttgtcaactttcacattataaatgaatggagaaccagcacactattatgatgacaagaaaatctttgcagtttccactctaaaataagtaaataaatattaatataaatgaaatctagtactgttctatgttgaatatgcaatactattatgaagagtagaccctcccctctgccttcttggttggggctgaacagctatgtattatgaaatgttcatattatatattaatgctttggttatgaaacactttttaaatatttaacacgcctattatttaaatcatcagaacatctgtttatttaacgcctagtgtaaattatctcttattgtgttgtattttttttttcttttccttttcaatttctctctaatacagggactagagaagtatgtcatgacaaagttatttcctcgtgtatttgcttcactgccagatgatgtagaacacgataaacaattatctgagaagatggctctaattcagcaattcattcgaccagaaaatttggatatcaagccaaattttcaaaatgagacatcgtggctggtgagtttaataaaaaagaaatcatttcaaagtatatttctgcttgtttggagagttatctttcatgtattagtagcatgctcagattgcacacaaaagctgtacaaatgaatacttaaaaggattttggaagttcattatggagtgacctggattcaaatttatggtactgctctaaaatcaaatcacctcttaaaaccatgccttccaaaaatttatcgcctttttcaagtttgttatgttgtaggctagtatggataggcatcattgttcagtgattaggtgctggagaactaaagacacaagtccttgctttaatttatccaaatacctggaggagtatctgaataattccattctgttattctgagaaagtaaactttttctattattttgttgccttttctttaacctttgcttgatagctatttcaagtttcatttccacttgaaagaagttatttttttctttttttggcattgggagaaagagagactgaaattgcatgtgcgagaatagaagtagattgaaattttagtaaataataaacagtgcatatgcataagtatgctatatataattaggtagtcttcttctgccgtgtatatatatatttatatggttgtaacttgtaagtaaggagtttgagagaatgaatgtgatagaataatcttagagtagaaatattctatcgccaattcccaaaataaacatcagtaaggaattcctcaagtgatctttattctgaaaaacagtcacgaagttacaatatcgagctttcgagaggctcgtctctctaaattcactacctttcgagaggtttggtctctccacaaagagtctactcttatctaattccaagctaatcttaatgaggttgctccctctctttttgtaagcattggtcttaaaaagacttaggccacctagcattactattggaccaatataattaaaacactaagacaactcggcctacatataagagactacgtatttcatttaatcattttgtaatatacaagatatgtcttatcttatccatacctccttaataaccttcacattgtcctcaaggtgaaaatttaaaaaatgttctttaatggttgagatatcgttccgttaagctctaaaatccaggagagagtgccacttgatcaacacttcgtatactactgctaaacttggtgatgggtgaaattgtaggaccgcttcaggttcaacttggtgctccatatgagctgtaaattgtggtagaataatggctgaagaatgagctttcacatatgggacgacgaagttgggagatatgaaaaatggaggactgtcttggaagttgtaacacgctgattaaaaaatgtcgggatgtaatgtaatgggttgctcatgggagcattggggaggaggtccctgcagttgttcaatggaccctgcgattgttcaaaaattgcttgatgtttcagcaacattgtttgaaggaaagccggaagttcttctcttggtatatcttcttgacccacaagattgagttccactagaactccattctttgctgccataatgctcttgtacatggttgtgagagagaccgaggtcctttcgttgtgggatctcctttggtaaatactcgatgatttcccatttgaaattccttggtttggagcttccaattggtatgaggcattcccaatgtgaagttcctatctccacctccaacgagatattatccaaagggccaacaacctgatgaaattctccttgtattcctctttttccttgctgccagcagctttgctcacttctttcctgggttcttggatgtttcttgggaaatttccatcgcttcatctgcattttttggatgttgtaactaacttctggcgctatgttgtctaatggagcttagagccagataatttattaattatatattcagttacagaaccctcttgcttgactggcagaaattggtcatgaagggaccccatttgagtgtttttgaaatgcttcagcaccagtttcttcatctcttcccaacttaacatggctcggcttttgataccatagtagagcatcacctgaaaaatgaaatgatagctgcctcagtcttgtccttgtcgtatccatgacaagagaaaaatctttctgcttgtagtatccattcgtccggattctctccatcaaaattcaggatcctcaacttcttgagccgactttcatattggaatcgcgagtcttgctggttcctatcaaaaatcctcactccaagctccgattcaggtggaaaccagccataggagtgatacccgtggtcgctgatcactgttccagcagtgacgcactgtgttggggcaccatggggctcttcagacccttgctttcctccttttctgtgttgccagcagctccattaacatcttccttgaattcttggacaatttcttgatttttcttgaacttccaataaagtcttgaattgttgctttaacatttcttgaagagatttttgtaattatttgatgtattttccgcgttatctcttgtattgaatcatgaagagatcctctcattccagaaactgcaacttccagagcttcacaatcttcctccaaaaccatggaagaataaccgttttctgcttgtttcttgggcaccatgtctgcagcttaccgcaccgatttgattgaataatctattggtatatgtgtgtgagtgtaaagcatccccattggagatgctttaagactaagtatttcatttaataattttgtgatacacaatataagtcttaggcttatcagaatgtcaagaatataccttcttcaaaatgtgaaattcatttgtagatacaaaatgctggcttatatgatttttattgactcatttttgtagtttctaattcttggcaactgtttaacaaattgtaaagaaagagctattagcagatccatcctaggcattaatgtttgtggagatgaaagttgagcatagttcttgtttctctgaatctttattataaaaaacataatatcgtttgattttggtagtcttgattactcaaagggttattcttcaatgtcactatcttaatttctccaataatttaactttttcttgattactcaaagggttattcttcaatgtcactatcctaatttctccaataagttaactttgttttgtcagtctcttccctatccctttcctgtttttcctcttaagttcttacttgagaatcataatgctagtttttctctcttgtgaacttggttaacttgtctttgaaattcctgttgaagttttatgcctacccttttacttcatttatgcagcttgcacagaaagaactacagaagatcaatatgtataaggcaccaagagacaagcttgtgtgtatccttaattgctgcaaggttattagtaacttgttgcttaatgcttccattgcttcgaatgagaatacccctggagctgatgagttccttccagttctaatttatgtcactataaaggtatatgtgtgtgtgtgtgtaagtgacaacattctaatattcttgcgtattatttctacccattataaccaaattgattttcttacatggtaagcaggccaatcctccacagctgcactcgaacttgttgtacatacagaggtataggcatcagtcgcgattagtgggtgaagcatcctattatttcacaaacatgctatctgttgaatctttcatctcaaacattgatgcaaaagccctttcaatggaagaaacggagtttgaaaagaacatggaaactgcccgagctcttcattcgggactttcagctgatttaaacaaccagtccaatcaaaatgatcaacatgtaggacatatatctccatcagagttcaaggaatcaaaacagcaatccctaaatgttagcaaggattctatactaggacccaggtcatctgaaatgagagccagagctgaaaacccttacgggaaagatcagtcgacagttacaaagatcccatccctctcagatttggagaataaaggtgcaggactgcttttgaaggaagaccaggtgaggcaagtattccagaattatccatacttgtttgccaatgctggggacctgactgtcagtgatgtggaggatctgctgaataactacaaacagcttgtttttaaatatgttaccctttcaaaagggttgggcaataccattccatctgtaccatcatttagttcactaactcaggtgcacgaggaagctgaagccacaagcaaacagggggataaaacaacggtagatcctaataatgagtcaaaaatagatactgatactaatacagatactgattcaaacggagcttcaattttcgaagtggaaagtttagaatccaaattgttacaaggtgaggcaacagcagatacagggaggtaaattgtggaaaccactcaatttatgagcatatatttatatatttgtctagtatacatgggaaaggatccatcaggagtatcagaatatgattatttctttcaccgcgtatgttagtcacctcggcatatttgaaatgttgatagaaatgagacacatgcaagagtagtctcacaggtatggaagcgtttttctctttcatctctgatcacatattgtcacaagtggttgatgagaatataacgtacgtactttgtccatttccattgttgtactttgctttccttaatccttctaccaaaaggggtgggattggattgttttgatcttaaacccattcttcctcttttgttgatctgctaagactacttgtgttacttgtacttgctttttttgtagtattaaaagactaggctagactacactatttaccagcacttcctttgttcttagtcttggaggtaaattgaaaaatacttcttttatttgtcaattaactaaatctacttataatttatagttaattgaaacatatctctttttatatgttatgtacccaaaatgttctaacatagtatattaaagtgacaggaataaaattggtaaagtgtttaaaaaaaagagttaaaaatgatagattttaaaaagacgtaaaaataagagaacaatataaaaaaagtatagagtttaatttcctctatcaattgtgtaacttcaaggcagaccttaacgattatcatattgatattgacagagcgactacaataggggtgttatttttgttcctgctggtagcgttgttctgttttcagcatttgttttttgataatgtagagggattatattatattatcatattagtgcaagtttgatatcataactaaaaaaatattttttatttttaaaaatagaaagttgtcttttgaaaataattaggcatgtattgtttggccttattttttgaaaatagtttttagaaaataaagttacaaaaaacaagaatttcgaaaacaacaaaatattgtttactgtttgaaaaaataattcatttttggtcaatattatttttagaaaacactaactaaatgtgccttgtgtttgaaaatttcaaaaattagtttttgttctcatttgtaaaaacgcttttttaaaataaaaataaaaaacaataccaaacatgctctatatttttgcactgattatataaaaatttaaattttataatttcatttctttatgtttattgaagtttttacatttcaaagaagacttttagtatgagctgaatatatagtgtcaacaatatggctctgaaactccacctaaaaaaaaaaaaaaaggctaatgaaatgcccaagaaaattgaacaaagaaatcgaagtggtgagagaacaactccaaaatatcttgagatgagatttgactaccaaatatttatatttaatatcattatctcatcctcccagtccccacgctcgatgttttgtcgatctcaatgaaaaagaattgtatacataatgcatcctcaaaagttgaaactagctgaaattgaataatcaataataatgagagagatttgtagaatggaattgtatggtgtaataattgtctaaatatacatatatgagattgatattgttggtagtagaggagtgacccttttctctttgtcactttcttaacgtatcttatacgattaggcttacattctcctcaaagtccagaataataatattgaacaactaataaaatacttatatatgtatatacatataactcaacttcattaattgtggtctttaattttccaaaccaaccaacaaaagattctgaatatcaaaataggacaaccagcaagcaagcaatgaaaaacaaagaagtttccttgatcgaatttgaatattcaacttccacacgaacacaataatatatacatatatatagatatatttaattttgatgatgaatgactcgagtatttgttctatatagaatacccttttgacatatggctcaagtctatgactataggaaattctttcagaatctacaaagacttgtctggatctttttgtttatttttttactgttttttgtgtttggtaactttcctaacaaaacaccaaagaaaattttactctaacttaaggtttgaaaaaatcatttaaaataaaataacttaaagttgatttattactaatctcatggtgtaaaagtgatagtaaaattgttgatattagtttctaactttatgtgacttgtccctcatttgcataaagaagattatttaattaacaattatcttctctatctcttgtgcacacaatatttacaaactatatcatacatgcaacagacagcaaagacataagttgaacaagctttcatgtacttaaattatttcttaacttttggtacatcttctttgattgtttctttgttttggttttttttgtcaaagatttataatataaaatgcatgagcacatgcaaggagacaaaaggtcacagctcagacatattaggatgttgttggtttgcaaagagaatatattaatttccattgtatttggtcctatttactcagtcctttccaactttggcaccttctcttttacgaatacatacatatctacttccacagtactgcacattttcaatttttaaatcatatcataaataaatataatttcttctaaaaagatatatatttttaactaaatccactagaaaattcatgtatgtttagttttttttttataaaaaaggacatcgtagtattttgttaattatcaaattttcacttttttcaattaatttttagatgataagtactttaatttttgaagattaatttagggtccatatgctaagataaagattacatagtaatatcggttaacgaagtccatatgaaatttgattatgaaatcatgttagttaaaccaattctttatacttgaaatatatatatttagtgttattgagactgggctagattgaataattttactaattcagtgtttacccatgctagaggattaataactagttcacttaattacatttgtgggagactattatcccatttagtagttcgggaaaaataatctcagtaccactttgtacctcaggtcattagagctataaatatctctttttgataagtgagagcgggttgaaaaatcattcttataacttgactttgagagcaatagaaaatttatcattctctttccattttgagatagcaatttgcattcattattttttttatcttttttattcttagatttgagcttaaaacataatttaatttttcggcgaataagttagttgacaagttctcaccgtcaacctcttttattggttagacaataatttacatttatatatatcatggtaattaagaatcagccaaccaacaaacaaactactaactgtcaagtatcaaacagttagttaagacgtaactaactctaattgtatttttgtcctaatttattatcatagtagagattctattgctttcccttaatatttatgatttttgacacacttttgacacatttggaagaaataaatacaaagctcaatcttaactaatgggaaatgttaaggggggaagcacaaccggaggtgttataatgttattagtgcattttaatattgtgttccacatatttttatttaataaataatataaaaaaccactaattagctaaacggcaccacattaatatggggttagacattttaaagtgtcaaataataatactctaattaatatataactccaataaatcaatgggtaattttataaaaggacatgtttttaataattgtctatgttgtactatttttaaaatatatattttttaaaaaaatttaaataatttacggtgtaaaaggtaaagtgtaatatttttattatatttatgaattttttatacgcatagtaaataattatttaagccttatttaaattattcaaaatttttgaaataaaaattactagtcaattgtgaaaaaaaaaaaaaactagtaacaaaacactcttttagctgtcaaaacagaatgtaccaaaacaggtctttaggaagtgtactatgattttttttcctaaaaattacctaccaaatacttcactaacaatacaagtaagata

SEQ ID NO: 377931 - DNA, 1414 bp, Cannabis indica
aatcaaaaaaaaattaattcataaaagtgtacattctttaacctgtcaactattttatttgaaatttggagttgagaaaaccaacctacaaaataaagtaaaaaaataaaatagataagcagattttcagctttgtaacaacatagtcgatttcttcatattcatttatttatatttattttaatgattgagatctttttaagtcacataccaattatataccaattattagggtgatctatatataagtttatgctatgctaagacacgtttgattttctatatcctagtttgcctaactccaattctaggatacctatccaacttttttttacacactttcattgctttggtgtcaaaacttcatcaatcgctttatcttatgtagcgtttatgcatgtacatttgtaccaaacaagagcttgtagcagtccccttcctataacatattcacccaagagaccagtttttggccatggtttacatcaaaaaataaataataaaaaaaaaatatatactcaaaactttagtacctctagtttaactttttaattgcttaattatcaatttcttaacctgtctggtgagtcagagaaccgatgtaccactcttgtaaagttctttttttctttctttttcttttttgtgctggatgatgccattgcagcaattttcaaacttacgtttctgggtgtcttattttgaacgttttcttcaactttagggtaaagaccaggtatgtgttttttatgtttaaattgatataatcaaaaacaaaaacaaaaaatcaaacccttaaaaaaaaaaaagaacaagcctgcaactgttgcctcagtccagaatttcaatgacgaaaagctagttttcactgcagattgatagaacattttccaggcgtttggccaacatggcaatgctttttctcactatgaaattattattgttcgggtatccaaaaacatgcaccattttcattgggattgataataatttactggtcatgctgactgactgtttatttttccccctattttctccatcttcagtgatcttttcagttaaatttcaacccttttgtccttttgcatggatttaactaataacttaaagttctgacacaccaaaccacctaaaaaggtcttcatactctagatcctctcctatcctaccagtagttggggcctgagcattcattactgcaatattactattcaacaagctgttgtacaagtaaaactaagcaaggacgggtgaattgaaattggtgacattgtcagcactaggaatggaactagtcactaaaaacaactttaaacataaaagccaccttttatatgggatggtgatggtaattgcagcctcttcatcaagggccaagaaatataaaatgcactcatctcgcatatcctggaaa

SEQ ID NO: 377932 - DNA, 1260 bp, Cannabis indica
attaaaaccgttctcttctcataatcctgtgtttatcttccttgcttccccatggatcctttaactagtaagatgaagggagtaatcaaccttgaagatgaagaagaatcagtccttgcttttgatgaagaagaatctccaaacttggaaatcaccaatgatcactcacttctggcccgtgttctcactcggaaacaagtatacctgtccacactctagaagcaaatgaaaaccattgggatggtcgtttccatgccaaaattattgagaaagagccatctttgttcatagtctccttcggctgtgaaggggataaagaaagagtccttactcaagagccatggcatttccaaaaccatcatatagttctccataggcctaccgcactgcagaatgtaacactctcaaacctcaaattctcccctttttgggtacaagtttataggctgccttttcttagtaagactagaggtttggcaaaggccttgggtaacattattggggaattttcagaggtctatacggattctcttaacgaaggatggggaccattcttacgtattcgagtaagacttgatgttaccaaacctttgagaaggggtaggaacattcggttgcagcaaggtaaagacaaattttgggttgaatttcgttctgagagacttcccgaatggtgtagggaatgtggttgtcttggccacccttaccagaaatgttcaatttttcttgaacttttggacaatggattagatcctgaacttgcttatggtcctgaaatcaaaggggctgctcttccaacatcaggatatgatagatatcgaactgacttctccaaaggtaatgcttggccactacttactcagttggcaaggaaagttatcacaactaccataccctccttccctatccgaaaccagccacaacctaggaaactactttaaggagaatcatctaacaatcaacaacacactcataatttcccagccaaccaaatttctaatgacaatcaaactaattcaaattgttcagaagcggttaacattgacaacagtaggtctttctcatttgcaccagcagcgctgacatctgcttcattagtccctagaaacttgcatttgccactgatgtcaaaaactaatgattgttcgggtctgtaccagcaccagatggcttcagcatctgctagtttttctgcaagaccaacatcggcaacaaatcgggtattacctgttgggttttatgccctaaataaaactcttt

SEQ ID NO: 377933 - DNA, 6343 bp, Cannabis indica
tatggacacataggatttatatggaatgaaaaccaacattaaactcaagaaacaagaaacaaacaagacaaagccaacatggtcgaaaaaaatctttgcatggtctgtaggcgcccatgtgtgcataggggcgtggcatcccccgactccacaagaaatggaaaattgaggcttgcatgggcacataggatttgtttggatgaaaaccaaaagttaaactcaagaaaactagaaaaaaaaaacaaaacaaagccaaacatggtcaaaaaagatacttttgcatggaccattggcgctcatgtgtgcatagggtcgtggcatccatttgagtggattgtggcttggctgtcagcatgttggttctagttaataagtctttgatatatttttgttgagtgagatagactatattgttgtctttttggacttaaaaacccagaaaataactgacagggtcgagttgtttgagagcaaacttatcggaaacttatttaacaaggtgtgcagtagtactacatttataatgctctactttcatccttctaataaaaattatttttcgtataacattattattagtgccattttcatacacataacatttttaattattctatcttatatgttttcttgggagaagtttgcatagcaactttttttttttgtatgttcaagaaggaatatacgatgagcttgtaaagaagtttttcaatttttttttttcagaatacatacagaggataacatagcttacttttagaatgggagatggtcttataaattataatttataatgaagcttcaaactcaaaaagagtgaaattctaacctaacacaataaatatcccaaatgtgctaaacttttagagataatatttattagtaccgcctaatgctactccaccaaaaagagttgcattcaatatccattataaaatcgtgtgacttccttctctctctctctctctctccatcggtaggagaaagaaggaatttcagaagcttgagattcagaccttagggtttgtggagctggagttgaagccgccggagcaagtgaaggagccctttcgatccaactgaacgtcgaggtgttgagtaaaatagaggagtttcaagattcacattctgatttgggagtcgaccaggggttgctgatcgatccagatgcaaagcctggtttcaaatcttgggcagaggaggctgaggttactgatttccaaacttcagcaaaggagacatggagtaatttcaaggctaatcaggtaaggactccctcgaccaaacttgaatttactgaacccctaaaaccgggtgaccgtttaattgcataaattgatatggatgaagttgaatctgaggcttttcactagaaaagctcagttgtttgtgtggttcttggggcgaatcttccatttcaagtatttgaaggtttttccaaatggatatggagaaacttgggaattgatcaaatagtgagaatgcattcaagctttactctagttagtttcagagacgaagctactagggacattattttagagacaggggttgtgcactttgataagaaactggtagtcattagaccggtcgactgatattgattcgatgaacgtagtgaaatctgtacctgtttggatccgcctcaatggcctcactttgtaatattgggggaaaacaccttaactgctcttgtaagtaccattagtaatcccattatgattgaaaaattgctagggacaggtcgatgattcgatttgctagggtccttgtggatatgcctataactgagaagcctcctaatagcgtcagttttgtgaatgaaaagaaccaactcatggagcagttagtcaaatttgaatggctgccaatttcatgtgctacctccagcttattaggtcacaatatcagttcctgtgctaaagagaaagggtatgtgtggatcaagaaaaacaaactagaccaagttaagaaaaatttgtagaaaagaaaaatgatgaacaacatgatcaagcaactactgatgtggttgctgatgaagctttggtgaatcagatttttcctgaggagaaaggggagacatttagttatgtggatactgctagaaccaatctggaaatgcaagctcatgttcaagatgaccaatggattatacctcgcaggaatagcatgaaaccacaacctgatatacctaataaggatattttacagcctttgttaatgcctttgaggctcttcttgagccattgaatctgactactcctcccccttgactgatggagtggtgtaacatcctttgttgcaacgttagaggcatgaataaagtcaataagcaagtttctattttagatatttgccggttgaataaaatcaggatagctttgcttttagaaactaaggttcgtagtgataaaattgaaaagatgataaataataatttccttgactggagttattacactagtattattgttgagggtaggctgcttgttctctggcaaaagcagttcatccatgtggaagttttggaagatgatgagtcatttgttcattgtaaaataaaggtagtgggcttgaattctatatttattcttactgctgtgtatggtttgaatatttttggtgaaaggagatcattatgggactctctaagtgggtttaggcatttaaagatttcttggttgatcttgggaaattttaatgctatgttcaatatggaggacagagttggggtaaagcagtggctcattcagaagttgtggatgctcaaaattggctctcttgggaacaggttgatgccttaaaatgcactggctccaattttacttggtctaacaaacatgacagggtgataggaatttttctaaacttgatagagtcttcaagaatgaaagttggttcaatctcttccccaacttcgagggagtttatagttgggacacttgctcagaccacaactattatgttatcaagaagttggaaataagcaaaatgggttgtaaattgttgcaacttttggatggattaccctagcttcaaagatactgtgatggccaactagagtaaaagaatgatgggcaaagaccttagcaaaatcatgggcaaactcagcagtctgaaacactgtcttaagggctttagcatggaggaatttggcgatattacccagatctatcaattagccaaagatgattacaatactgcctagatgcatcttgctagtaatcctacagatatcaccttgcatgttgagaacaatcctctaaggagcaatttgaaacagtccataaaagatatgccaaccatatgcaacaacttagtaaaatcaattggctttgttatggtgatgacaactccaagttctttcatgctagtttaaagaaaagaaaggattttaatagcataaccacctatatggctgatggtgtggttatcgatgactatgatagtgtcattaaccactattttgaacattttaggaatttcatgggggctgaaagttcggcttcaagtaggcttaatgaagaatgtttagatcatggacacaagttgtctttatagcaacaaatccaaatcactagacccttttcaaaaaaaaaagaagtagaggatgccatgctcaacattaaccaacttaaaagtcttggaccagacgattttggtgctagctttttcaaggggctttggtttgaaatatgagatgaaatttttgatgcaatcctttccttttttgagacaaggttgattctaaaggatctaaacagaaccaccatatctttgattcccaaatcaaacaacctacttcagcggtgtactacaggcttattgcttgttgcaacactgtctataaatgcatttccaagctgttgtgttatagattgagtgaggtcttacctctcttgtccacaacaatcaaggagcgtttattaagaaaagattgcttgctcataatattcttattttttaggatttgttcaaaggctacaccaggaaaaatttatcgtcttgttacttgatgatgattgatcttagcaaggcttatgatatggttgattggaaattcatctcagacttacttaatggcttgtgtttcccaaccaagttcattaagtggatcttggtttgcctttgtggtacctcatatactcagatgatgaatggaagattgcatggttcatttcaaggaaaaaaaggtcttcgtcaaggagatcccatacccccctcctttttgtgcctgttatggaatacctcaccgattattatctcttacttcaagatctaatggcttcaagtatcacccaatgtgtaagcaattgaaactcatcaatctctgttttgctgatgatatggttattttttacaagggtaatgtcttctcttaccataattaatgaaacttttgcgaaattctgtaatgccacggctactaacaaatgaaaatcctccatttattttgggggaatttcgactgaaatcaaaaggtctgctggacattgttgatatggaagaggaatctttccgtttgaagtatctcgggattaaactacgtccaaccaaatggaactatgctaattgtgctggcataattgaaaaagttcaaaaaaaccttcatggttggagtagtagacacctctcttttgcaggtagagctcagcttgttcattctgttttgttgagaatcaagaattattggatgatcctattcattctccccaaaaagtcacaaaagaagtcaacaagctttgtagagactttctttggggtacatctggcagccgaagtaaattacactttacttgatgggagaaagtttgtctaccaaaaaaatttggaggcattgggttctaaggagggaagaagtggcatatagctctaatggtcaaatacatttgggccatttccatgaaacaagaaaatctttgggttcaatgggttaatgcaatttatatgaagaatgaagatttttggacttacaacccgggacagaatacaagctggtacttttgcaaacttgttaatctgcgtgataagattaataggcaggctatgattgaagcagggaagactggtactttaaagtcaaacacttttatcaatctctcttaacagaaccgaagatctcttttcacaaagagatttgacacaaactcaaagtcccaaagcatagatttattgtgtggcaggttgtgcactccaacttgctaactcgagatcttttggccagattcatccatcttgattctcttttatatcctgtcttcgaatttgatcttgagttccatggtcacctcttctttgcttgccctttcactaagaaagttatcctagaggtcactaagtggttggctcagcttgattaattggctgtctgatcttaaggaatggctgattgggttgaaagggagaaggaatagcttggttattgatatcaagtcagcagtagtagttgcggttacctacatggtttgatgtaataggaataattgtgcttttgaaggtttctgcgaaccaactgcagtccttagcaagaggatcaacttgagcattaaagttaaagtgatttatcttaaccatgctaagcttaaaaacaaagaaaaagatgtaatcaacttgacaaacaatttttaagttgtttgttgggtttgttctccctttgagttttgtatttttttaagtggttggtggaataaaattaatttctcttgttccaaaaaaaaaagagaaattttttaattagtattgtactaccaaacgataataaaaaagaaaatcacttaaacaatgaaataagaagattggacttaaatattatgaactatcacctaatggaagatcatttgttgacgcaaagttcaataatggtcttgcctagagtaacccctcatttgaatttggtacttgaccaactttagaacatcgcagctctaatgagtcatgaaattaagcttttgcagtgagaatgtaaaatagaatgtataggaagaaaaagtgggtttggtaacgaaagaatagagatttggtggttaagagagtgagatttttttttttggataaaacagaggggtgtaacatgtgaggaaaaaaattgtattctttatgctacactccaccaaataatgtgtacacttaatattacactcaataattgttaagaatttaaggaatgcattgatgtctgattttagggtgtctattatagaatttcccaatataacataccttgcttgaggggacttttatttgcaccccactaaatacatcccattattagaaaaaatatacttaaataatttttaaaaattactctagatattttttaaaaaaaaattctcacattatttat

SEQ ID NO: 377934 - DNA, 4782 bp, Cannabis indica
aaatgtaaagagtcaataactgtagaattgtaatcataacattcagacagaccatcactagttattgaggtgctagaacaacatctatgtacatatatatatgaatcaaacatccaatatttggggaatcacagtatgaaaattaggtatcatgtgattatgttttgtgtattgcaaccaagaaaaataatttcacaaacaatggggaaagcaaaatcggtgggataattataatcactgaaaggtaaacagacataattacacagtttgcatcctgacttctcatatataattcacgattataaaacacacacatatatatgtataaatattaactttctatttaatttattcttgagagtttatcttgatataacttcaacagccaagaagtcaattgcataagtattccagttatttcttccactttctcaacaaccaaacagagcatgaaatcaccgattaaatactcctataacataattgaaaacaactaactgaatataaataaattattctcgatgatcagattttaaaagacacacttgcaagcagattatgctctttagggtagctaagaaaaagtgcaaagtaagtgaaagaatcaatttttcttttttaaacataaccctaataattaaatcttcaaacattgcaatcaacttaccccaaaacaaataattttcgtttaattcaacctttctcactccataataccacatctagaaaatacataactaataaaattttctatttttttcttcctccgtttttctcggaaaccaaacatgggtcgagaaaatctaacaaaaaaaaaagagcaaacccaatactctttctgcaaattaataatgatccataagcagaaatcgaaaaactatcaagtaaattttacaaccaagagaaagatattcaagacattcaaaacaaagttgataaaaaaaatcaaaaatcaaaattgaaatgcagagagagaaataaaatagtctttttcactaacctttttcgattcagagagaacggtcgtttcagagattcatcactttgagatgattattgttattgttgtggttgtgtttgtgtgtgcctttttctgtttggttttgtttacaaaaaaaaaaatcaaaaagttaaataaataaaattttctgtgtgcacaatttatatatatttaagttttttaacttataattttttggtgttgcttaaatgaaaaaatttgacaatttaaaaaaaaaaaaaaaaaaaaaaaaaaaaaaaaaccttaataaattttttgttttataaaattaatttgggtatttatttaaatggacaaaaaattgagcttaataaacaacgaatatggtatggtttgtatgcgaagttgccaactgcccaagaatagcttgttgaggtggaaaattaaccgactacatctttgggtagacagggtgaggtgaggtgagggtgtggattacgcatacctcttttttgaattactcataataattttatctaatagttttctaaatatttataggtagttcttagtaacactaccactcactttttttatcttcacatcctctaattaactaattctttctaattatataaccattcaatataatttttaaaatttactttcaacgcaaaattaagttgaatagagcatgactttaatttcccgtaacgaatccaataaaatcgagtttaataaaacacataactttttttgttccattaaaaaaaatcaaatttcgtattgaacatgtaaccaaaaccaaacacaacttgtttcattaaactcggttttattggattcgccacgagaaactaaggtcatgctctattcaagtaagttttgaagcaagggcaagggtttccattatatgttattacctgaaatattcttttaatggaaatatttccaaagtttctacagatttcgagattaaggatgtagtcttctgtttatatcctcttaaggccccgaggcctgacgaattctcagtgtgtttctttcgcaagtattgggacgttgtgggagctagtttgtgtgctattgtcaaagatttcttctcaagtggagtgttagaccctaatctcaataacacctttatttgtcttatcccaaaagtggaatttccccattgtgtggatcatttccggctgataagtctatgcaatttttcgtataaagtcattgcaaagattttatcgaataggctaagaccactcatgaatgatctggtttcccctttccagtctgcgttcattcctggtcgatggatagccgagtcctctatactcactcaagaaatcattcataagattcgtcagaagaaaggctatgggggtcttatggctttaaagctcgatatgcacaaggcctacgacaagatggaatggagttttttggataaagttctttgtgcaaatggcttcaatgatagaagccgaaagcttttgatggcttgtgtgacaagtgtatcgtatgcggttcttttgaatggttgtcccctcaaaaagttgactcctcagcgtggcctacgacaaggagaccctctctcctcgtttttatttctcctttgtcaagaggttttatcgaaactcataactaaggcggatgtacaaggtttggttcatggtatcaagatagctcagtcagcaatcccagtgtctcacctcatgtttgcagatgacactatccttttttcccgtgccaaaatgaatgaagctaaaaagttgatggaatgcctctcaacttatgaaaaatggtcagggcaatcttgtagcaaatcgaaatctagtgccttttttcgaagaacctgtgtagtggaaggaaaagcaacattttgggtattctcaatattgatcaagcatgtgatacagagaggcatttgggcaatccattcgttttcaaaataaggaaaaatgaagactacttgaggctaaaggaaagtatgctgaaaaaactagaagggtggaagatgaaacttatttcttatgtcgggcatttaacctttatcaagtctttgacttcggccatgccaatctatgctatgtccacatctaagattcctttggctagttgtcgaaagcttgatgcattaatgagaaagtactggtggtcaggaaatgtggatcgaaatagatatttcgctctcaaggcctgggataggatttgctaaccaaaagtttctggaggattatgtttaagaagatgtgaagacatgaacaaagcattgttaaccaagctggcatggagtttggcaaccaaagaacagaaaccatgggtctcttgcttgctgaataaatactgcaagttcgagagcttctgaagtgtgagaagtaagagtagtgattcattccaatggaagtgtattttggatacaagaacaatgatcctcaaaggctcgatctcagttgctgcttcgagggattcaataaatttctggcaacatccatggattccttggttggagtatcaagaatttatggctttaatgaatggcatgaggaacagagggtacacaatcaaatctttggcggatatttccacaggaaatgaatggaatgaggagctggtcttacaagtttttggtattgatttgggaaattgtatcctctccattccaaggataccaattccatttcaagaccaggtttattggaaaaacacccagaacgggcagttttctatgaaggcagcctataatgttgaacaatcttggagatttgacccaacaaaagatatttgaaagtggatttgggatgctggaattcatcctaggttttcagtgttattttggagaattttgaatgatgcaattcctaccaagaacagattacacttttgacaaagtgtgtaatctgtgtgatgctgaggaggaaagtcatttgcacttgttttgtagatgcagtttttctaaatccatatggtttggaggaagtaaaccattagaattggtgatatcacaggagactctttgatatgtttgttggaaaatctggtttcatctttttcagcaatatcaacaagtgacggtaggactgggttactcaactacatcggctgcgttttctctgttatttggcaacaaaggaatgctttctacatcaacaatatccctgctaatccttttttggccttggcaaaggctgaaaaagattttttggaactacagaatatgtcttggtctaataggggaggacatctcgggggtaatcaggccatggaaagctcaatgaatgaggcgatagtactacctagagacatactggttcgtcatgttttcttcactgatgcttcatgggtgagaggggaagctggcattgcagcaatatccgttgatactagctctagatgctggtttgtcaactcccaaagacaacaatcgcagtcagcattggaaggtgaattcagagcaattctccttgctctgtcctgggcagttgatctaggatggcgagaggtgcttattctatcagattcaaaagtggcagttcaagctttgtcttcgtcaaagggttgtcttgattggaaggtgtctagtgtgttttaatctacagttaatatttctaagagttttctagtttgtaatttatgctttattaatcgtagtcttaactctttggcggatggtatagctaaaaaaactagagttgctagcgattcggctgttttgtatcaaggggaaggcaatccctctgtgattcccatcaactttatcttttaatgaacaagctgttctttaaaaaaaaaaaaaaaagaacttatagtaaaaaggtccaata

SEQ ID NO: 377935 - DNA, 4388 bp, Cannabis indica
agtagagagagagagagagagagagagagcaaaaaatggcattttagaaaagtgagagacttttctgtacgtaatgagagagaaaaatatagtacgtgaaggaatggaaatggcctttttaaccttaaaggtcttttgcggactccacgtggcaaacaaatacctcttcacaatagttctggtaagtactcccaaccacactggatcacaatctccatctaataacatcagtaacgaaattaccaaaaaggacataacttgatgatcctctgtttgcagccctacggtcctagcatgctcccgactctgagcctcaatggcgacttgatcctcgccgaacgggtctcgacccggttgggatcggtggatcgcggtgatatcgtgctggtgagatcacctcttcacccaactgttgtggtcaccaaacggttgattggattggaaggtgactctgtttcgtatgtggttgagcctggaaaaagtgatcggacggacaccactgtggtatgagtgttgaatcaaatttagatttcttttagttttaagctattgggttttgatttttgagtataatgtaaagagaatgtgttttgattttgatgaaattttttgatattttttgatgttttttgtttgtgtcttccaagtgtttgatgttatgcctcttttaaatttaacttgttgttttgtaatattttttgagtttttgaataatgggaatgatttgaatttgtgattagctttgttgtgtttgattttggagtttagaaatgtataaataggatttttgactccaaactattgacactacttgatcgtactctcgaaattttcatgttttcttaaatttgttcgagaggcatgatttggtatttggtaatagttcggaacacaactcaggatagttcgggaggcaaaaatcttatttattggttaaaaattactgaaaagaatactatttgatttagtttattgtttctgtctttttctaaggttccaaagggacatgtttgggtagagggagacaatatatatgcttcaagggattcaagaaattttgggccagtcccttatggtctccttgaaggaaaattcatctggagggtatatttcttctttcttctcttaactgtttacttttaatatggttttaacaaaggtacaatactctgaaaaaagtcatctttgtcttgatttttctcccaattttgttttcttgtacaatagatatggcctcccaaagattttgggtcacttggaccaaacaaaacagagccaatctcagataaggtatcaagaacatatacattttttttaatactaattcatagcaaactatgctaataagttttcataaattcaggatctgtcttcaactgaagccatttaaacaatcacagatcttccttccttggtcattgtacagaggatgatcaattcaatcaaagttacagcaaaagcttgcgaagttcggctatcgccaccatttgtttcgagttgtttttcaattgggttttagattgcaactccctttcacttctttcttgacagttttattatgttttggtacattggtttgaggcaagagattgttctggcttaccaaacaaaaaatgtcaagcttcattattaatgaaattgaaaattctgctaaatattgttgtccaataaatgaaaaggattcacatactatgtttctattctctcattgctaaacagaaacatttttataaagttagaagatttatcattgtgcaagttattatatgtacatggacaaaatgttaaaaaaggaaccatggcattggcaaccttacggctcgactccaagtgcccgttaaggatttgtgtgtgactcggtagcagcagccgcctccttctttgatctcatcataattgtccaagttcctcaagctgtgatctcaccaaatccagtgcccacaatccacatatgcagatcttggccatatatatccttatatcaatttttggggcagaaaaaaagaagagaacttgatttgcatagagatgaacttgatttgcatagagatgttaagttatataggacttgctcttgatatctgcagatcaaaaccaaagagtaaatgttcaaatttcagcaaaaatgtctttcttttataaacacaagatatctctattgtccgatcctgttttcggttaggtcttcttttttttttgacctaagcaagacactactttataatgaagttccgtttttgctaatgtctttcagtttacggtaaatactattttaaaccctgtgttttgcaaaagttaccaattaggctttctgttttgttaaatgataaaatagaccctgtattttctaaaattatacaaataagatcctgaatcgattttttgtcaaaataaaacttaataataatctgaactaaagatgttatgacaaaattggttacattttctatatttgttcgtgttagacattgtcttaaagttggttatattaaaaaataatttttttaaaaaaaattgaagtcatggtcttatttttaccattttgaaaaatataagatctgttttgtcatttaacaaaacaaaaagtttaattagtaactttcgcaaaacacttggtctaaaatagtatttacccttcagtttaaatattcattagtatacaataattcggttactttgactagactaaacatcatttcgaagaaaacaaggttatttggttggaagaaattctactatctattatgacctttgtactccatattttcatcaatgagtaactggtctttgtaaaaagaaaaaaaacatttggaagaaggggtaatcggacccattatataaaaggaaaccgaacccaccttcgataatctttagactgcacgttttcttaccttggccttacccgttcgattgattattctaaagttgaaaaaataaaaacaaaggactgctaacccaatggatggttgtccttgctatataataaaaccatagccaatgttcatgcaaataatgtttataaaaaaacatgtattgggttatgagaggatgtgaatatggtatagacatgaaagaaataatgcagacctgatttctaacacttggcgcggtagtccagtgatgaggatttggtattgctgctgtagtatcgcttacgaaagttaatgtagctgattctggttgtacataagctgttattaatggcggtacttctctcatgacccataataaaaaggctgagggcattgatgaacctaaaagcacaataaaacaaattaacaaaaggagctcaatttaccacttgtcccaaagagaagaaaaatcatttcttttatttgttatcaacaaccacatttgcatctgacttagctaatcagtgcttaacaccaagtaatcattaggggtgttaataaaatgggaatttcattcagtacaaacttctagcagagaatttttaagtattaaaacaacccaaatcgaaatctcaagagaatatacatatagtactgaacttaatttcataactagtcattgttagacctcaaatatatgagtcacaagttagttagttcagcttagttcctatagggtcggttgtttcgtcagttagttagaatactgtcattgctttttagttagttgttgagtctatataaaagctagtcctatcttaaaacttacaagaatatcagtgagaatttatgtgttaaaagaaagtaaaacactttccgggagaaaccaaacagtctcgaagagtttggaacctcgtaattttctctttgatatcaatgcaatgcctatgctctaattctttcaagaagagagaagaatacgatcaactcgttaactgaatttggaggcttagttagcattacttacctacgaagtaatacacgattagaagaaatatacaaacaccatttacttcttggtcatgccagtgataaagcatctgcaattaagaaaaaaatttgagaaatgaacgtcacgagagatctattacaccgagttggatgtttgaaagaaaaatgaatgtcattacactcactatggataagaacttacaggaatatcggttaagagagccacaaaagcactagaggtgaaacatataacacaaacaacagctaagcccgcaacctgcgaacccaaagttacgttcattcagcacaattttcatgaaaggaaaagaaaaagaagataaaaacatgggaagtgctcataaaaaggttttcaattatatgccgaaaaaacaaaccttttgagcaatcttatatctggataaagttgaaaagtaaagtatgtttagcataaactcgcagctaagaaatatcatattaagaataaatggtaaaaaaaaaaggaaagaaaaaaaaaaccttccaaag

SEQ ID NO: 377936 - DNA, 6426 bp, Cannabis indica
gcctccattcttcttctcaaacctaaaccacttaaacacaccccactctctttcttcattcaaaaagcttcaatctttctcattcccaattcaaagaagctgtctttctctggtttagtcaagctggcgatcgaaaaccaagactccactgttcgtgaaatcaagcccaaaagcagaagaatcatggtatatatacatttttagttctggggttttgttaaaagtttgatctttttgtttgattgttgtgatgattttggtatgtggggttttgtgtatttttttagggtgctggaggtcctgatgatgaggacaacagatggccaccatggttgaaacctctgttaagagagagtttctttgttcaatgcaagtcacatgctgattcacacaagagtgaatgtaatatgtactgtttggattgtatgaacggagctctctgttctctctgtttagcttaccacaaagaccaccgtgctattcaggtttggtttcaaattcaatcccaatactattttttttttgatcaattttgaaatctgttgttttgcctcagaatataaaaatgtcttttttattattcatcttttcaaaagtttgattgaacaatgcccagatgaattgatcgggctctgattaaattgcaattgtgtttgctgtgttatgattgaacagataaggaggtcatcttatcatgatgtgataagggtttcagagattcagaaagtgttggatatcagtggtgttcagacctacattatcaacagtgctagagtagtgttcttgaatgagagacctcagcctaggcctggaaaaggagtaactaatacctgtgaagtctgtgaaagaagtctcctcgactctttcagattctgctccctcggttgtaaggtaataatgccttatttctcctttttttctgtttggtttccgagaaaaataaaatattctcagatttctttctatcaaaatcaaaccaatcagctcagactaaatgtcgtcaatctgtttggtttaaccaaattagttgacttttccgtcgtattgcggccactaattgctggttaccaaaatgtgggacttttatctgaatcactacactttttcaatacccattttcctgcattttcccgggaaccaaacaagtccgagtctttccaataaaaatcaaaacttttattctgggtcagcctaaatttaataattttagagctttgtgttctaacaaattttggttcttttgtctttttttgaccagatcgttgggacctcaaagaatttccagaagaaaaagaagcagcaaatgacattaatggcgtctgattctgaggattcatacagcagtagcagccatggtcaacggtcaaaggttcataatcacaatcataatcatcataacaaggttgttcagagcttcacgccgtcaacaccgcctccaacttccgttaattacagaacggccaagcgaagaaagggtattccccaccgtgccccaatgggaggactaattattgaatactagaagtgtccgtaatttttagttaattgcactattgccccatatacgaacttagttttgccataataccccttcctccccaatgcccagagcttttctctacgaaggccggtattggattggagactctacccactactactactattattactagtaatgtatataagacgacgccgtttgggaaagtgcaatagaaaagtaaagttgggaaaggtaggaaataaagacaaaataccaaggactaaaaagaaaaaaaaaatatagcaagtattgaaaaaactcctttagagtttagtgtcctagttttggagaaatagagtgattatacataagttttgagtttttaatataagaaaaaaaaaatgtaaatatttggtttattctctttctctctctcttttcttttggggccttaatattttagagggattaggatgaaaaaaaaataattaatgtactccttggaaataggggaatgtctatatatggaaaaaaatgtaataaaaagatttttatagtttgtatattttgttgtatgtatatacgtatagttatatatttttataaatttccaattatagaagctttagtggcggtggggctccgttttgcggcgggtcccgcggcggccgactcgtgtgtaatgggtgtgcacgtggcgcattgtgattggttgttgaaaaggttggggtttttctcgggtcgcggaatcaaaaaaagtaggtcagccgccctccttacacgattatttttattttttctttgccttaataaaattagcgtgtcagaaaataagaaagtcggtttctttgcaagtgggttttaatttcataccaatgtgggtcccaactacattgttttccacacatttacagcccttggatcaaccgatgacgacgacgatgatgatgatgttttcctttgtccaaattcgttcatcttttttttttcttaatggcaaagaaaataccaattaaattctttgaaatataaaaatggaacataataaaggagagaacaaatttgtatcaaactttgttttacaaatacatatacataaatgttgtacattaataattttacaataatataaaaataattattctattttatacaagtacaccataagataattaagtgtataaagataaaaatatatcgatacattgtaaaaattttctttattatataaaaatcatttattagatatcttataaaattgcaaaacctacgaatgcaccataaaatttcactacaagtgtcttcttaaacaaattagaattttcaaatagtgtgaaaacatttgaagcttatatggataaagacttaataatttaattgtcattgtcacattatttattgaggataaatataaatatatttgtagcattttatagaattgtcttaccaaagttatatttagcatttcattttgagtgtttttttttgtttttgtttttatataaatgataacattagactaaaggcaaacattatgtgattgttaaaatttatttcaataaaatatataatgtgataataatataatgtaatgtatttgaagttgtggaaaagccaaaaatggccgaatacctaaatatgaaatgataaaaaattgtgaaccaagcgtgctacatgacttgtcccctatgttgagaaatatatatttaacttaatatactttattatataattaaagataatatctttaaatacacggctaaatctttataaatagtacagtatattataatcatgtgccattaggtttagttggttctggctcggcttttaaaagttatttttagattttcgaagttccaaaaactattttttttattgtttggatttcagttctaaaaaattcaattagcaaaagttaattttactaattttctcataaaaaaacttcttgagagatgttaaaaaacttaaaattagaagcgaaatccgaaccaaatcgaaccataatctaactaattcaagaccaagttgaacaagtacttgttatatcgaaaccgatcaagttctacaaagtactcatattttgataaatagagtaaactatataattaccaaatgtacttttaaacatgaaaatttaatcaaatggaagttggaaaataacctaacacattctgagtgtacaaaaaaacacacgtgaaactcaattaaaacctcataattgggttattataattagtggtgaacttaaacactaaattttgggcttgtatgttgagcactctaaggacctacattttttctttttttaattatttcaaacaaaatgctggcaattgaaattgacacctgcatttagaaaatgctatattgacacctaacttttgattttaatttttctttataccaatttgggcaaactaaagttgattaagtacatattgattctttatttttctttcccaaaattgatgtgtaacatataataagtgcctttaattttactttcctattcaaaatttttacggtgcatggactagaatctagcctttttattctttgatgacctaccttttaggtttaggtttattaggtacacaaaataattatattatatatatatacatatatctgtcataaggtatggaacctcttgttttacacgtgccttaacatattatgtccatgccattgccatatattatatatatatatatatattgaatttctcaactgtgttgctttcatatctgttcacggtttacatatttaccgaatctaataacttttgactaagattttaccttttcattttgttttttatgttttcgagtgtactacatgtgttataccctcaattatattgccaagcgttttgggttaaaaatagccacttatttattacaaattatatatatatcagttaaaatgtaaacatcaaagttacgattcatgtgaatatatagattcattttgtgtgttggtggcaatgtgaagagattcataattattgacaaaacatcaaccagtcaaagttttattttatagttttacttattaccattctgtcctttagtacttcacttagtactatttcgatttgtatactaaaaacatcacacattaatcatgtgatatataattatgatcaatgatttttttgtaaaaaaaaaaaaaaaaaatacatcagacattaaaaaataattagagaggaagaaggttaaagtaaaatgaatctaagatttaaagtgattcaggcttaactattagccataatttaagagtcaatattatattaattactagactaaatacagcatataattaataggggcatagacaaattttgttctctctgttttaaaggattactcttatcataatatatatatgtgattttaaattataatatattatcctcatgtaattgaataaaaagaaaagaaaaaaaatacattttcctatcaaatattagagtttaatgaatatacatgcatacatattttatatcgaaacattatacacatttatgtgctaattttcaatcaatcacattaattataagataggtttggctataagttaaatggaatattaatcaccaaataagtgtttttaatgttttggcacaaaataataaatgtgtcataaaatgttgcaattgtcacagcaaacctataaaacattgtattgtatttatttattttttttttttaaaaaaaagagtatatgtttatgtatgtaaaattaacagggaaagtgtatatatgtacatatattaattttatttttttcaattgaaaacatatatcactactagaaatgtcacttttgccagcatatttttgtattggcaaaagttagtattgcgctggtaaaataaaatttacttgtgctgagttggcaaaagggggttggcaaatcaatgttggtattagaacttttgccagcataaaatgaaaagcgttggcgaagatgacttttcctaacccgtaaatgcgctggtaaaagttagattttagccactacaaatgtacgctggtaaaactttgacctctttgacagttcagtttgcgaaatacgttggtaaaagttacttttaccagcgcagtagcgaactgtgctggtgaaagtaatatttcttgtagtagtgtatagatacatgccatacaaaatattaaaatatatgattatacgtaaataatacctatatacgtaccaaaactgaaactaaaagtaaccctaatatataaaaggaaactattttaaaagcttcacattgaagctttgtttattaattaaaaattaataaagaagagtctcgaatatgcatatctgttactgttacggcgaggtgttaatttaattattattatttattatatgaaatggttgaatttaatttttatttatagaatttttgggtacaataattaaaaaaattaatattccattcttaacaaggacacgttgccgtggctgatgtgtgtgtgtggcggtctttttacgtctttttagaatatatatgaactatttaattattggggaattaattaattaataaataaataaataaataataatttgttgtcagtgtgagagagggccacgtgtacaaaagattccgtgtattagtatttgtgctgagtaagcattgtgagccgttgaatacgtccaccatcactgtccacgtgtacgaaccgtagtagctatgacattcctatacacttcgtttactacctaatggtgagacatgtcgacatgttgggtcccacacaagaaatatatccaaatttgagaaattttggacacaagccacaactatatcgttgttaataaaaaaaatatgtaataaatggtttgaactttaattttggcataaaatttttaataaacactgttaatatatattttttaaaattttaaaatagttttttttt

SEQ ID NO: 377937 - DNA, 4576 bp, Cannabis indica
atgcatctcttgctatattgtgagctaaagtattgcaggttcttggaacatgataaagagatacattaggaaaggatgataaagagtctatgatcttggaaatgaattcagaggccgatgagcgatctttccatgtgtgtttaatcttcaaggtaagctggagatagtctgtctttatgagtacaattggtatcgtgattgcggagcaccatctgagagcatagaacaaggcatgggcttcgccataaagaggtgatgcatggcccaccatgggagaggagaaacctgctataatgtgcttcctttccaatgagtaactatcacccctaaacctgtgcacttcctttggttgtctaaggcatcatcctcgtttaattcatattgcctctgagtatattagggctgcttgtaatgagtgttgttgaggtatttctcgaggctgggtctacatttctgttggttgccaatctcttgcctacagtgttgattgagcagttttgtaatcctgcaaaagattgctagctgcatcttcaatgttagttagtgtttaccgagatttttgaaaactgattaataagagcttaaggaaatgcaacatattaaataataaacaaacatattttttatgtggttctggaattaatgatccttagtccacaagtcagtagtattatctttctttgataaatgtttgagtatacaagtgtttgcaatagtaatctctgtattccttttgtttttatctaagaagacatttcactagaaatttcagcagagtttttgtaagtaaaaatttttcaccctctgtacataaaaaattgaggtatttataggcccgtagatgggtgagggcataccctcttaccccactagggttccttactcatcacgcaagtgagactgttaaacattacaagaccatccatccattgatttggtaggtaactctcccatcgtaaggtgcataatcgttgcaggctgtcacgtaaggatatggacacgtgttgttcaaaggtttctcctttaaaagaaatatcctagacaagccattggacaataagcactacagaggcacgtacgcgcataaccacggtctgacgtaggggataagatctgacttggtgttagatgaggtgtaactgtcgagtgtatctctgggttaggttgcatgggacttccaggaagtggaactcgagacctcctagaatagcccattcttaagagccccccagaggtcccgtgccttgcgtatgcctctgaataccagaagcattatgttacaactttaaggatcaattcctccttcacaatggatgcactctcccagatactttgatgccttccttgatcctattttaaaaggaaggggaattcaggatattcctatacgatcagacgtggcactctttttctacttccacgtagaacctatccgggaatagggataacatttacctcccaagctcttggaacttaagagtgtcaggagctttctatcttcccctgaaggttggtccagtatttttgtcatgcaaacaggttaacagaaaactgaatggagtgtccgtaataaatattctcggtgatatcccgaaggattggctgaagcatgaggcttggttagtggagctttgaggtccacactctttaccttaggcgcatcccttgggaaggtgaatgatgactgctttttgaaaagacgattgtcctcagggcattggggatgccgttgtgaaatgatgaataataaatacattattgtcttttttcaaatgtattaaatatgaacctttcgtatccccaaccgttaaatgatctagttttcaatccaatggattaggactgtgaatttcaaaatctttcaagccgatgccacccatataaatggggttgttgacgattgaagccattttcttcacttcattaatcattttttaaccagagagaaccctttcttttttgcacgaacttctgatttagaaagccttaaccctctcatacatttctgctctaattatcaaccttcttcctcctaactctgccagtgtattcaattgacgcccactgtcaccctgaaccaatcaataatcaaaactaggaagaccatcgtcgtcatgcaagcagcggattcccagagcatcatcaccacccctaactctttcctcgtagtacaagtaagtatttcgcttctttcaaactattttttctatgttcgatcgaaatgtagccctcatatttgggggaattgatcattttgcatgcgtagaacataattttagggattagggttagttgtgtctaagacttgctggctgagtccataggtgagcatttttggctttagggtttttagagagatattttcttttaggcccaaactaaaatacatatttgaggtttgagtgttccatggttatgaaagttttgtaggaaaattcttagagtgtctaatagttcttttgcttactttttttggcccatcgcatacgttttttttactttgccttttaaaagaatatatggaccctttttgtttctatcatacgtttgggttcccaacttgtcaccatgcaggctgctgtatggtagtgattgtagtggtgatgaatgggggagacttccctaggtaccctatttgtcattatgtagggtactgaatgcttggattttcttttcacttttttcagtgtttagtgaaggtagtgactttcatttggccttggtgaatcttgagaagattcttgaggtacctcttactgaggagaatcttggagatctcattcaagatgaggggccttccgagccaattcaacctaaatgacgtcatatgagcaaaggtaaaggaaaaggcaaatctctcgcaacttctccagttcctagagttcttaacaactctatttgggagatagactaaaggcaaatcttattgaggaattatggtcttttggaagcgtactctaaggatggaggaatacaaaatgttccaagactcatgtggcaccgcatatctgtccttggggagtctacttcccaaagctgtgatggttttagagcgtggagttagttccatatctcttgcggcgccccatcttccacttaggacttacttcacaggattttgtgttaaagatggaatcgctccattccagctcctactagttgcatacaagttgctcgtaggatggtttatcttctacaaatcccggggaaagtctgctccaaccccaaaagagatttcatatttttatgagttaaaatcccaacctatgcgaggtcacccctctaacattgggtttgaccatctccgtaaatacaaaaatgcttgatgttccacgagcacttcctctcatagtccagactaccgtgagtactggtttctcacaactggcttccccatgaagcaagttttagctttctcgtgggacttcaaaattttaagtatcatctttaagtcccttgcacttttactattaggatgatttgtactatggttccatttcaaaacctaactttaattcatttgttgttttcttttttttttttttgcagaatatgtccccgaaatagagctcacagaggagttaagacaaagaattgccttttacgagcctttttctaagggagaattgtaagtcgaaggcctagttaccacccagttattgtgccaatatggtctcatttccaccttttagtgcatttacatagtcaacggtaggggataacctcagactcccagtgacctcaaagaacaaatggctttagagctttcactagaaataactaaggcagccaaggatgaggcacttcttgatgttgcctgggacatccatcatcccgagcccctcacaaaagatgaagaaatctaggccatgtttaggtttgcgtacccggaggcaagtacttccggagccagtacttcaggaagaggtaattagccctttcaagtgattcgtacccccaacctttctcaaatgtcattggttgaccaagggggttttgttcactctttcttagatttagaccgtcatatatatcccatgaaggattacatcgatagggtagaccaactagttaggcactccaacaattgagaattttctccaaacactgttaaagtgggctctttcctcactatgttcttgccgggcttcaaggaacatgatagcttcatcagttgagaggaagtaaacttgtttgcaagaggggaaccatatagctacacatttcaaagctgcattcacatgatgtctttttacctctgaaactatgtgatttaggctattactttctgccttttaactgatttgcttatttgtggcgttttaattcttccagatacacttgagtccaagatgctcaacgacctcatgaacaccatcaagaaaaaaaatgctgcgaccgacagcaagggaaaacaaaagaaatcctaagcctagaaatctaaacaggtgtcggattctctaccagccccactcaaaattagagatccctcaggacccaaacggcccacaaagaggggaggggggccatggagtggtgaaaaaaccaaatgttgatcctgttgggttttatgccc

SEQ ID NO: 377938 - DNA, 3153 bp, Cannabis indica
taactggatgtgagtgagatatgaaaattatcaattaagcaacatatagcatgataatacttcctatagatcataatgaatttaattatccaaaataaagttataatacacttaacatcaatacaattataaaaatgaagggtaaaaaaagggattaagatttgtttccctcctgcatatatgatttttaaccaaacaagaaagtgatgttctctccagttcctttattaccaaatacaaaaagacaaacatgatatcattcctcctacctgacaaattaaataagttgctatacagcagttcatggacagtgttcaagaaaaaataattaacaagcattgagacagccaatataagaaaaccacaagattctgataagtaagaaattatgacagtcgtgtaatacttgcctctgtaatagaccagctgatgaccaaagagctcacaagtacatgactttgaatctgttatgaataatcttatcatatatatgctcagatattgaattagcacaaggtatatgcaagttgaaattgttaaaagggaaaaaaaaaaatcaaacaaatctaacctcaggaaaactccataagattccccaagttagaaacaatcttgaacttatctggggcagggttgccgtaattggagatctcacaaggcctttttcattcaaaaacaagatttacaaaatataactttttttaataaggaatactgtgtttaacaaaatatgtttttgataacctatattctccataataatcattaatacttgttcatgaaataacaagttagtattttatacaaatccaaactacagataccatacaggcgatcattatagagaacacaaattatcaaaactatattttataaaaacatgctaccatgatccctttactaaatccaaaaaatatcaagataacgatctgtaatttaacacaaaaaaaaaaaaaactgacctactagtccatgaagaatctgttcaagaagaatgagaaattgtcaaaacgaatcaacaaatacataaaaaatactaattacaataagggagaagaaagaaacctccaaaacagcggcagattgagcgagctgaagagggcgttgtacggcattgtagacattttggtggccggaatctttgagcgttattacagcaaaatagagtacttgtaacctgaaaccaccgccattaaacaaaaaccaaaaggactgtaattatgaatctgagaagaaatgtagtaccatcctgcgaagacagtccagttgtagagagtgagatacacgcgcctgaggagagagggaaaccccgccatggatgttgagatgattcgcaggcagatgcaatgttggaggattaggatggggaagtacttataaaactagaaaacaatgaaaataaaaataaatatgactgaatgtataattatatatgcataggaagaaaataaattgagagaaaacaaagcaaggaagaggcaacattaggtaagacagaccgcaccacaactcctttcgaactagggactcggccctctcgtcgtcaatctcgcttttttgattctccaactcttcaagctcttttcttcttgggtcgttggagcttggttttggggctggaattagttcctgaatcactttgactacttgaaattaagccaattacaaaaatatttaggtaaaagatgacttagcctactctgttattagttagggactattatatacattgacaagtaacacatatatataaatataactgttataataataatagtaagaagaagatagaattgaaaatattggacactttcgagaaagaaagcaaaacaacaaaataatcaatcactttaaagcatgagattactcatagcatacacatcaagggaccctctcccaataatgctagccatgaactaaatttttgaaaaggacaactgaaccatttatagccaatgaggctaaatatgaagtaaagagaagagactctggaaaacatgaagcaaagggaaaaaactacgagatacccaatgagttgattttcaagctaaaattgaataacatagaaaatatatcacaacatgcaagaactaatgaaatctcaaattaataaataaataaactataaaagtacttatatgattgcatagtattgtaacaagaaaaagtcacatacaaattcattatattgtgaaagaaatgaataagtacaaattttaaagattaatgaatgaaaaattattcattccaactcaaatgttaagagttcctctcgcctaattgttacctagttgtttattcctgatcacctataggaaacagaaaataacaaatatagtttttctggagattacgagcttccttttctatcatatctacaaaaattttagctctttgcctatattcatgtgaatctctacagttgacaagtatgtatttaagaaaattttagtgtaaaagtaatgaagacaatgatttactagtaacttcgtattgatgaacacattattatttacctgttgaagcaaacctaaattttattcatcataattcccaagttgctcaactcagtgttactaagtgtatgcagccgattcttattatctatcacctgaaataaggaagagattaagacagattaaatataattttatttttagtatagttatccttaatttatgcagtaagtctttctaaaaaaattacatttttgagtaataccttaaaaattagaagagagacaagtagtagtactagtaataaacaaaaaaaaaaatccaatttactgctaattcctcctcctactgttaaagggataaaaccattttatgacatgcatctcaatacctgtattacaagtacaagattacctaaacaagaaagaatatatagacaagtatatctaaatactaaaattgagtgctccctaaacaatatagacaagtgattaaacaattcaaacccagcgagaatatatagacaagtgattaaacaattcaaaaacagaaagcttaagaaagaaatcatgacagccatccccaaaaatgaacaaatttcggccaatacaaataaattaagagctgtattagctaagctaaaactaaaactcagcaagcctatatgcttaaaacatttcaaaaaaaaaaaaagaaa

SEQ ID NO: 377939 - DNA, 2541 bp, Cannabis indica
  modified_base (2485)..(2485): a, c, t, g, unknown or other
aaaaaaaaaaaaaaaagatcatttgcatttacggctatggcgttggttacacaaacttatgcaaaatgctttatatatcacttaaaaactgaagcaaacggctattttgtaggaaaacacacacgtgaactaacgtagtataaatattcttccaaatactaatagtccacggaaccacgcccatagaataaaattaattagtaaagtatcaaatgttacaaatgcaattgacttatgcaatgtttgaattcctttatgcctttgtcgcaacattatgtgatccacctggctaatctaatttcaaaaatagaccaagtacgtagtgaactccctttagctcttcacgtgtgctcactttttctccaaatgagttttagaaaagccttttgacgaagatatgtactcacttcctcttgaaatgagacataaaaaaattttctctccaagacctacactactctaagtttttacaaaagaaatactcttctcacaatctaagatatgaacataaaacaataagctactctgtagatttttttatacattatagaatatcttatatacgttttacaatagtctaaaatcttttttttgaaagaaattatactcataattaaatgatgattgatctgcagcaacaaatttactatttgatgtagcaagtcacttagtatattcctttatttttatccaagttcatacattgccaaaatagctataaaacttgctataaaaagtcacaagaacatctatgtaggcaactaaaactaaatcaaataaaaaggagaagttaatgcaaatgcaaccataatttataacctttattccataaaattaggaatagaaatttggtgggtaatgagcaaggcatgcacccctaaactccatccttgctccctatttatgtacccatccctgccctgcccccgcccctcctaatcctcaatgggtttgaggtaggaaatctccattggatatgggaacttattgggtatccatgaaaattaaaaaaaaaaatatataataatcaaataacataatataattgaaaataaaaatcaaaagagtttttgaatttaaaataaacattctatctattttttaatttacattctataaattataaaagacatataagtgagacactacaaaaatgatcacttttgtcggtgccttttgggttttgcgccaacaaaggttaagttttaccgccaccttttctttgcagtgtcggcaaaactcttcaaatatcaaaaaatttggcaagtttttttggcgtaaaattgtgctagtgaaagatagttttactagcgtagtaaggaaaaagctccagcaaaagtctttctaacaacgtgtttcgttaaccacactggtagaaagtgttggtttccctccaccaaaatgcaggattgttgagcgccaaaatataaggtttttgtcggcgtaatatggcaccgataaaacgtttataacttggtcaacatttttttggcgtagtatgacgctggctaaacccaaggtgagaaaattcccgcaaaagaaaaaggaggtaagggggaaggttttgccaacagaagattgtgttgcaaaagtcttaatgtttttttttttttttggtttgatgaaaatgttatcgttcaatttaagtggtggttttaacggcgcgcacaaatacttttatcgatgcatagaaatgcgtcggtaaaagtggacctaaataataaagaatgacgaacccctcctcccatttcttcttcttcatctttgttccagtctgtcgccttcttcttcttcgttctagtccgtggcaactggaggtaagacacccttcccccatttccttcttcttctacttcttatttcccttctcatatatatatatttatatataaatatatatatatacattttctacatttttaatttgtatttttttttattcaaatttagggatttcaaaacaaatagtgattcagcttaattttctctatctctttgcgtcttgcagctctcctcgagttggtgccatggaaaaagtaagggctaagatttaggggaagtcaaaaatttctaataagaaaagcaagtaaagaggacctagttttactactaatgtgaaaaagactaaatccatggaagaaattctaggtgttgaaccactggactttacagatgaagatgaagacatggatgggaaacatcaagatcctctgcttcacgatctattccaagcttttttatctccatgatcttctttgtagtcgctgaaaagactagaggacattttctctgatttgtttttcttcttggaagcaaattaggaatgctcgaaatctatttcgcaaggcctccatgaaactcccccgatcctcagatctgagaatattccgaggaacctagcttcatcttttgcgaatttagggaaggataacaagatcaagattattatggaagacattgagagaatcatactggaattcacccntagtctgttacgtattgggaggtaatccaccgtttatcaatccttaaaggctttgc

SEQ ID NO: 377940 - DNA, 5582 bp, Cannabis indica
cattgcgccacggatcccttgtgatgttttctatctaataacgtaaataacaatgtaaatattaacatctaatttctatggttccgttcggtgactttcagattccaaaatatcacatctaaaatgattattttgaagagaaggatgtgatgctttcagtcctacagtatgatcggaaaaaaaaaatgaatttatataagtttgaaaaaacagtactttgagacctttttatcattataaagaagaaaaaaaaaatacaccaaggataaacagtactatttccataatatcatctagagtcttcaaatccgatattggattggactatcattatgagtttctttgttataaactcacttttgctcttacatctttaaaatccttaaagacaatcttttaagggaatggaatatcaaatatgattaactgaaaaacaaaaaaaaaaaaaaaaaaggaaaaagagtgggattaactttggggtattgaacccgacgtgaatcgaacacgcaaccttctgatctggagtcagacgcgctaccattgcgccacggatcccttgtttagtttcctatctaattaggttaatatcaaaaatgtaatattaaacatctgattataacgaatattcttcaagaatttaattaacgctggtatttaattagtttgttggtaaatatcctctgctgtgttgttatggttcaatatagtatcacttaattttcttcaaccttttccctatctgtaagtgctttagttaaactgttaaaatatttaagctgtatattcttaatttagagaaattatttcaaactattggtttttgagaaaaattagcttaattccatcacaagctgcaataacttttttaatcctaatttcgttagaagacataacaaataacgtttgattgtcttttattgtcccaaaaaaaaaaaaacaaaaaaaaaaagccttgttctacacctaaacctttttttgtttagtaaagttgtcgtttgcttggtttacttgtcgttcgaaaattaagagctgatgaatttaatggagtaataaaatttatataagattaatttaaacaaaatataaaacatcgtagcgtttgtagtccaacggttaggataattgccttccaagcaatagacccgggttcgactcccggcagacgcattttgatactcttttcaactctttttattagcacttttctttttcctactgttgtaatctgtagtgtacttattgatgatgtcattttaacttttaagtctttttgggcaaatttgcattatatataatgaaaaagataattagtcgttttctttttgttacatgaaaagaaaataaaattttaaactgtgtgatcaaaatgaaatgaagttgataattggtgctagaatatgcaaattaattaaacacttcatatatgaaacaaacaatatgtttaggtgtaaaaaaaataaatttatacagctaatttaatattgttttaacaaacaacaaaagtgtatcttgttcaatcattcatattactgttttagttatgttacctacctacctacgacgtcgtttaacaacgtaaaagctttcagatattgtcgtgtcgtgggagaccgttgaaaagttaaacacatcttcgaaaaataccattaattggaattaattaaagtcatcctcacccggctgctctgcttctcctcctgctactatcttcttctattctttcctcggaatctaaatccattattattaaaaaaaaacactctgctttgctttcctttactttttgtttcatctcaatagtcaacgccccccaaaaaagggaagaaaaaaaatgtcaaaaagtgtctgatttcttcctcaaattctgaacccaaaaccaaatccacttctgggtattgttcatttccctcaaattcatcaaaatgcctcgaagaaacaacgacccagaagccacaacaaccgggtccaccttcgtcctcttatgttcggctctgatctcctgtcttctggtctacggtgtcttatccgtggtcctcagacccagcgacttatacacctcgtcaacacttgaattggctcaaggggatggtgggaatagagattcgaggggtgagaatggagagtgttgtaagggagtcgagaatctggagctgtggggagctgcggttaagtggggatccgagtttaagttcaacacttctgatgagtgttgtaaggcttgtaaagctatgtgtactggcaatgatggcccttgtttatgtgacacttgggtcttttgcgggaatcaggagacttgtggctccaaatttggtgaggtgagttaacttcacttcagttttgaaccctttggataaatggtcaacggttaattttcttgaaatggttttggtctttcttgctttctattgaaattttctgagttgaagtattgtggggttactttttatattggcgtaagttatgagctaagctgttttatttaattggtaatagaaatttaaagaaagatttagtctttatgttgtctgcatctaataagtgatgcacaaactgtgaaagcttttccttttgtctaattaaggctatttaattttgacatgaatttcactttgtgaatgcagtgctggttgaagaaacagaaggacacctatgctccagatcggcaagaatcagatcatacagttagttggacgtctgggatcatatttgggaaaggagaggtatataaatctgcattaatatgtatattgattgaacattgtgtaattgaactggcatttattgttctaattcttgtacttatttgcaaaatgttgtaattctctaaggtgagtttggtggtttgtataaattttattgctgagtttggtcatagttattaatgagagtttcatttgtaactgttgtgctcaaattgaaaaagtaatcaaattaggccaccatggtttacttaaacagctgctgagtaagtttcccggccatgaataggctcgcggtgaagtttatctcctcatttggaagactagtcaagcttggtttgggctctaggattattatatgaaacaaagtgtgtgcttcagctagccaaagaatctagtttagttgcagatcgtaaataaactttcttacttggaaataggattgaattgcatcaaagattgtaactttcagaatgttgttgttagaatttgcagttatttgcccatattaaaattggagggtcattgttataatctttatttgtgtattttgttatcttcactctgttgttgttgaacttctagaaattcaccatgtgacatgtctttcttgttttcagggaattattgggatgaaaacaaaatatggaactctccacataaaggtaactatagtgaacttggtagctagaaaagaaaaagtaatagatgaaatttatgtaccaagatgacttgacttcactatttttactcttggatgaaatttatgtctcattaaatggtattgtgcttatgaaatcatatgcttaggaggctaaagtaaactatattattgcaaatgctgatatcgaaacacacaagtcttgtttctataattttattcttggatgttagattttttttgttaaatcacttatcattcatatttttggagtttggaactcaatgtctatttactttatcttatttaatcaagtaaaatgtcaaaatactgaagtagttgatttcgtgttagttaagatcctacagtttcgattcatctgatagttactcatttgatgcagcttttcccagattgtgctcctcattctgtagcatacattctggagctcttgaaattgcggcattgtgcaggttgtgaattctatcgcgcagagagccgaggcgaatcctgggatttagaaggaaaccacatagacaaggttagacttaattagtcttcttactttgccaaaagttgatgtatggatggatcaccaccatggatatttgaacctgcgttgtacaatcttatgctatcgtcttatatcctctatgatctattccctcgtggtctgatctcatgtttcgaaaatgtggtcaattatgactggtgatctcacattgccctgccaataaaagtcttttatttgatttgatttgtttgcctctgaactttctttcgaatcatgtgaagttttaacagaccgggcaatgtgtttgtggatattttatgttcatgttctactcactttagttttctcttttgtttttgcaactgaacattttccctttttaattatcattaggctccatatggccctccatttgcactgatccaaggaacattagaagccgtgggaactacattcaataagatcccaactgaggtttgtccaacaattaaaaggggttcggtagcctggatcggttctggccctgaattctttataagccttgcaaaccaccaagaatggaggaaggcatacactgtttttggttctgttcttcccgaggacatgaaaattgccgagaaaatcgctctcctccccactgtaccggatgtttggaaaaatatcaacgtctccatcttggaacagcctgtaccgttgtcattgcaaaggttcgagaggagccatggagatcttggcacaagtgtaaaatcagattgagaagttcatgatttttttgacatttttcatataagtttgatcttttcctttctctgaaaaaaagaaagaaaagaaagagaaagataaagggaaagattttctgtggctttgaactagattcaaaatatttacttctttcttggagcaataacacaatcttttggtctacttatggggtagagtattacagaatcaatattgtgaaggtccaattttattgtttttatttatctctaactaataaaagaataacaaatcattatgaattgatatactaaaattaaattgagaagctttataaaccataatctgtgtataatgtttcaagtaattatgttttttgtttttaatttggcaaattatcattaaatactactaattgtacctgtaagcagattattacactggtacatgtgcattccaaaataaatacataattattttcaatatattaactatttttttatagtgctttaaatactagttgaattttttgacacgacacgaaatcggcatgaacccagaaggtacaagcatgattaagcacgaaaaaatacgggcttgagtacgacacgacacgagaagcataaaaagcacgatacgtaagcacgaataaactagcccaaaaaacacatcacacaacaagcccgaaaagcacaatacaacatattaaaaaccttataatttaataataataataaaatatgaatttatcaattataaataagttaaaataataataaaacttaaatatagtattgaatattgtaattctataattaaatttttaaaacataaaaagctaaaattatttattaatttatttatagggtgtgaataaaaattagagtatttataagtaaatattcaaattctaatgatattaatatttattttttatataattatctgtaaaatattgttcaaaagttatataaatataattaaaact

SEQ ID NO: 377941 - DNA, 2674 bp, Cannabis indica
aaaaaaaaaaaaactcatttcttaactcttacgaactgaggttcattatgaaacccaaaagctgtggcgggttaggctttaaaaaatttggggatttcaacttagccttagtctctaagctgggttggagcttggcctcaaatcttattagaccttggtctaagatgtttttgcgtaactatggtaaacaaggtgagacattttggaacctttcgatccatcagaatgccactttggtggctaaaggtattatgaatagccatgactttatccgaaatgaaagatgctggttagttggtaatggctgatctattgacttatggtcttcgccgtggattccttggttgaattggaactcctattgtgatgccttcaatccaagatgttagattcctaaggtctctcttctccaagatgtgctggttgactcgggaaactttaataattaagctatctcttgttggttcaccccgtctgttgttcaacgaatggatgaagtaattaaacttccttgggggaaaaatgaccaactgatttagaaaaatttagaatctggtgatttctcggttaaatcggcctatgcttctctcaccaagcatagagttggctcctctgagagcctttggcttcaaattcggcgtgcccaatccatgaaaggtctaaatttttcatttggaagctggccagagattttctttcttgtggccagagattaatggatctcttcatcactaacatgagatgcaccttctatgattctgaggaagattctgcgattcccctattccttaaatgccctattgctcagaaatgctagtttagtacgcaatggggaattagaattgacgctctgaacattgatacatacccctaaagatatgatctctcgcatgttatccctgatctctagacaggtttatgaagttgataaagagttgtttacccaagtggttgtgaccctttgtatctctatttggaatgcccgaaataacagctttcatgagggagcttttgtttccccaaaagctatatgtgtaaaactttatcggatgtggaggagtggagaattgtttgcagtaagagtactctgacagatgttgtcgaaccctttgacctgactcctcctaaaagagcctctatgcgtaattattcagatgtttctatccgcggttcgaaggcttttgtggccactttggtggttgattcggagggtcttgtggttgctacccatatgaacaaagtcgatatctcgtctcccttggaagctgaagccttctggtttactaatggcagtggagttttgcaagagatcaggttggagtgatgtctgcttcttctctgattgtcaagttttggtaaaggctattgctgacaggagtgcccttcttggagactcaatcctttattttctaagttgtttgatctgttttgtaatttcaatagtgtgaatttgttttgaatttctagagatctcaaccaagctgttcatgatctggtaaattaggctacatcccttaatctttgtcaatctttgactgctgaagagatcacccatgttgttaggtgtttgaactttgtggtttgatggtgtttgttatctgtttttggaataaagcttgactttcataaaacaaaatattttaataaaatcaataaaaattaatgtaagtccaaataaaagtctaacagtagcaatctattttcgacctatacttaatttttttgaccataaaattcgtgtcgtgttcatgttgccatgtaaaaactcgtgttacaacttttgttttttctattggtgaaaccacacaaataatagtttctcatggctttccaaaaattaaaaaataaagaacattttcctttccttttcttttttttttttaaagaaaaaaacttctttgttccagaaagtgtctctttctttctgcgaagccatgagctttcgagaggccctaagctgaattaaacagcagccaccgtgcccagtttagattgagaccgattatctttcggttgtccaagctgtgaggagttttgtgaatatgatgtcggtgtttggatctgttattcaagagtgtaaaactatgttggttgagcttaatgttactttttttttttgttcaaacagtcaactaataaagttactcatgagtttgctaaagcatcgttattatattctgattgtatttcagtgtaagaacggtcctaactaatttactacctatcttggtagctaaatttaaaggttaataaaattaactttcctttcaaaaaataaataaataatactatttaggatccaactatttattactactactattattattattattaaacaaaatacaggtatgaattgaatttttataataaccaaccagcagctctttattagtacagccaaagaatattaatttttatatttttatattttcattaggggaaataggtttaaatagttacatttttttagccattagattatcattgaatggttgtgattaatttaaaaattaaataaaaataaataataattaacttataacctaatagtcacctaataatttatttccttataaaactttaataaagattaattatatttaaaattaaattaattataatgattaattaatttttcataatttattattaaataaggatcttttagcaa

SEQ ID NO: 377942 - DNA, 3130 bp, Cannabis indica
aattggagccattttaaggaagttgaatgatcaattaatattaccactagtgtttttgtgcttggatcggatagatggacgatggggactaatcgacatttctctatttctagattcgtggctattttgctagcatattcgccaaggcattttgatccctaaggacttgcttgacggaatatcatttgaagttttgcaactgttcccgagattttactacgtaactagcaatcttttctcccgttgtctagtattctccaaaaatttgattgactaccaattgtgaatcactatacaactcaatattttgggctcctacttctttagttaattgcaagacatcaatcatcccttcatgttcagcttcattgttggaagtggggaactcaaaccgaaaaatcactctgaagttgatgactttgcaaagagattagtatgattcctgctccagaacctttctcatttgacgctcctactttccaaatctctagttttgggatgggttctttaggattgtcgtttattcctgtacattccataataaagtttggtaaggcctgaccttttattaaaactcttggctaatagtggatgtcaaactggcttagctgccaattttaagagtcttttggaagactctggtttttgaagtacttgacagagaggatgatttgttgtactctgatggcatgagcttaaaagtacggtctcagcttccgtgaagcaattagcaagcaataggaaactttttcaatcattggatatttggacttcgagcccaacaatctcttactaacgtaatacactcgaagttgtacccttccttcttctcgcactaaggcggcacttatcgcatgtttggacactggtatttacaaatacaatagttctccctataccggtttggacaaaatcggagctttagtcaagtgttctttcagtttctagaaggcgtcttcacactaagcagtccatttgaattcattattatcgcgcaagacattaaagaatgggatgcacttattagatgacttagaaacaaatctattgagtgttgcagttcttccagttaagctttgacatctatacttcggtggagaaggcatatctagaagagcttgaatcttttccgaattggcttccattcctctggaactgacagtaaagccacaaaattttcctgaagaaattttaaaagtacacttcattggattcaactttatttcatactttcggatgatggaaaaagatttttctaaatcttcgttttgatccatggaagtttttgacttaaccagcatgtcgtcgacataaacttccatattcttccctaagacatccttgaacattttgttaactagacacttatatgtggctccagtatttttcaatccaaaaggcatgaccgtgaaacaagaaatgtcttgtcagtttggaaggtagtatgttcttgatttgccacatacatcttaatctggttgtatctcgagtatgcatccatgaaacttagaagttcatatcctgatgtggcgtcaaccatttgatcttttcgaggaagtggaaagcaattttttgaacaagttttattcaagtcgataaagtcaatacacattcttaaggtgccattaggcttggaaccaatactagattggcagccagattggatataaagtttcccaaatgaattctatattatttaatttgtcgacttctgccttcactgcttctctaacagctttctgacggactggatcaactttcgaatctatgttcaaagcatggcagatttcatgaggactgattccggtcatgtcagaatagttccatgacaatacatcactggttttcttagtgttgatgcaattttttctctaaagaccggaggtagattttttcctaccttaatgactttagcaggattttcatcgtggatggatatttcttctacctcctccattggttcgatgattctctctacccgcactcgtgagtctaattcatcttcttcccagactacccccagtgctggctgaacgagtgctccaagagcatcatgattctcttctcgaacagtaagtacaatttggccgagacattgtacacttctcacacttttctgatcaccccttattcttccaacgtttgcgctgtcacttgggaacttcatacatagatggcagatctgaaagaacctagacctggccatcctaggataacattgtaggcagtgggacagtccgctactatgaagatgcagtatttgaaggccaagactatattacacttctagaaatttgtccattcaatgtaactggaagttgaatctttctcattggaagcagagtatctccattaatgccttggagttaaaccaaacaagatgttagattgatttccactaaaccgatagcttgaaaggtaattttaaagagaatgttgacaaaacttctgttatcagctagaattctgcacaccctcttattttcaatttgagattcgattaccattagatcattgtatgggaaatgcacatgcttagtatcatgttctgtaaaagtagttggaaggttcatcgtctggggacgctaagcatgtgcttgtacgagattgcatatttcttcttgttcaagctcatttagatacctcttctaggcagcttccagcaatatgtgggactctagatattgttctcatgtggccatatagtgcttgtggagcaactccaggtggatacggatttcttggtctaggtgcaacaataggtcttgccacttgggcattttgtaccccttgagggacatgtatagtcagagcttgtattccatgaccctcagaaaacctgttccttgaggatgatttatggcttcgggttgtccaggaataaaaaagttgtccgtgtgctacttcttgtctgggatagataatgggtatccgcacctgattggataactgaccattacgaactaagccttcaattttgtcctttagatagtcgcactcatttgtattgtgtccaatatgttaggttatttttactattatttttaggttaatttttagtgtgattttaatttagttctactatgatttttatcttttatttttgcagatttaaaatagaagaagatta

SEQ ID NO: 377943 - DNA, 3612 bp, Cannabis indica
actttttgttttttttgtttttttaacaatattttacatgcattaatagtatgcggattctatctcagatacataatgtaattttatatatggagaggagaggtaaaaggacaattaatttataacatttgtttgtattttggtccaaaaattaagataaatacgaatgatataactaaagttgttaatacacaaaaacacaccctaaaaatagcaaaatatgttcgtttttttggggtcacttatatatatacaagtagtaatagtaactatatgtaaaatgaaaagtggaacaagtcaaaccattggattttgaaggttaatcacatcagtaaaataaggatctgaattatgaaaccaatgaattaattataatgacacagattttggtatcatcatcatcatcagaattgttctgcatatgcatgagcagcaatggacgctactcagcgcatggtatgtcaagaagatttcttcaaccctttaacttcaatgggtcttcaaatggcctccattctgtcatctctcacttctttcacctccttcttaaggccttaggtcaacctggtcccattgctcaaatctttgtaagtatttattaacatttgttcatattattcgtatgtataataatttgaattgatctaacaattgtatatactaggctggattggtattgggaccatcagggctttcccatgttgacaaagtcagagatttcttctttcaagcttcgggagctgagtactacgaaatatttggtttcttttgtagaatgcttttcatgttcttaattggtttagaaaccgatatagcttatatgattcgaaacattaaaacctcaaccacaatttcttattgtggaatctttataggagctgtgtttggtctctcagtttccttctttctccaccaacaactcatgtttagtagcaaaaaaatggttggttttgtcctaattgtcatcctcttaatgacctacaccgcctcgccagttgtcattcgcctcgctggcgatctaagattcgccacctcaccaaccggacgcctagccgtctcttgctctgtcatcaacgaaattagttgcttgattttgttcaatttgatcattgtggtgcataagaggaacttttttaaaggtggggttttgaccatttttataaccggggtagttatattggtgaacaagtatgttgctattttgtttaacaagaggaataggaacttaaagtaccttaccaatgctgagttactctttattttatctgttttaattgggagttctatgatcatagaaatgtttacaagtaatagtgtgataagttgttttcttattggggttatgtttcctaaagaaggtaaaacagctaggactttggttcataagcttacttattcggtacataactttatacttcctatttattttgggtatttggggtttcaatttgattggaatcgtttgagtaacttgagtagcattattattgtgttgattatggtggtgttgagcattggtgggaagattagtggtactcttttggcttgctcatacttgaagattcctctaaatgaaggtgtttttattggtttttgtctcaacttgaaaggtcatgctgatcttttgttcattggccaagctacaaatacactaattgtaagttccaatatttcttcctttctttctttattaaaatctacttataggtgttttttatttgatgtgatacttaattgggatctcatgtgctagatggtaatatggatgagttttagaattatatataggaaaatttattatacactttagtttggtttagtacacttattttgtttcaacatttaagaaagtattttagttgatatcacaatcaatcacctatgttatacttaattaaaattatttgtaaattttcaaaattcttttaaataatttataatatcaaaaataaaatttaaataattatttattgcacgtaaaataatcacacgtattttcgatattgaaaaagtattcagaattttataaaaatttaaaagtgttctcaaataattataaggtagacaattatatatagaataatttgtggtataaatacctaagtttaattttcagttgtaaatacatatgcaagtttaatttttgatcctgattggtccaagttattaaatttttattttaaaaaaaataatttaaatataccaataaataaaataataatatgtgaataacgacttaagtaaacttaagtatttatttaaaatcaaaagttaaacttaaatatttataccataaattaatcttatcttatatatataaaatacatgaaaagtttttggcaaataagataaaaagtactcttttatacattaaatttggaaaatcatttcatgcagtactaataatgtatttgtattaatatagatatagtatctcactcatatctattataaccatgttaaattatcttcaacttatcttgattattataataataataaatacatgcatatatatatatatatatatattatatagttgaaaatggtttcatacgttacttatcatgatatgctatctaataatcaagattcatttatattatattaaatcatgcataagagttttgtcacaactttcataaacattgatattagtattaagtttaaaagtattaatgtaataataataattatatttgtttttgagacagggatggaaccaagaggcctacaatttacttctaatgagtatagtactgaacacagtggtctcaggcccagtcttggcccttttaatgagaaaagaagagaaactctttgcccaagcttcacacacaactctccaattccaaaacccaggagaagacataaggacccttggatgcgtctacggtccacgccacgtgtcagccatcctagccctcacttcagcactaaccgggtcccaccgaatccctatcacaccttacattatgcacctcattgaactcacccaaaaacgacgaaccaacgtgtcgtatcacgagctacaagaagatgagctcagcgacgacgaagactacggcggaaacgacgtcgttgagatcaacgacgccgtcgacgccttccacaccgacaccaaagtcttcgttcgcctcatcaaggcagtctcctccttcgctaccctatacgaagacgtgtgcagcgctgcggaggacctccgcgcgtcgatcatactcgcgccgtttcacaagcaccagaggatcgacgggaagatggagagtgggaaggagggggttaggaccacgaaccagaagatacttcgtcacgcgccgtgctccgttgggatcattgttgagagagggttagccggtgtgcctgggttttcgcagcttctggattcgacgacggttcagcaagtggcgacgctgttcttcggtgggcccgatgatcgagaggcgatcgcgtggagtaagagaattgcgtcgcatcagaagattaatctgacggttattaggtttttgtcgtttgaatcgtctcggtcgaggagtgagagattggatgatcgtgatgatgtggtggttttcatgtcgttggcgagtttggagactgggaaggatattgataatg

SEQ ID NO: 377944 - DNA, 3769 bp, Cannabis indica
ttttttttttttttttaatttaatcataagttaaaaaaaagaaaagcccaagttgttatttacttgtaggaaagagagtttcaagccaattacagaaacacaacacagtaaaagtaattaaacacaacattacttttcaaatacatatatcatttatacacatgaaatatatgaataaacttacaaagtccacactatacatcatatgcaagcatcctccactatatattgtactaattcttttctttctttcttggagataaaagcctgccatgcatatacaatatacacacaaacatatatatatttatatgaattgctaattaattaatcaaatcattaataaatccacatatatatttatatagtggcatgcatataaactagaaatgtggattgatttataattataataatacatatataatattggttattattaataattattccaagatgatcttccattggcagcattactagtactagtagtaggagtattggatctgcccttggcaacatcttgaacaatgacttggccaacaccttcggctatgccttctataagacccccaaagaaatcaaagaccacctgagaagccactcgggcggctgtgccgagcatgttgttggacttgtcatcgtttttgtggccgttttcgcggagaccgttgatgtaggtcttggcacaaacggcgtggagatggtaaccgcaagtggtgcaatagtacactctgcctgacctcttccggttacactcgccacacgccatgtttgttgttgctgctgctgttgttgttgttgtgtcactactattattgtaataattgggtggaagaagccttaaagtgtgtgagtgaacccaaaacttttgcatttctaaaggcaagttggcacaacaagggtgcatttggaagctgcatgcgttgcatctgtatgcagacccttggattgccttgctgcacacatcgcatttggattgcacaatcccaccacctttcactgcacaaaaagcatgtgtaaaaaaaattcactacataagaaacgtacattcagtgacaaattttatcacaataaaaagttgctaatacagtatttagatacaagctgttactaatttaattttggtaacaatacttatcatgagtaatatatttaatcacaataaattataatttttatgactaatacctttagatacagaccttttagtgataatataggaatagtaatttataattatatacaactttttaacttttaattattattttattataactaaaagtaagatttttttataggatttattgactcaatataatatatatatgctcaatcttttcaattatttcactttaatatccaattttttaaccctattagtacaaaaattaatattttattacaattaagtaagaacaatgaatttttgttgttaaaataatgaaatagcaaaatatatttaatttatattttaaatatttttttttgtgtgacgtatatgttatcacatcatcatttaacaacaaaaaaattaacagatcgtaactaattgcaacaaaatattaactttttttatattattactgccaaaaacaaagatttagatacatatttaagtacaacaattcaaaaaatttaagtaatgaagttagagtaatctatgatagattccaattaagatataaatttttcttagttggggatatatggggacacttgtatataaagtatagtataatagattacctggtttggaaaagaggaggagctgatgctgagagtggaggtaatgagacttgatagaagggaaagctgaaccacagaagtcatggagctgaaaattgcattgcaggcaagagtatctgttgcctgcaccgcgctccttacacgcggcgcaggtgaaacggtcagggaggttaagcaaggacaaagggtgttgtgggtggctgaaatgaatcatctcctctcctgatatcagctgaggagacctcggcggatatgcaggagagtattgtcccctcttttcagcaccaccaacaccaacatgactaccagcgatggtggtggtggggatgctaatattactattagtagtagtaacactgccttgttgagccatcgaatgcatttgttttagtagaaaagttttactcttcttcgagtactctttgttcatgatgcttagtattaattatgttttttttttctttctctcagtacaataatatttgatatgatgagtttgttggttattaataattctaagaaatgagatgagaatatttatggttgaaaaaagcttccactagctagcttgctatagtagtacatctaatctcttctacatgatcgaatatgcatgcatgcatgcatggcagacaccccacacacatatatagcttttccagccaactttaagttaattaatactaaattgtacacttcgtggttagctgttatttatattagttacttattaaattaaaatatatgtagatgttaatacggatattaatttaggagaattattttatatattatttttaaattttttatttcaaatttacagtttgaattactatgtaggttttgattgcgatttagattgttcccttagttgctatatatatgagtttgctattggttgaaataacacactttagtctttactactatatatattgaatattattttgataataattttctttttatttaatatttaatgccttgtttacctcacctaagggccggccctcaggacatgattacattatacatttgaatatgtatgtacatgtatatatatatgatgtacatgtatgaataaaatttgttgcttgggaagccagcaggagctagctaggtagggtagatagattgatatgtttatgtatatggggtggccccctaaaacagtgttgattccatggaagtttggtggagagtggaaggaagaaagaaagaaagtaagatacgatatacataattaggagccacaaaagtcaaggttttttttagctttttagtttttattaatcaatcaatcactacagcaaataaacgaaaaatgtcgcacttttaaggtgtcaaacactataagatgtgacaaaaacgattagcggtgaccattaatgaataagtttcttcagtttgagttgggttaaaaacacgtaatgtatttgcaccatcattatcatcttcaaataaagtattttctatggtagcaccataaatagcacatagcaaagcagcgcaaactctcatcatatgaaatgggttcaatatcaataccataatatgtgacgtagtgttgttgatgcaatttaatatcgaatttcacacattttaatttaattaataatataaaaatttattaaccaattacaacttgttacatcgatatagtgttaaacaacttaaggtagcaatgctctaaacgaacattattaggttttccacatgagttaagttaggaccggctcaaaggtggggcagtagggctcacgcccaaggccccacctaggtttaaaaacaaaaaaaatctcaaatttattttttaaaaatactattttttttgtatatttttactattatgtattaaacaacataactactttctcaaaaatatacttaatctatttgttaagatactaaatttaatattttattgaaaaaacttaattatattttcaaaatattatttttaaatttttatcactatacatataaaaaaaatgtaaaaactttaatataaaaaaaa

SEQ ID NO: 377945 - DNA, 4048 bp, Cannabis indica
agtgctaatggtttcctagatttaggggttttgccactaaaattttagttttggggttaagtgcaagcaaagtaaaagtattaggggtttcgccgcaattaaccctatatatgatcagacatttattttttttattaattttattaagaaaaaaattaaatatttgtcattgcagaattaattttattgttttgatatgctagtttaatatatattttttaatttatataaaaaaagtgtcaattgaaggttaatatatataaaatatattggtaaataaatatcgaaaacatatatattaggtttaattataaataagtattatattttaatttataaataggtaaatttttttatttttttaaggaaaatatttgtcattgcagaattaattttttaattctgatatgctagtttaatattttttgtaatttatatgaaaaaagagtatacaattgaaggttaatatatataaaatatattggtaaaaaaataccgaaaatatacattaggtataatttattataaataagtattatattttaatttatatatgtgatgtaatttttttttttaaggaaaatgggatgtaattaacttcgacgtgtgtataaacttttattgaatacatacaaattaatttattccataccaaaacactatttattattatctaataaagagaatactaaggagttccacacatttttctatagaaggttccacatatatattttttttacagaagtttcatacattttgatttaataaataatattgaaaattattagtgacttataacgtaccacatagttttttttttttttttggatacctaataacaatacttgcaattacactataattgatagaactcaaaatctcaatagatatttttataaactattttgtaaaagaaaatatttattttcatattagtgtaaaaaacaaaagtcttataaaagtatttttagaagtaatagtgtgattactattagctagtgtatttactatatctaacaaatacacattagagtaattagacaatatttaaaatatatgtaccgatgtacaaataataatggcttatgaattcttattttatgtttggcaagtgagttgctaattacataatttaatattactaattagctaaaaacgataatattttgtagttacaccaaattcttatactataataaaataatgagttatgatatgtatacacaaatacatttaatagtttataagtatttcgattcataataatgttagaatattttatgtgaactaacataattaagtattgttcactcaatatcggtattaacatataattataactacataattagtaatgcgtgatattaccatcaggccataataggatcgacataacgtactaacatactcatggcctatgaacacactctaaaataatttttggtcagctcatttagcctagacaataaagtctctctatttgagctgtaggcccaatagacccattaaatccttatatataaatgggtcacgccccttattagtgactaaagatgtgtatgggatgtgtgtgcatcaagataaagagtgaaatgagtagtgttcataaaatcccatgaattcttgtttttctttatggtgtagatgaatgaagtgcattcaacatgatcattgttacatgaaaaggtataggaactaagtagtaattgttagtattgtctcgttagtataaatatgtaatactattacataaatggagaatcaattaatgaaatattgaatgcaacttaggattattcctattagagtttggtactgactcgaagagtgcaacccgatataattggtattgtatcattgttgatttcattgagagaatctcagcgagagatttcattgaaaattttgaaaaaatgactgacaaagagcttcatgaattcgtgatattcacattgaaatccatagaattacgtataaatcaattctttgatgctcagaagaagcaaattcatgccatgtttgagccttactgcccatcgacagaggcattactggattccttgtctcaacccaattctccagaggtcgatgactacactgatgcccctgttgaatcagtgagaagcaagatggatttggatgactgtgaggaagctttaaacatcactgtcgatgtatctcatccgagatggcagcaaagtaccaccaaactttaatcaaagtttgttagagccagaggagaaactttctactccattagagattttggatcagacagtcttaccaactcttgatcgagcaattcgatcctcttgcctgtacatacaaggtgctgctactagaatgattttatacgatacatggatcctttgctcaagatcaaagtatatagcgttggagaaaatatgacttgttcaacttgttctatcggtcgataatagcatctgcattaccttctccgttcgtgattcgaaccagacttggcacggatcaggtcgagttattatctacaattttgaacaaaaatggcaaatacatggagggactatccaaacagagaaaagtggagctcgctgaacaaacacagagtgtagacgaggaatggaggagggtggttactggcaaatggacggaggcgtgatcgcgtcgaatagtaaaagccattggaggaagtgaagttcacaacgaagagaagaatgatgccagaagaatggaggtcctacgtaaaaaaatgaataaatatataaatatatatacatacatatatgcataatgttattcttcatttttgatgaaaagagtaggaggtttgaccatacatgagacatggaggtcacaaactctctacaacctacaggcaactaattcgaattgtagagggaaaaaaattggaagcttatatcgtggagaataagaaggtgctgtcctaagacttttgggctttggcttgggctgaatattaatagaaaataatagggttgtgattagttttttatttttttatatttgtacttagtttcattttatatttttttatttttactatctttaggacaaggtgattttgaaggattggagagtgttacatgaaaggatataggaactatgtagtaattgttagtatcatttagttagtataactaatatgtaatactattacaaatagggaatcaatgaatgaaataatgaaaattaagattattcctattagagtttgatattgactcgagtgcaacccaaaacaattaatattgtattaatcattgttaaacaaattcaaaattagaagtatgtttattgtgaaagctctaaaactaaatgattgatcttgtatgttttgagcattaactgtattgaatatcgttaaatgctcattgcactacaagaaatgtcacttttgtcatggtattgcgctggtaaaatagaatttacttgttatgtgttggcaaaagggggttggcaaatcaatattggtattaaaacttttgcccgcataaaataaaaaagcgctggcaaaaatgacttttcctagcgcgtatatacgctggtaaaagttagattttagccactgcaaatgtacgctggtaaaactttgacctctttgccagcacaatttacgaaatgcgttggtaaaagttacttttaccagcctaacaaattttgctggtaaaagtgacatttcttgtagtgttgtttattaattttcacaaataagtccaacccaatttatacagcaaaaaaataattttaataagggtgatattaatagaggcaataattcgttgcagctctccaagagcacgttttaattttagattgattatattaataataattttataatttaaatttgttaaataaattaattcaataaaacaatgcaaaaatagaaatagttttgattagaatattattaaaaaaatagtgaaagattagggagctttcttatccatattgtattggatattatgtttttattagttgatgtttttattaggtttaattaaataatgttaagtgtatatttaatttttttaatttagat

SEQ ID NO: 377946 - DNA, 2180 bp, Cannabis indica
catataaattgtttttttgaggcttaacctaaccagtcttcatccataccttcaatttcttcaatgtccatgctgtgaatcacaaaatcataataccaaaatcattacgtatagaaaaatttatgagccaacaatcaaaaatatcaactttatatatatatataacaattattaatatttatgacatgataccctttgatgagttgaaatttattataaagaaaaaaaaatgaatattcttgtggggttacttaaaaatatataattggaccaaaataattaaatataacaaatagtgacgatggcacaccaaaaccttttccaccttttcttgacaatttttgcatttttaaagagctttattaaaacacaacaaaaaatcctttaattacaccaaaaagaaaacaaaataaaataaaataaaagatgatccttttaaagatctagtgcttttgtcacacttaaaagtgacaaattatgaaaacgaaatttaattaattacataagtgattttagaataaagtaaagaacataacaaagataaagcaacataaaacatttgtactttaaacttgttcactatgtaatatttagagtttttgagatataaattaatgactataattctattacaccttaaaatatcattttgctattatttttttttttttaatttcaataagaattcagtaatttttttttaattctaggttattttagcacaataaataaaaaaaataagatgcttaatcagataaaaaaaatatagcaaaatgattattataaggatgtaatataaaattattcattaaattatatcaaaaaacaaactaaaagtctcctcaatatcgaaataaatagatacttaccatgtattataaattttttttataaattaatcaagtaattgtattaaataattttgtttttaaaaaaaaacataaaacatttgttctatttttttttcttatttaaaaaacgtatatcacaaattaaaaagtaataattataagaataataattagtttaaaattgttaccaaggcaaagcgggagcctgagaaaactcatcggagaaataacagtgatgatcatcaaacccagcttcattagagctcaaccatgccggaaactccataacctcatcatcaaatggcttaaacccattaaccccatcatcacaataatcatgactctcatcattactttcattctccatactcctcaagaacttaaaccaccaagctgaagtaaccaaattcatagtatcactccactccatctgatgttgttctccaatcgatctgatctcagccatttcctcatcatccattgctgcatgtaaatctaatcccggtactgaactgggattagtactactaccactacttcctcctgctcccatcgagacggtggagacagaggaagtagtagtagtggaggctgaggccttagcctcagttgagttgttgttgtaataaagagttgtgtctatgttgttgaaatcttggaaattgagatttaatcccaatgtttggttgggtagagggaaattgaattggggttgaattggggaaaatgaatatggattagggtttgggtatggatttggaagatatgagtaaaaggggtttttactctgttcttcaaaacaggggaggtttgaattgacccgagtttgcggtggcggagacggcggaggaggcggtggcggtggtggtggttgagattgctgttgttgttgtttcatggcagctctatgaaatttaagagcagtgacaatttctcttcttgcttcagccatattaagaagcctttcttggtaaggtctagtggtatggagtcttctcctaacttgtttcttgtgaggttggttttggttttggttttgatttggggttttaatatcattatcaaagtttggatcttttttgtttttgttgatgggaatttgattcattgttgaagatgatgatgatgatgaagaagaagatggtgatgatgatgatgaggtgagttgttttactaagctacgaatataagcaccagaaagatgaggttgatcttcttctttttctatgagtttatttttattatgattattattatgatgatgatgatgatgatggagttgttgatgatgatgatgatcaatttctaccattcctttagtattagaag

SEQ ID NO: 377947 - DNA, 6352 bp, Cannabis indica
agagaattaggagagaagagaaaaatagttttagagttaattttagaatgacatattaccgcctcatacttcttctttatatggatatataaatagattgttaacttactagattggtttttttttatatataatttttataggttaattatgtcccctgagtgactatttaatggtttcaaaattgaatgtaactatgatagttattttttttttacctttaataatagactagataatataacaatcgttcgtgcggtttttgccattaaaaaaaaaaataagagagttaagtgcataaaaattaaaacataaaatagtttcgacgcaaattgatctagagattatattcctccacatctttttctaaaagaaaaacaatatatgatagttcatcgtacgagcatcagctgagtcgaaacccaaacccttttaagcgggcgagttgtaagaatgtttctcttctctcatgctcggccgtacccctagcctccttctcatctcatcaccgtcttctgcgtctgtcccgatcatcttctccttcgctggccgtactggccggtgttgaacgaatccactccacaacaacaccgcctccgaggatttctggttctaaaatcaatggctttgaaactcaccgacacctcccattcggatgaccgtaccgtgttcatagacaccagcctcgacactcacttcgccatggtcgtctctgaacttcacaccgtttccgacctcaaaggtataaccttcattacttctctctatttctttattttttatttttcagaaaatagtgatatttggctttcttggatgtgtttaattgaactaagtagtaagtaccgattatttgaatgtgtttagtctgttctctgaagtttgcattttatgcctttcttgtagaaaatcaagtttaatgtttttatcaataaaaaaagcttaacctgttagaacctaaaccctttacttctcttaaggtgatttgttcgtgtgctttattgtttccatataatgttgaatgattcttctgttttatgaaacagggaagattgagaaagaacacagattgtgcttcactaatgttggggaaatagttgttcatgctctcaaggtgagtttctttgcacagttaactgttctgatcttttttctgttttttgacaaggtttgcatcaatgatattttgtttacctggcaggtaaagcgccttggaaaactctattacttaccagattatatgctcgtaagtgatgcttttgacaaggccaagaagacatggtttcttagtgttgatgcttcttttgtaaagaagcatcatcaggaacaacttctccaaaatcctgattctaacaacctattattaacttgctatggcttcaatactaatacttcacaatttgatcaagttgctaatagaaagcgcaagcttgaacatttacaggaaacaaatattgattcttgtaaagacacctctaagccggatattgtctctcagaagttgtgtatcagcaccaaaagtgatgaagctaagcaagatagttttcagcagcgcaacaagttagttggagaagaattgcaatctgatcaagttgcaaaaagacgcaagatggaacatttacaagaaaaaatattgattctggtagggagacctctaaaccagagtttgtatctatgaatgacattatggagcgcagcaatttgatagttgaagaagctacaaaaattgatcaacttgcaaatgctaccttggctggtttaactgccaagcctacagatgatgtccatgcagtgagcaaggactcaagaaaaaagaagaaaaagggaatgaaatctgcaaataaagatcaagtattttctgaggctccatctttgaggaatgatgatttaggcactgcagaaggtgaccataaaaatttaggtgaggtacctgccactgcatctgctcctttacaggctgaacattgtacaattcttccggaaatctctacaaaagacaagcaatctgatatcatcccaggagcagatgatgtccgtgtagcgagtaatgaaaagaataaaaatgaaaatgcttctttggatcattcaacggcccagcctacaaaagatgttcatgtaagtaatgagatgggaaagaagaagggaaaggggaagaaatcaaaaagtaaacttgatcaactagttgctgggattccatctttggggaaggatgagcatattgatatcagctcagaagttaaccataaaaacttaagtggggagcctgacaccgcatctgctcgtttacaggctgaacatggtataactcttcaggttacctctacaaaagacaagcaatctgatatcatcccaggagcagatgatgtccatgtagcaagtagtaaaaagaataaaaatgaaaatgcttccttggatgattcaactgccagcctacaatgatgtccatgtaatgagtaatgagatgggaaagaaatacaaaaagtaaacttgaatcaagaagttgactggggttccatctttgaggaagcatgtttcagaggagcattgtaacatcaccgcagaagttgaccgcaaaatttagttgaggagcctagcattgcatctgctccttcacaggctgaacatggcataactcttgcagaaacctcaacgaaggagagtcaatctgatattatcccaggagcagatgatgtccatgtaccgaataataacaagaataaaaatgaaaatgcttctttggatggtttaacttgcaagcctgcagataagacggaaaataagagaagaagaaaatcaaaaaggaaacttgatctagttggtgctgaggttccatctttggggaaggatgagcactataacatcactgcagaagttcaccataaaagtttaggtgagaagcctggcactgcatctgctctacatggtataactcttccggtaatctccacaaaagagacgcaatctgacatcgtcccaggagctgaaaaacatgcactcccattattaggtgagccttgtctggtatattgatatgtgaaacaagttcatttgatttgtgttactagacaacttcagatatataactgaaacaaaatttctgatgatttattttaattctgcttcttttcttgatgctgaagatcaaagtggagcaagtgtagacaaggcgccaagtgcagcagacaaagtgataaatttaaagagtcattgtcctcctaatgctgagcggattgcttctcttgctgtcaaagagcccttagatcagcaaatggatgtttgcgaatctgggcataagaatgtttcacttagtcgggttgaaggagcggtagaagagaattcagcctcaaagaaaggctcagtgctgtcaaacaagcctaactcacatagccaaaatacaactgagctaaaaatacaaaatgtaaacgtcagtgctgatctttgtggtgaaaaggcaactgatgtacctataaagtcttgtaaaaagataaaaactagaaagaccaagggttctgttctagaaactgtggccacattaggtaaagaagatataaaagagcctgagcctaaaatctttgttcaacctcttgaagctaagaaagatgaggacctgagtaaaactgaggggaagaacatgcagcaagccagcaaacatcagggtaaagctgaaaatgtggaaaaccgagagagaaagaactctaaaaggaaacggaaattatcagaaaagaaccttcctgatatgcaattagaggatcgaaatacagttgatcaaacatctacacaaacatctgataatcagatcaaaggttctgcagtgggaaataaagatttgtctgaaggttttgccaccactaatggagcccttgttggcaagatgaccaaaacaaagagagcagctcatattattaatttcaaggaagatcaaaaaaatggacattcagatgaaacttcatccaatttgcagaggtctctgaagccaaatgataagcaagagaatgaaaaacccggtgaatcaacagttcagcctgtgaagaagcagccaaaagcttctaggactaaaactcctgtgtctaatgttttggataaggtaaatttgattcctaatgaaatcagaagccacaatgtcgggggtgctgttcatttgcagaaaaatactgattctgttttggtttcaaagtcgaccttccaaagatcaaggaccgagactaagcaagaaatacagggtgcagctgagggaaaagtttctaagaagtacaatggagaaatcttgaacagctcaaaacaaaacaaaagattaacaccagggtcaattttcaaggatgatgatgagagttctgaagatgaagaagaggtgggttcagatagcagcacaagaagtccatcagatcacttgatatcagactactcagatggggagagcaattcgaatttgcacacaccgcataatggtaatggagaattttatatctccaatttccctttctgtggattctgaccattgcaatacatgattattctaattactaattgcatcgaacaggatctaataactcgccgaaaaccgaagggagaaacatgagaaaatcattgtaagtaaaatttgaaattatgcaagtcaattttttcgtttatgctatatttgtagaatctaaaatctgttctctatttattattggtatagtctttcaagtacaaagaacatggctcttgatgagatctttagaagctcaagcagattcaagctagccaaacgaacagcagcccagttggtcgtagaagaagagagtcagaagcaagttgattttgtcccagacagtcaaccaatgtagtaaattttttgatctttcttggctgaagtgagtgagatgagatttgctcctttcaaggatatttctatgtcattccatttggcaattccaacgttgtccatttcgtccaattttgatttgttaatgttgttgtggaagtaatgtccttaagattattaatcttttatcctatactagtttttggacgtgctttgcagtttgcacgtgtgatatgtataattatatagatttcacattattatttttattttaaactagtggtggatgcacgtgctttgcacacgtgtttaagataattttttaaggaaattttatttacactctaaattttttaaagacagtaaatacttaattttaagcatttttatttcatataaaatttatatttttttgggtttgtttaaaacgtagtattagattgtattgtattatattgaattgaattataattttttttatttaatacaatattaaattttatttttgttgagtaaactgctagcaaaataaaagaggaacgatattaccgaatgaagaattctgggttgagtcgcggactatgtcgctctctttaagacgttcgcggcactgcccaggagtgtgcaagcagtcgaaatttgccggtcgtccccaggataaaacagcccagtcgaacactgtatcggaactctattgcacgatagagtaccgtcgaaattaaacacccaaaaccgactactgctcgaaaatataaatatgtattatagtagtatgtaaatatatcgtataatttatcagagtgaaaaaagatatttttcttccactgttcagtcgcattatataggcaatgcactgatagtaacgggaagaaatacgttactggaagggaacgttggaacagatcgtgggaacgatgcacaaaatcaggaaacctttgtttactgattaatcaaacacgtttaaaaaaactgttttaattaattaaataaataataatttaataaataaatttttcccaaaaaataaggtgacaccacacccgctcggcacggtcggacggacggcggcggcggcgcgcgcgcgcgtgtgtggtggtccggtgcgtgagtcctcacccatgcgcacaaaactgggtaccccttggggcccaaacccatatctcaaacttgcactagttatacacttcaaatgaagtgtttctatcccatgtggaactcttactcacacactttatttttgtaatatttcacaaagttccaacaatcccccacttgaaattttaaaaaaatatttttctcgagcagtattctaagcaataagattgagcataaacaaaggtatctttcgatttgaacctctgcgtagtgaatacaatttagattttactagagtgacccgtagtcttgaactctatctctaacattgtaccacgcaacaaccttttcaagggtgtaatcaaaagctcgtgcgttattggccatgcacgtctatcccagtatagtgaacgctctagaaattttacccaaaatttcataggaagcggcccc

SEQ ID NO: 377948 - DNA, 3971 bp, Cannabis indica
agccaactcattttccattaactccatttgctctgacatactcatcttcttaccctcttccctagattatgataccactgtcttcttcttctttttggtgtcatcaaatcggagaataatatttttatcaaagatatgttgaggttgcaaagtttctttcgatttagattacattactccagttttaacacaaagtgccataaccaaatttggatgagcaaaccctttcctgacattttgaacatggtccatgatggaatgttgtatgactctgccgacatcaattgacttttcatgaagtatatcataaaggagtttggtagaagttgtatcaatagtagaaaaatgctttgtgggaaggtgcttagcaccaataaattgaagcctaacacgggactcatattccatatcatgctagaaaaaatattttaactccccatcatcaccatgaacctattgagtacctagcttgcaaagacattggatgataaaatcataataaggttattgaactatttggctatactcagcattatcaatgtctttaacgtcacagaatatatttatctctttacatgaaaaggacaatttcttaccctagaccttgactttctatttgacatgattgattgtattggcataaaactccataaccacaggggaaattgcagcatcaggcagtgcacagaacttaaatcgatccctatctttgatgatgctcaacatggtctacacagaactttaatcgatccctataatttttttgatacacttacttgaaagtccataatcttgtctaactcctcttgatgatgaagcttggaaagaattacataatcaaatctttaatttttggattagatataatggattagggtaaacatgtgccaaatacaatgtcccatacttaggaggagtatagcaaccaaaggaagaccacaacttgggcaacatcccactcctagaaggattcctacgatcatggagaaaaactctggtggatgcagtgtcttgattccaaagagttttctatgattgatgtgtttcttttatttttgatttgtgtactgcatggagggccaattgcactagcactagcactatagatttataaactcgatcacaaaaatcacaggtgacctcaagaatttatgcaattgtaaaaatactaattgaagtgtgcaaaaataactaggagagactgaagctacagtcgatgccatttttgacacagatagttgatagcttcttaggacttggttatcctctattttatttttatagtttagtttttttagtcaatgtaatgtaggtgccttgttatcatgtattcatggtgacctctaaaattttttcaggtacagatataatctgcacgtgtggtatgatcaacttgataaactcaccaacacatgaactagcacgttaggcttatgaatcaattactataatcatgggtaactgtcgacattcattaaaacattgaagtatcagaggatcattgtggggaatatgcacaccccttgcatcttcctctgtgaaagtgattgagtcattcttttccttgaagctccttggcggctcttgttctaagcttaagacttgaggatctcgccttgcttcatgagcatacctatctctccccttgcaatttttgccttctatgccaagtcccccaataatggatctaatgtctctcacctctctaggtgcctcattgtgtacttctccttcacatactcattaggtctctgatcctcttgtacgcattttccaagtatacatgatgcactaacttttcaatcttggtcttaagatgctcacattcttttgtgagacgtgtgatacccacatggtattgaaaatatttatccaggtttctctcggctctttccctcctcccaggtggtgtagggtaccttattggtgatggtttatctagcctcaactcaccttgaccctctagtacaatggatgtggtggatccactttgttgtaggcccccctaggggtccttcaagatgaagattcccttcctacacccgggctctttgaccagagaaaccttcttctccagcaaagggtgttggaggacctcgctaaccatgtcaagatgaactttcgtatcttaaagaggatgggggcgcccagacatgttaaggtaatagagtataaatgaatgacttggcctaagcttatcgttccatagatggtgccaaattgttgatggtgagaactcgttaactaacttgttcgacaaaaaatcaaactctactttaagctcagaactaagatcagggaaaaatatgaaatataaattcaagtagatttctcaatgtagagagaaaatgaaaaccttctattactcgcaatatggtggttacaagaataattttccaaccccttctcacatctaaggaaggggtatttataggctctaatggcctagagtacacggtggttccaaggaacaaattggcaaacaagagctggaggttgcaggtggaatcctcatgccctgtacctttgtcatgtgttaggtgtcccgggttacagggtagtggttgcagtgtacccttgcttggatttcaaggttatgctgaaatgatgctccaactacttgttccctttagatttcaaagcttgcaaaaggtgtggtcgtgcattcctcgcgtgcgtaccttatccttgtgactgtacctttgttgcttcaccttcctcttacttgaggaaattccactaagtttagcaaagccatggtatagtgacattcaggaaaggcatggccaagtgaccttgggaaggtcatggcttagtgacatctgggaagggcatggccgagtgacctcgagaagggtacggtagagtgacttctcgagggtgcatttcgagtgacttatcaagagtgcatgctgagtgacattgtgaatgcatgccaagtgacattcacaatgtccttgtcgagtgactctgtgaatttccttgccaagtgacattgtgaatgaccttgccgagtgatattcatggatgtgtgccaagtgattttggatgcaagcatggtcgagtgactttggatgcaagcatggccgagtgactttggatgtaagcatggccgagtaactttgcatgcatgcatggccgagtgactttgcataccaacatggccaagggacttttcaagcaaacaaggatgagtgactttgcatgcaagcatggctgagtgactttgcatacaaacatggtcgagtgactttgcatgaaaacatggccagtgactttgcatgcaagcatggtcgagtgacttctcaagggtgcatgtcaagtgacttctcaagcatgaaagccgcgtgacttctcaatgtcgttgccgagtgacttcttaatgtaatggtcggctgacattgtcactctcaaggatgagtgacattgtcaatctcatggctgagtgacattcacttctaatttcaagtcatactgtactttttcaacctcgagttatttgtacaaaagctcaaccaaatgtgagtaatttatgttcgtataaatctcgaatgtcaaattttctactccattaaaactccaatatctaccttcatgctgccaaacaccattatacattaaagatagttgaccctgtcatccacaaaaaaaataaacacacaattataagaaaataacaaaaaatgaacacaaatataaatataaaataataacacattgtacccacatcggactaaccactagtctatatcagacacatgaccaaaaaccactaaattgaacaaactattagacattgtttatcgagttttttagcaacaaaataatattagagcttaacaaagcaatgaaggtgtaaataaaaaaaataacaaacaagacatttttacgtggtttacgtgttaattatccttagtccacgagtccattttattaggctcttaggctggtgattgtgcatacaaatacaa

SEQ ID NO: 377949 - DNA, 4101 bp, Cannabis indica
gatcctatttggtcaaatacctaacgaaaaactcttatgttcctttcattacagtaaccggtgaatagcaagttagcaacaggtcttcactggttcggtggcagtggcatctttggttggatctatgtagtttcaagttttctcttcaaaactagatcaaacccagaaaataaaatgtaaggttgaaaactaaaccttaagaacagccaaatcatatgcaggatcgtaaccgacaatcttgccttccctgtaaaatccagttcctttctcatcaaccagataaacctgttaacaaaaccccccaaaatgagtttttttttcactccaacaaatttacataatcaatttcagcagttgaataaaaggagaaaaaccttacaacgctgtaatccagttgtgtctgtaatcaatttagatacaacatggtagtttgtaacctgatatagagtatagacaaatacatcactagtttcaacttcaatagcacaaagagtaataacaatgccatgaaaacatcccaagttgaaacttaaaacataaaatgatagtaaaagcttacaatgtgaccaaacttatcccatataaagcctgagcctgtcccttcaatttttgtactgttatcctctttaagcaatacttcttctttttcagaagtgttgaggtttttgtcaatctcaatgtctttaatgaaaacaaccgatggagaggtttcctaaagacaagcaaagattataaataaatgaacccaaatgagaatcttagtccataagctcaacaaactaaataaagattatgaacatgatacccaactgagtatctcctctgattattaaccaatctcactaacctctcaatctcaccaaaacaaaaatggttcaaccaaatggatctgctacaaaatatttaaactttattttcgacattgtaaaatattcaaaaaaagtttgaaaatttactggtaatctaattgataaaaagaataattagactaaaaaactgaactttttgagcctaaagcctcacccaattgattcaatcccaaaaactaaaatgtataaaatgagaacacaaaacattcatctagagagaaagagagagagacctgaaaaagttgcacaattcggtcttcttctagctgaagctcatcctgttgttgcagagcaatggctggtgagtgaattgggtcgagcaaatggagtaaggaagcagctaaaagactttgacccaatagcagagtccttctccttgtgagaaaactcttctgggttctgcttaaaatcgaagatgaagaagcggaaatggtgggaagaatcggagagggagcaagggaacccaaaaccaccatcttcacacataactatcgcttcacttgttcttcactattcaatataatatatttctttccttctaaggatagactaagcttttgactacgtgggccaataatgggctcaaaagcccaatatctttaatgtctccattttagaaaaattaacacttttatttttaaactttttaatagtaaaattgtacttttgaaaaaaaaaatgtgttctataactatttttatttttcaattttaaaaataaaaaataaaaatgtgtttagtaaattttatttttattttcatttgttaattttatttaagttggatccaagatcggggctggggtccaagtttgggtctggttagggtctaggtcgggtctgagtctgggttccaaagtttaggttgggataggagtctaaaatattgattaaaaaaactaattaaaaaaatttcaaaagtgattattttttcttcaaaatttgattctcaattaaaaattgaaaaagtaaagaatatgattttagaaaatagttaaggtaactttcttaggttatgctttaagtaccaagaggtatagaatttacaatttcaagaagggtagactaaaggttgtgattgctaaaaatattgtttttaatgaattggaatatcctcacttaatgtccagaacatgtagtgtgtctccgtgtgatgcaggaaaaataggaaacaagaactctataaacatggaaatggattacagaacgaaacatccagaagaaggttcacaaatgaaagctagtacgaaactggaagataatgcgcagatagaagctggtgctaagctggaagataacgaagaccaaataaaggttctggaaggactcggataagaaggtctggaaggttatcagttggcgcgtgataaaatcataagagagattcaccctccgtcaaggtttgtggaagcagacttaatagcatttgcactcaaaatagtacaacaaattgaaatttaagagcccgaaagctacgaagaggcaattttaggtgaaaacaagtcaaaattgctccagtccatagatgatgagatggattcacttcgaaagaacaagacttaggttgttgtactaaagtcgaaaaatacaaagattgtggagtgcaaatagattctcaaggtgaaagaggaaaataatgagaatgaaccagtgtggttcaaagtcatgttagtggctaagggttttactcaggtggaaggaatagactacattaaaatcttcttacctgtggtaaaatacaaggcaataagattgatgttgtccttggcaactcaaatagaatttgaagttgaacaacttgatgctaagattgctattctaagtggattcttggatgaggagatctacatgaagcaaccacctagatttcaagtgaaaagaaaaagagttgagttagtttgcaagctcaacatgtgatgtgcttatatggtttgatacagtccccaagataatagaataaaagatttgatacttatatgcaacaaattgggttcaaactatctaaatatgatcattgtttgtattttaagaatatgagcaatttacagttgtgtttttattgctctatgtagacgatatgctcataatgagcaaagaccaatcagtgatcaaaagtatgaaagccaagctcaaagagagcttgagatgaaggagcttggtccagttcaaaagatacttggtattgaagtttcaagaaacatgaaggaaggtacaatcaacttaaagcatttagggctcatcaagaaagttatttagaagttcaacatggaatatgcaaatagtacatccgtctcattaggcgaacagtttgtctggtcgaaggacagtgtccgaacagtgtgaaagagaaggatgtaccttatgagtagttttaggatgtttaatgtggggagcacaaagtcggacatagctcatgttctaagtatcctaagtcagttcatgtccaatttgggcattgaacattgaaaggccctcaaataaggacttaaagggcacttgagatcatggtttgacctatgaaaaagcaaaaggagaactggagttgaaagggtttgtggatgctaactatgcctcgaatagagatacgcgaaaattaaccacttcttacattttcatgacaaatcagaactgtatatgctggaaggcctagttacagttcgtggttgccctttccaccacggaagcaaaatttatggctaccacaggagcatttaaggaagcttcatggcttcggggaattatgtttgaattgaaataaatataagacggagtgactatgtactcaaatagccagtcctccatccaccttttcaagtatctagtttatcatgaaaagagcaaacatatagacataagactctactggattagagtgaagatagaggaggggctggttgatttagagaaggccagaacagaagataataatgctaacattggaactgaggtcttaacaataaacaagttcaagtactgcttggacttgatcaatctcagaagttagtataatgagatatctagaacaccaaccatgatggctacattctttctttatctctatcatattttaatttaaagaaactaggtagaatttgtggtatagttcttccaaatgaaaagatctctatttgtggttctggttatagaaagttagttgtctcgcagaagtgtgttcccaggtgttgaccgaggttttcggcaactaataaaatattataaagttagtgagctgta

SEQ ID NO: 377950 - DNA, 3928 bp, Cannabis indica
taataataaacattgttaaaaataattagaacctaattaaatcaaagaaaaaagaagagaaattatttatccaaactagctcgtcattcacgaacttcagatcaaaatgcaggcaacccatagcgtaagaggccgatccaatgcaaccattaaagcgataacttctgtttggattactgcaaatacgaaacagagagaacaaaaagtaagaaaatgaaagcatagtggtgaacaatgacatatcaagagtggagtaaaagtaatggatcaaatatatagttgtatgaaattatgtgtaggtatttataactctagagttgagtaaaagtacattacaacagttaggccaacataccagacaatgattttgaaagatatgcaacgacttctccagttgaatttcgaactacatacatgctccttacttcagttgttggaactatgagctttactaaaatcttcaaaaagactttgaatgtgagaaaccactatttccagagaacaaccatgaacaatctgtgtacgttccccaaacatatcaagatgcaacaagggaaatagctcaaatttggatttgagaaaacacttcagaagtcttgagagtaatctgttgaaaagatttccagtgaaagattttttagcagtttaaaatgtaccaactaccactacaccagaacacagcatgaccattagtatcaagactataaccacccacacatgacagttggaatggtcaagaacctttcttttgtaatgacccaccgaagagggtagtatctcatggaagtctcgccaaatgaaacttaatacttctttcggtaaatggttcttacatccaccggattgagaagacatccttagaaggagaagtagtagaccatttaattgtgaagccacaaagtatcccctcttcacttaataagagccattttcagtatacagctttctgaagattttagtgcacaaaagcaaatcaccaagaactgttgcatcaagatacagctttttcagagacctttacagggcattgcaaggcacaaacaacagatgacaattcttatcatgtaccacactatcagggtcaaagaccttttgcatattctcaaactttgacatcatcttgaatcaaatttgtgtctttcacaaggtttgccttgattcccattttgataatgatagcagaaagcatcactgattcttccacatctcctttcctgcgaagagcattgatcaaggcagaataggtaataacagatggaacaatgccttctttgatcattttgtctttcaacttaaaagcttcagcaacatcaccagttttgcataacccatttatcaatatattataggtcacaagatttggagtcaaacccttcaggtgaagtttatagaaaagcctttgtgctcgtcccaaattccctgacttacataagccatttataagagcattatatatagtaatgttaggaaccagacccttattcagcatctcatctcgtaagttgaaagcttcattaacattaccagtggctgcagtggcatgaataagggtacaataagtaaaattatctggagtaaaatttcgaagcagcaaagcagaaaaaaatttcttggcatcagcaatctttccggatttgcagagtcccaaaagagctatattgtaaacaatattgttgggcaaagatacagtcttggcactttcattgagaaaatctgcaattttttcaatttcattatccctaatggtagctttacatggctgcaaagaagctccacaatctggaaaagtaccaaaatccacaattttctgtaacagcacacttccttcatcaatgctcccaaacctatagagactactgatgattttggtatgaataacgacattgggactaagccccttaccgagcaaatcaaaatacaaattaaaagctttatccatcatcccttcattgcaccagccagcaataagtgctccataagtaacaatattaggggacagtcctctagtgttcatctcagcagtaagatccgacactttacttaatttccttgacttaaagactccagtaatcagagaattgtacatttcaatggaaggaaacattgattctgaaaccatcaagtcctttactttgaaagctctgtcagcatttccaactttacaatatccatcacacagggttctataagttacttcatcaggggcacatccaagctgcttcatcttattgaaaaggtcctccgcttcaaccatttttcccatcttgcataacccgtttatcattgtattgaaaagataactgctcttattaaagccccgagctaaaatttctttccatagactcgttgcaccatcaaaatctttcattttgatgaacacatcgagcagagtacaataaccgatctcatcaagggccacacctcttttcaccattaaatcccgaagacgcaaagcatcattgaaagcacctgcatgacataaacccttgagaagagtattataagttacaacagttggttcaaccccttttcgaaccatcttttcgcaaagcatgaaagcctcactacttcgaccttccctacagtatccatctacaagagtattatagctaaacaaatctggttttacatgccagcttttcatatgcttcattattccctcagctttatcaatctgaccagttttacagtaaccgttaaccaaagaattgcaaatgaaaacattcatctttaagcctaactttaacatctcattctgaatcctaatagcatcatccattcttccatttcgacaatacccatctaacaacacaccataagctcgctcatccacaataacagattcatcttctttcatcctcaaaagaactttttcagcttcctccatgttacattgcttgcaataacctttaatcaaaattgtatgactaacttcacttttcgaaacacccttttcgaacatcaacttcaaaactccttctgcaccctccaaatctcccaaactaacataaccatgaatcaaactattgtaagtaacagtgtttggctcaaaaccagaactctccatttctttaacaagctcctcagctctacctactctaccttctttacagtatgcattcaccattatagaataagtaaaagtatcaggaacaataccaagcctaatcacctgatcatacacaagcacagcagtttgaaattcaccatttttaaccaagttactcaacaaacaattgcaagacctcaaactaggcaagctactacatttacccatattatcaaacacatgtaatgcatactttgtaagacctttctcagcataaatcttcaatatcatatcaaaaacagtaggagaaaaagaaaactccttgaagacactaacaagctcacgccaaataaaaaaagccgagtgattattcttacacacagttaccaattccttcaaatgagctttggtttcatcatacatacgagctctagacaatatatgcacaattctacaataagacgttatattaggtctaaaatcttgttgagtcgtggccaacctgaaaaaccctaaacaggcattagggtttaacctcaaatttcgtagaacggagtcgagtagttcgtctgagaagtggaaggagaggtttgcaagtgcatcgaaacgttggagaaggagaagagtggagatgcgttggactaggtcgggttgggttagcttgtactcgtccctgagcttccattggagggtcctggagatgtggaggtggcgaatggagaagtgtcggaaatgaatgaacatttggtgagagaatcagagagttttaggaagagaaagagtggacatgtcaagttaatctatacttagaaaatcaaaaaatttgatttctaaaccaataatttaaaccctaaaaaaactataccttttttttcaaaa

SEQ ID NO: 377951 - DNA, 2413 bp, Cannabis indica
tggttgagtagacacctatcatttactagcaaggttcagttgatccactctgttttactggcttcgaattattggatgagcatctttgttcttcctcatagtattaccaaggaggttgagaagctttgtagaggcttttttgggggtacgaatggaaataagagtaagattcacattgcgtcttgggaaaaagtgtgcctcccgaaggcttatggaggccttagattgaaagatggtgttaagtggaaccaatctattcttgctaagtatgtatgggcaatttcattaaaataagaccttctttgggtcaaatgggtagataatatctacttaaagactgtaagcttcaagtcttatgatcttaaaatagattctagctggtattagtgtaaattgtgtcacctgagggagaaattcttatgtaataagatccttaaagttggaacatctatccgatttaagaccaaccggttatacaacaacagattggtccaaaactaggtcaattatcacaaggatatttggagttcattaagtgtgcctaaacataggtttatcttattgcaagtgatgaattctcatcttctcactagggacaagttgtctcagtttcatatagatctaaattctctattgtgcccggtgtgtgaggaggatgtggagactcatgagcacattttttaattgtgtcttatctcagaaagtcttggatttgatctttgcttggaggggttagagggtggtcgatagttgttgctggctagtctggctgggttgttgcgacagggaaggatcagtttcagcagctcaatatcactattttggtagcagctgcatacaatatttggctcaatagaaataaatatttttaatggttattctagatcaatttttagagttgtaaatgatgtaaagaatattaaaaaatatagattacaaatagtaaacaatagaaaattttctaaacaagagagagattacttattgagattgcattgtaataactttggttgtttgaggctgttattgctagctggagccgtgtttggctgagttaatttgattagtgtttctatgtgttttgtcgattaatgaagtcttttcttcttgataaacaaaagttgttaaaaagttgttacttctcaaatacttctttcctagactcaaaagttgggactcgccttctttgacatggcgaaaaaattttatggggacgagatttattaaccgctgggcttcaatagaaaattagagacgggagatcgatcaaaagttgtatggacctgtggatacccagccacaactctttctttcctcgttggtatttagggcttcctaatgggtggtggccaacttacactacaagaatagtaggtatcactaatggcactattactgacgccaaaaaatcctcactaaaagtaacattattaccaacgacatttaaatgttctcagtaataaaaataattttttttgctgaagtatacatcaatggcgacaaaatatatcattgacaaaaatttcatcattgagatatataataatgacgaaatttttgtcaatatttttctttttttaaaaaaaaagaaccgttaaattgggcggagtttttccctcttaaacattcactggtgacatagtcatcagtgatggattgccacgtcgtcagtgtgcagtccaacactgacgactttgtcgttaatgtatgtcgccagggataagctcctcagatattgaaatataaaacccaggacccattttaacacataaccccttcttcttccccaaaaataccattaccttctcaaaaaaaatccttatccctggttgccgcgtccaccactgccgatggtggtggttgtgccggcgaccaaagccatcccttatttttgaggtacgaattttttttttcaaatttgttagaaatcataatcatcatcttctccaatttcatcttcctcttcttccataatcttattcaaaatatttctccaggtcaaaatctcttcttccattttcatcaaaatctcttctcttggtgttgtctctgatcgaattggtagttgtggcctcttctctctcagcaaacttcagtaagtttagatatatatatatgttatgtatattatatgtttttacagaaaaaagactctcattattttcattagtatcagctgaaaatatgtggctgttggaaacaagagttgtagggtttatttacaaaataaagtgtatatatatacacagtaaaagtaaggttgagtgggccggtattgagccaagagaagggcttcatttctaatatatgtttgtgatttgatgtattgaaaatatatcatgaagtatgagcaagatgttggatgtgactttgattgaatttttatgtgtgttttttttttttttgtgattgt

SEQ ID NO: 377952 - DNA, 1546 bp, Cannabis indica
aacatttttttataccagatatctattgacaaaaattatgggattctaccttagagtaaatggttataagtagaatagtctatgctcgatcaatatttttacatttattttatgtgccaaaatatattaggggagccataattttatgtcgctttgagcctccatttccctaggcacggatagtatatgagcattgctattggacaccagtggtgtctagcacctctaaacatgtcttcttgcgattgattagcgatactccttaaaaattattacattaaactatatgagacccaatacttaattgaaataatagcaatattgacacataagaacaccactggtgccttttatatagtacattgattatatatatattgtgaagttaattaaacttaatttgatattcttcatttgaatagtctacttttaacacactttgcagaagcctacttggctgatgaccacagtgttacccaaagatttgtgttggttcaaaacaagtttggaaagtgtacacgatctcaatggtagtgatgataacaaattagtaccgaaagagaaagaggggcttgtttcacctgagtctaaacaacaaagaagcaatagagaaattatgagtgccaacttaattgtggcaacaatcatagcaagcatcacatatgcagccggtatccaaaatcctggtggatacgacgacgaaggcatggccaacttagctgacttcgtagtgtttaaatgctttatcgtatttaactcattgggtttcggtttgtcatcagcctcgatattgctcacatttctatcagtgctctacagtaccagtaaaagatttcgagaatcaatctccttcattctcttgaaaactgtcattgtcctaactatgtcatcctttgtttcgtcggtaatagcttacttgtttgctacagaatccacaacggccgacgacatgtggctatttgcttcttctgcgtttgccatccccgtgttgtacgtatgttctcatgtttttatgcatagagttagggtcagttatgatcaaaaaagaaaaataattagggccagtttcacacatcatttcaaaaagctaaaagtatttttttcttaaaaaaactgttataaaaagatatttggtaagcagttaaaaaacaacttagggctcgtttggtacgtcgtattttattgtattgtattgtattgtgttggattgtattgcattgcattgtattagtattatttaatacaatactatgtttggtattgacttgtaaagttataatatattttcaataaacttgaccccaacactgaattcgggtcgtgtccaggttcgagttgggtctaggattcgagtccagtttaagtcccgtgtgttagggtttatgtcctgaaagtcctctaaagacatttctataaagagttgaacattttgatatatgcttgaatattagtaattttctagtaattgaattgattgctgtatgctaatttgatatgtggaaagttgtttggaaaattctaaaacttgcttgctatttgagatgaa

SEQ ID NO: 377953 - DNA, 906 bp, Cannabis indica
actaataaaagaacacataatattggaaaagagcgctatagaataattttcaaaacaaacttttattataataaactaaactatataaaatagaataaagttcaaatctacaaagatatagctaataaatatctatgaatataataggaaaattaagattatgccatctatatagctagtgctcagtcactaattaaaaaacccccactataaaaagaggtagctagctatatattacacataaaccaatataacacaacataaaaatatctattgtgtagagaataacatattactccaatatattatctctttaataatttgttgttagtatgggaattgatgagattgagagagatcgtctagctaagataggagctgaagggtttgctatgatagatgagttgtatgggcgacccggcaggcgaccaaggaggaataatggttatggttcttatgcttatacaagccaaggaccaccaccactaccaccaccacagccacatgtatctcagccaccaccaccaccaccacattataatcactatcctcatcatcagcctcagggtcagggtcaggggtataatagtaataattaccaacaagtactacttcccatgatgatgagaaaccagcaggtgctgccggagccacccaaaaagcatggtgtctttataatttataagaatcagcagggtgcctattaaaatcatattattccagtactactttataactattgtatattatatattgttaagctatatatttatcagatcggtaatgcatgtttgaagacgaagtatagttcgatcagtacgtagttaatattatggggtaattatgtctagcgtttcaaaatcaatgcatgcatgcatatatatatatatgtatatatatatgcag

SEQ ID NO: 377954 - DNA, 8664 bp, Cannabis indica
tgatttttttttaaaagaaaatctttagagttatttatatatttttttttatttttttcatatatttttaaacatatttaaaattatttaataaaattttataatttaattaatattcaggtatataatttaaaaattttataaatacacaagtacaacacaacttgtttactagtacaaatgatatatcgaggagtttattatttgacatttaactgtttcttaactaacctaaacttaaaaattaaaaatttggatgacttagctaaaaataaataaataaaaattaggtagcaacgcgtcataataaataaaatttaggtagtattgccaaatattctaatttctaggggagaccgtgtttaattagagtgtccatagaaactcaaattttccattttaatttacaaaatgtagtaacacggcacgtgaccgtttataaagtgagtgctgcagcaatccagtagattctaactggattaagtcaaaagtaggtcaaccatcaaataggacacgtggctgagaaatcgagagtagttcaggaattttacgtgcaccgtcacacatacacgcacacacactctctctcacatcacattggcattggtttcatcgaccccaacacagagaagtggctctctctctcccttatactcgctcccttacagctcagacggactccccaaaacacacacactctctctcctctctctctctacaaaatcatctcatttcaaatcacttctctccaattttcccttatctttcttgctttttctctcccttgctacaacaatggcgtcttcctctctggcgactgcttcggctgtgaccaaatccaccactttgcatcattgtcatcacaatacctacaggtcttgccctccttccaaggtctcattccatctctctcataagcccaagctccgattcgtcaccaccaaggtaattaattgactaatcatatgtatagggagggagtgatctttgaatttattataatgtttgattttcttcacttgtttggctgctcggaaaatgttagaatttaattaagaggagattttgtttattattattatgattgacattgtaatccttagattttggaaatattggggtatcttcgtcagatttgagcttgattatttaaattatttaagcttggaaaacatatatggttgttcacttggaattatactgaaaaaaggctaccgttatgaaagttattacgatgatagaatattcaagaacgaaaagaaaattgataataaatcaataattgctctctgcatggtacggcctgtcgtttgacacatcacagtgcccagctgctgttttggcactctgctggttgagaaaggaagaaagttgttggcattttgtttagatcaattgacgtgtggttcactttattctatggtgtggcgtttacttataggtgacaaacaactgaataagcccaaatttaaaaaacttggaaagatctcatattcatctttttttttaatggactcttaactttcatggattaagagtctaagacagattttaaatttcatttaagtttgttaggattttttttattattattataatctcgttcaagtcgtaattggtgtatgcatcgattgtggaagttgaaacttgtgtattcataatagggtttgcagccaagtcgtagttgttccactgtggtgaaagctcacttgaatgaggtaaggtttttcaattggctttcattagaggatgttttttcaaatttccattccatggtggatgcgctctcgggctcatttctttcatttaaggttgccttggatggatcctccaatgctgcacctcctcctttacacaagtcagacccaaaacacccaaaaggaaaagatgctaaaccatcaagcaagccttcttcttcagttttggcgacggaggaatcaatctctgagtttattagtcaagttgcaagccttgtaaagtgagagaataaaatcttattgctttctgaaatcaattacttcagtcagcagtcagctatgcagatttgattggataatttattatctttgtttcaggcttgttgactcacgagatattgtagagttgaaattgaagcagcttgactgtgaagttgtaattcggaaaaaagaggcgttacctcagccacctcctcctcctcctcctgcagctacatatcaagcactacctccagctatggccccaccagctccatctgctcctgcacctgcacctgctctagtgtcttctccaccaccccctgcagcaccagcggctcccaagtctacaaagtcatcgcttccaccacttaaatgtccaatggcagggacattctaccgaagtcctggacccggtgaacctccatttgtaaaggtcactattctcccctgaggggtgctatttcaagtttgattaagcttcaaattgttttcgtgttgttctatatcattctttgttgccttacttgagagttctcttcaggttggagacaaagtacagaagggacaagttttgtgcatcattgaggccatgaaactgatgaatgaaatagaagtaagttttatttcgcttggcattcgaactccaatttatgcaaataaacttcatctgacaatctttctgcattattgaggccatgaaatgaaaagtatgacgaatgaaataattgttggtgcaataaagttaaggatttcaggaaactctggagatctgtatatatgaagtttgataaaagaaaaatgagacaagctcttaaatatcttctcctggtgcaataatttgttgcctgagtgttctgccttcgtttttttttattatcattagaactagtagtttcttttgatatgcttgtcaatacttaaaacagtaagcaacatatgaaactgaatttagcattgtatctgcgctacaaactttgtttgaaatagaaagactactaaaaatttaggagtctcattcatttattctcctaatgtgtctggtgtgttttttaggccgaccaatctggaactatagtagaggtcgttgcagaagatggcaaacccgtcagtgtggacacagtaagtaaactcatccgaagatatttatagtgacttgcatgattagattcttactcctgttgatctatatctttaacaattcctttattaccttcttttttttttcagcctttattcgtgatccaaccatagaatttcaatgagtaatcatgcatagtagttggagtgaccggagagtagaagtggtgctgctccacctagcaaagtttgtaacttgcggccgtggttgtgtgtcgtgtggtagaatattttggttgaaatgagatgtagttaacttaggggccaaataacttatttctgaatcttgaataccgtagctgagacgattttctcttgtgcttcacacccgatagtggttttcttttctttttttcccaccccaatttcttatatgttgtttggaacccagcaaaatgatgctgttagacagaggaactaaattcttaatgtctctcggtaccctaataattatcaatatgatagttttcttatctatctaatatatacattaaatacccaattatagaaaaaaatggtaagatacgtggatgaagagattattcattgctatgcacaatttctttcttgttggaacattttgatatgagttattaaaaaaatggaaaggtgcattttgaagtcgtaaattgtttgagaacacagtgtgtatatagtgtagatataagcaattgggttggctctaatggagctatgtggaagagggaggagttacacaaagcctcatctcaacactacacttataccacaatccaatggagctatgtggtgtgcattttattttagaaaaaaattatttattaaattattattttttatttaattaattaaaataattttaaatatgtttaattaattggcaaacgaagaagttttctcttcttgtttttcaataatatttccacgatctagtgttcccaaaattagaaaaatgattttctttctgtgtattctttatatatttgtgaaaataaaactatttacaaatatattatgcaagtatttcaagcagtagtatcatttttgagtgtggtatttgacggttttctatagtgtgtttcgatacagttgttcgactgagttattaaatcctaaggacaaggaggtcgatagtctgcttgtataattctagacaatgtctgacttaaatctgcaactcaattcaaattttattcaataaatttgtttctcttattttctctaacaattattttaaaatttctcaattatcatataaagtagtggttgaaatataaggttttccctttgttttgatttttttttttgggcaatgattgatttgattttttatttaaatacatttgatgcattatccctcctaaactgttgacattgcactgtggagttttaaactcgttactccaaatcgcctgatcaatggtgtgttttgacactttgcagttcaacatatacccctactttataaatcaatcattttaaaattttgtcgtgaatgtttagtttttttttttttaaagaatattggtttgagccttcaggttatatatgaatgtgaggtggtgtgagtgatttgaatattactcaatatatatatgggaaccgatttggtcacccctgacatgaaggaggaacttgtgccttccataaatccaaaccatccattatatatttataatcttgtagctaataaagtgtaaggaatgatagatataataaattgcacctgacatattgataaaaatttggacatgctataatataagtgctataacataagggcacctaatatataataacttattaaaatatactttctatcaaaattaaaaatatatatggtagcgtttaataatatttttttaattaattttttatttttaaaattagaaatgtattagtgaacaaaaaaacagagtaaaaacagggaagaagaaatcgtattatgttattcaaatagtaaattggtacaagagcttatatagtgtgttaggtaaaagaggttagttgcaactaactaaccgacctaatgaataactaatataacaaaaaataacagaatcctaataacctctaataggccccttcaaggtggtgtgtaaaaatttttaacacccatcttggatacaatgttgtgaaattgagtggggaagagaagcttggttaaaatatctgctaggttgttttgagaagtgacatgattcacatgaagtgtaccattggtgatcttttcacgaactatatgacaatcgatttctacatgctttgtctgtttatggaagacgagacttttagcaatatgaatagtcgcactgttatcacaatataaaatggatggcattttgatggagacaccaaagtcttggagtatggagatgagctaagtaaactcacaagtggcatgggtcattgatctatattcagcttcagtagaggacctggagatggtttgctgctttttagatttccaagacagtagagaatgtcccaagaaaacgcagtatcttgaaatggatctccttgaatctaggcagccccccaaatcagcatcagcaaaggcatggagttggaggggatcaggtgttttagcatgatagagcaggccctgccctggggaggttttaaggtagttgacaactttgattgcagcttgttaatgaggctgtcgaggctcctaaatgtattgactcagtttgttgacagcaaaactgatgtcaggtcgagtgattgtgaggtagatgagcttgccaatgagacttctatattgctttggatctagaagaagatcacctgattcattgcttaacttgaggtttggttctattgttgttgaagcaggcttcgagccaaggtgacctgtgtcttgaagaagttgcatggtgaatggtctttactgcatcgagcaacttcaagtcctaagaagaaccataggcttccaagatcttttagtttaaaagtagagtcaagagtagcaataaattgattgaggacatggatgttgttagtagctacaataatgtcatctacatatataagtaaagctagaaaggcatgtggtgtatttttaatatacaaggagtggtcacttatggactgttgaaaaccttgtgtaatgaaagtagagcttagtttagcataccactgtcgagatgcttgttttaaactatacaaaattttcttgaatttaaaaacggcattgtgtggtatcacccctttgggaacgtaaccttgaggtagatccatattaaacataaatcaccatggagaaaaagcattgtctatatccatgtgatgaaggtgccattgtttgatggcagcaagagaaaaaagtaatttgagtgttttaaacttagctacaggagaataagtgtcaaaaaatcaataccagcttgttgttgggtatatcctttagcagctagttttagcctattgattgatccatctagattgtatttgatcttgtagactcacttgtttctaattacatgttgttttggtggtaatgttgtgacaatccaagtgtggtttctttctaatgcatctgtttcagcatccatggcctgtaaccaggcagcttatttggaagcttcagcataagactttggttcaattaatgtgtgagatgcaaggatatcaaccctaaaaatgttaggaaatcgatggtaagaatcatagttagcaatttggatagttttttgattgagcaaccttatcacagatgtagtcttgtaaatatagaggttttgtaatgtttctaccagattttgaagtggtttggggcactgtggtatggatggagtgactatgggcattatctgatggaacatggtctgctgtgatgggagagttgaggattattgaattaggtgttgcagaagtgatatctactggtgtaggggcaacagaagtgttatgctggtttggtagcagcagaggtgttatctgctggtttggtagtagcaggaaagaagttgtcaatgttggcattgggattgttatttgtgagagggtatatggactcatagaatataacatctcttgagtgaaaaatgttgtcggattgaatgtctagtaaggtgtaggctttcatattatcgggataaccaataaaaatacaagctttggccctaggagacaacttgtggctactggtatggggagaagcatagcataaacaaccataattaattagatggtcataagagggaatcttgttgttcaagagttcataaggtgtcttatctttcagtattacagaatgagttctcttaattaagtaacaaaagttcttaccaggaaactctagtaaacaaggggtaagttggattgaaaagctagagctctagccacattcaatatatgctggtgtttcttttcaatagtggaattttgttgaggtctgttaacacaagatttgtgatgtagaactccttggctggcataaaaggctgttagtgtgagttccttggcattatcagttctcactactttaatattacatttgtaatgaacattgacataagtaaagaaattaaaaatgattgatgctgcctcagatttagctttaagtaagtatatcaaaatgtattgagaatgatcacctacaatggttaggaaatatctaaatcctttaattgattcaaggggataaggtcctcaaatattcaagtgaacaagatcaaagatttgttgtgaaaaattggtattagcattaaatgacagttttctttgcttgacaagtgacagattttgcaattaaaaatatgagacaaattagaagaacaatgcagctttttattgagtttatgagttatttttacagaaggatgaccaagccgagtatgccattggtttgtattaatctgcatattacaagtaatggaattcgaaatgtgtttggaatggattttctgctgaatgtagtagagatttccaagtctattacagtcccaatcttcaatatctatgagatgtcctaaatgtaacaatggttagaagtgaagtgtaaagtatgtttgttatcatttaggaaagagctaacagagaataaattgaaatggaactgggggacaaacaacacatttgttaaaataaccttggaattaagtatcacagttctcactctttcaattttaacagaattgccattaggtaaagtgacaacagcaacatgtttcttattgacaaaaaaagagaaacatctaatatcacaacatagatggtgggtagccccactatcaatgatccacaagttgtaagggaaagagctaaagttaccaaaacaattggtgacagctgcattagtttttggtgtagaagaaatggatggttgcagcagctgagtgagcatggaaatgatctgctagcattgctctgtggttaattggggggttgtggatcatatgattttgtggaggtctgcattgtatgagggttggttcgagatgtggtggtggaatcaggcctgcttttgcctttggcagcagtgtctgtgttctccgattgccatatctagggagaaaaccaatgaggaacataacatttatctcgaagatggcttggtttttggcaattggaacaagttggacgc

SEQ ID NO: 377955 - DNA, 5652 bp, Cannabis indica
atgtttattcacttcaccgtgattggaaacttaacaagcttccttatttgggacctgatattaggtgtgaatctcattcattttcatttctgttttgttaattaccatacacaatctttgattggtttgaatttagagaaagactgaaagaaaaaactcaaattcatatggttataatcatatataaaatgctagttgaggctagctccaggtatttgagtgtgtttgtttgtggggaggggacttgggttcattcaattcaccattataaattgataagccttaggataataaataaaaaggatacgagggtaattgtaatgggatattggtactatatatagagtggaggttgaatctattcgtacttcttttataatattttttggttttggcttagtggtgaatgaatttgtactgagcagtagctcttgtctttggctttgggagaatattgggtctcttgaatatccagtggttcattgtttgcttccttttatcttttagtatcaatatagtagcacttagctctattttctgctatatttgctactgtccttaccaaattgatagcaagttctatcataaatcaaatgcatcttaatgttttgtagacatgagtttcttagttactttgctggtttcataatttttttggcttttttttttatcaggggattgaataagaattttcagaagacatttcgtgactactaggagcaaggggaattgttgatgaactttctttcttcttacatgattatatgatgaacaaagatagggttgaacttgtacaatggtaactgtgaagtcttatgtggaaaaataaggtgaaaatctttgactgtcatatgtgagatttcttaacaattttcaataatgtcaatgattgggaacaattttgagtccttaattacatgttttacgagggagcatgagtatacatgctattaaacatataagcattggttagaaaaactcataatcttacatcacataataagttcatatgtgatcaattttattatttttatgtcattactttattgaaaaaaaaattagaatgtatattgagtgggtttttaaactttagaatgttgacaaaccattttcattatcctatctcgtggattcttaatcgccgagatagggtagcaatctcggcggtttgctaccctatctcggtggttctggtgtcgacgttgcacatatatgtgagcatgtggcatacctatctcggcagttatattttgaaccgtcgagataggtcatcatctctatgttgacggtcagatcctcggcggttgataaccgccgagataagtctatctcgtggatttttagccgtcaagataggatatttttttttgtagtgatattttaaatgtaataaataactgaattgaaataacaacatatatgtaaacaatgtctgatgttatatgaatacattaagtattaagtaaatataaaaaattcctaaatttatctatgtggtcttaatctcatattcgtatggaatgatcagtattattaagattgcaaaattaaatggtttgtagtaaaataaagtaggaattgttatatgatcttctttgacaaagaagatgatattctttttggtagaccatcacttaaaaactctaaagttaagtgtgtttgatctagaacaatctcaggatgggtgacttcctaggaagcatgtgagtgaggataaaacatgttggaaagactgattttggtttgcagagctagtcgtcattccaagaagttttcaaagtgacgtactcgtgtatagtatactgtgtaattatgagactacacaagtgaagtaagggaattacactaaaagtctcaatgataaacaatattaaagattcataacattatttgaaaaataataaataagatttttcgccccttatattttgacaattgtagagttttgcccctaaacttttttcttgttgcgaaaaattccccccaaactagaaaaatcgttgcaaatatctacttcagttacattctagctatttttttcaaaaacaatttgcttatctgactataagttactggtataattgcagtacaataatttatttaacaactttaagctactcaatattcagtttattgacattaaacataccatcattaattttaagaatgcacatacatgtttttataattcatcattagattatactgttatttatatatttctatctttaatttagactcttgaactatactagattaacattatattagtgctatattaacaaaatgtttaaggaaataagcaaaatgcaacaacatgagatatttgtagcaatttaggagtaatttttgcaaaaaaggaaaaatttagatggcaaaactcgatgaatattggttaaatcctattcattcataataaaaatgttgtacataccaatgaagaatcttgctcaaactagctacttaaatcttgagctcaggttttttctgtgaaatttctatcttctctttcactataaacaagtgagttgcagacagatacaaatcctccaaatatcaattccaagcaaagaatctaacactttcatttcataacttcattattgtatcacaattgcatgcaatattgttatacaaattttgcatgctatgtagtagtgcaataaaattgtcataaattttttacatattattttgtacttttgcaaagtgaggtacagacgtatcgccccatttgttcaacattttttttcttctctaaaattggagtttggacaccctgtttccattctctcttcgatttgggattggtggcggaaccttgtggcctatcataattcttctcgacgatttcaacttctcatttcgttcctcatccgttccctgctgccgctcaggctcaggaaaaggctgagcgcagcaccaacctctttgtctccggtatttcccttttaactctttttttccacttttctcttgatattgttcattgttatctgtgtcattgatatttttattttctattgctgtaaacatagttcaaatcattattttgtgattcgttggtttagctatctgtgtgttttgttagtaataagatagataaagatggtatttttttgctttatttctcattcagactgtaattaggaggcataaaatctcatgaatttccatttgagaaggaactttcgccaaacttgatataaaatcctctctcccgttctctctctgtctattttctttgggattttgcttctctccattagcatgtgtattattctgttcagagttctattattgctagtgtatcagtttttgtgatcctattttttaactgggtctctcattaagtatacaaacattcttttgtgaggcctcaataattgaatctttccactgatccctgtttctcataaaccagcatttgaatcttttgtactgtagtcttctgagtacgtctcttgttgcagactttgcaagctagcaagctggtgcaaaaggctcaaaaaaagttgctcaacatgttccatctatgtttgaggtacgtgctcaatccctcttacttggctaacttttatccctcaagtcattgtatgggctatgtgctaatattaactatttttaacaagatttagcactatcagttttacaggttgagaaattaggtctggctcaggagtggtttcttctccagggttatccggggtcggtgttctatagattagacttgtcagaggtagagctctacaattaaacgaactccacctggaatggagatgtgggacgttgtccacatcccggataagccccaaagtgcacccaatcaacaacccactggtgattttgatttatcacaactttcttctgcttcttctcacatcctacatttgttaagttaatttactcatatatgtatttacattatgtactgctgtgtttttgcagtgaatgtattggctgcagccattgagcctaagctcaccaatgcccttataaggtttgccccaatttactataactctttcctgccatctttcttacttttctctatgcacgcttccatataaactgcttcttttcttaggcgtttgaaccaaattgctccccttgaaaatcttcgacatgtgaagcgggtgcaaaagaaacaattagaaggaggtttgtttatggcctcaaatattttcatttttctctttctaattttcttttctacttttctacttttctacagcacgtttaaaggtttttttttttttttgtatgaacgtttaaaggtatttagtctttgtctacataaaacatatgtgcattaataataatacaacgaattgtttttttttctttttttcgtaagctaggattcccgtctaaccttacaatatttgcgaaccaggaaattatagcaattgctatgtggatactcaagagggactcgaatctcaggctttgtggaagcaaactgcatgcttgatcgtttgagctatccttcttgggcacaacgaatagcagtttattattgtcaagttattggaaaatctatttcctgaatttatcagctttttatgcctgtattttttctactccatttctgtatttgtcatccctcacattacagtgggggtgctctgctctgaagtaattgaactccagttctcatgaagcaagtcatggcattggttctggattggtaccatttgacttaccagtatttgtttgaattacttctcactctttaatttccttgaagagcagagacaatacttcgtttatcgaatcattaataaagcaatttggcttgtcccccagtagaaaattgttaagagttggtcctaattgaaattttgtcatactaatattatttgatagaccccagatatgaaaatacgttagaatagaattggtaaacaggtagaataaaactaacattattggaaatcagtgagaaaaacagtgattggcctagaattcgagtcttggcattttcccgaagagcagaagctctccaaatatagtcaaacaatttatggccctctttttgtttttttttttgaaactaggatccctacctaactctacaatatttgaggaccaggaaactatagcaatttgctatgtagctgctacccaggagggactccaaacctcagacctcgtgggagcaaaccacatgaccatttgagctaaccacgatatggccctctaattctcacctctcacatgtatatactaatttattcccatttatccaatacccatcagtacaattactctttaacccatccactttttttaataatccctcctttactctttcttattggtatctatcagtatttccacaacttggtgacttgacttggattgacaggaaatattcagctatcggtgatcttatgtgtagcttctgaagagagcaatgagtcatgcagtatgccagatggtgtgcaggagcttatcaattcataccagttgagtgtttttgaaacgaaagtgggtcttcttttcatgtcttataatatgtgttgcatttctgcttctaacttaatcttctaggtgcagagtgtattactttctttggatgatcataactcatatctttcgttataactatgtaaaataaataaacttaagaaaatttaaatctaaatg

SEQ ID NO: 377956 - DNA, 3260 bp, Cannabis indica
aattaattaattattatcttaaaaaagtaaacaaacaaaaggaagaccgtaaaagaaggcttaattatacaaaatcaacccctaatctttccatggttgagccattctctctcatacttaattttctataataacaaaccacaattttccatttctgcacacaacaaattaagacacacaacacatatatatataattatagttttgttgttaattagcattaattcatcatcatcatcacaaacatgtctcatcgttaatcatcatcattttatttcttcttcttcttaattattatagatatctatatagtagtttatattaattaattagataataaaaatacaaaaaataaaaaaaaaaaaaaaaagagatcatggccggaggaatgatatttggattgtgtttatgggtattttgtacaatattggcaaaggctgaagatccttatttgtacttcacatggaatgttagctatggcactctttctccattgggtgttcctcaacaagtcattctcatcaatgaccaattccctggcccaaacatcaactccacctccaacaacaacattgtcatcaatgtctttaataatctagaccaacctttgttattcacatggtatgtatatatataactatctaattacataatagaaatgagattttcgagtcacgtggtacttttaaattggttgacaagcctatcaagtgtcacgtggcttgataactaggtctttatttgtttgtttgcttgtgtttatatgcattaattatgcatggtattgcagggtgggaatccaacaaaggaagaactcatggcaagatggggtgttgggaaccaattgccctattcttcccggaaccaactacacttatagattccaagttaaggatcaaataggcagctactattactacccttccaccgccatgcaaagagctgctggaggatttggcggtcttcgcattaacagccgtctccttatccccgtcccttaccctgatccagaagacgactacaccgtcctcattggcgattggtacaccaaatcccaccacatcctcagaaagtacttagatgtgggtcgatccctaggccgccctgatggagtcctaatcaacggtaaaaatgccaagggagatggatctgatgagcccctcttcaccatgaagcccggtaaggtttacaagtacagaatctgcaatgtcgggatgaaaaattcactcaattttagaatccaaggacaccctttgaagctcgtcgagatggaaggatctcataccgttcaaaacacttacgattctcttgatgtccatgtcggacaatgcttctctctccttatcacagccaaccaagaccccaacaaagattatttcatggttgcctccacacgtttcaccaagtctgttctcgttggtaaaggtgagagtattccacattttaatcaacttatttgatttaatcacttgttgctaatcaattaattattaaaattaacaaatggaataattatttcaggtgtcattcgttacgctaccgctaaaaatcctgccccaccatcacctgagcttcccgaggctccagtggggtgggcctggtctttgaaccaattcagatcctttaggtggaacctgaccgcgagtgcggccaggccaaaccctcaaggatcttaccactacggaaaaatcaacatcactaggaccataaagctggcgaactcggctgggagggttcagggtaaactacggtacgctatcaacggggtttcacatgtggacccttacaccccactgaagttggctgagtattacatggtggccgataaggttttcagttatgatgttattaaggatgagcctccagctgagttggagaaatcgataacagtgcaaactaacgtcattaaccaaactttccgtaactttgttgagattatctttgagaatagagaaaagagtcttcaatcttggcatttggatggctattccttctttgctgtagcgtaagtttatataaatatatttattttattttattttatcccattaaataaatataaaaaatttaaatcctaattaagtttgccactaaactaaatgtatgaatagggttgagccgggtcgatggacacccgagaagagaaaagggtacaatcttttggatggagtgagcaggcacacaatccaagtgttcccaaaatcatgggcggcgatcatgttgacatttgacaacgctggaatgtggaatcttcgatcagagttgacagagcgccgctacttagggcaacagatgtacattagtgttctttctccagcgaggtctcttagggatgagtataatttgcctgacaatgccttgctttgtggcattgttaaggacatgccatggcctcctccttacagcatcaacgccgcataatcatcgtgatcatatgatgatcatgagcgccatgcatggcttcttcttatgagtacttctgctatttctactacgtactaagatctactgatgatgatgatcttaactataattaccatcatcaatcaatacttaattgatccaattttaatgtctttttttttgttttgatttttgttttgatgtaatttcttttttcatttatttagaaggaatattgatatccatcattcattatgatattctttgatttcaattatatattgggaattgagtaaagtaataagaaggtttctatatatatctaatttctttctttgttatataattatatataataattagtgaattaagtaattattgattactaagaacaatatgtagaaagattctaatgaatttatgatacaactttgactcatatacataatggtaatattgtaagaataataaaatgtttttaatgaataattttatagcacaagagcccaaaattatgaaattagaatgtaaatttcccaaaaataaattaacattgttagatatttaatagtgatatttcgttatatcaatatttgtctaatgcatagatttgttatataaatctgataaattttttaatattttttattattcgtatttatttatatatataattgtttgatttattttttgggcaattaccccatatactattttttaattttttttttcacatttacgatttgggtttctaaagtggttgcagcgctagttgcaacagggatttctgtacgattttctgctgcaatttaggttgcagtactagttgtaataggggtttctatgtagaattccgt

SEQ ID NO: 377957 - DNA, 7511 bp, Cannabis indica
gaatattagtttatatattaataaagcacatagtttgcattcttgtgtttcttatggagttggagttgaattccagtaataaaaccacacaatgtcaaggggtagaattaacagagttctaaaaagtagatgagttagtaaaagacaaaatattaaactttgttctctagcaatgtgaattatgtacaatatcaaggggtagaattgtccattaaatatcacaccattttgagacctttataatagtaagataagatacatgagacttttataatgtgagtaatttgaaatgcagtaaaaatttaaattaaatcatatgacagagaacatttagagtgtacacacaacacactgacactgaaaaacatttcttgtaaatgtcaaatcaaagttatttccaatgtcaaacaacagagcttttactgtctttgctctaaataacaacagcaagataataaaactgacaaggacctgatgattaccttaatacactggtgaatcctaaagcaattccttcccacattattagttggaaaaagggggtcgtcaatgtgtatcggatcaatgctacaacacaaagtacatcatcaagatactaagagagggaattcataacaatgtctactgattaaagaaagtgaaagataatagcattacctacaacctctttcccttttgatataaattccacttccccttactgagattcgcatttgtctaggatcaaatacattactggacaataaaatttataccataaatataaatataaataaacagctttttaagtaacagtaccaattgattaagtaacatataaaaggaaatcaacaacttacccaaagaaatatagaaaatccattagaaggcttccaaatttctgagagataaatagtgtaacagttagagaagcatgaaaaacatagattacgcagaaagaccaaatcaagcagttacatccaatattaactcaaaatatagatggttaatattccaaaaagaaaagatagatgactaattttagttttgaatgggtccagtcaaaaatattatttcagtatatagtgtgattcggtttatatataatctacataggcaacaattctgtgattcatgtccatgtttatttgctgtccacttatgaccaataataagaccgtcatcagaaggctagcaggagaaaaatagcttccacaaaaagcaaaagataacaatctttttttcttcgtttaaatagcttacttgatttataggtcggccaagatgatactcgtgttgaagaaaacgcgtaattagcaaactctgtataaaagaaaactattaaatagatgaaggaaaaagctactttcaatagcgaaaaaataagtaggattacattaactggttttctgatcaatcagtcgaagcagttcttaaagttcaaggtgcaaactattttaaccaaaagaacattgaaaatgacttctacaaggatttatcatatacgaatccctaatctgatcacaaaaattgcagttctagcatcttgcattaagcttatcacccatccttaattgcattagctatgctagattgtgaatttatttactttacatttttttctaataagatacattgatccaaagaaataagcagttcagcatagctcaccaaacagtaggagctcaaaccaccagaataggattgatccaagctccgatctgccaaaaactgtttaagtaccaaagcgagaggcatggccgcaggaaaatgctcagtcagctccttaacctgcaattttcaaattcgacataaaagattcactctttaacttagagcaaaaatgccaaatcaaacccaaagaataattgcaaactcaatgtagcacctttgccatacatcttattcaggtgaatttattcccatgtggataaaaatgataaaaccacatggtcaaatttcatatagatttatctggttcaaataatgaagttaaaggtaatatattcacaaacagagaagaattaaaatgtaccagttcagtcgtctggagtcctgtatgtgatggagatttgaaacttatgtcaagacgaactgatattgaatccttcttagtatcattgttcatctgtgagcattttggcaaagcagattcttctaaaacaaccacatcagcatgcacattagaaccttgttccaaagacaagtgagaaggttcttcttttggtgattgtacattagatgaagacgaggcaatgagatcacagggaacttctaccacaagcataataataggtatctaagagtaacaaggaaaagtggttagaagatgaagcaaaaactaaagcctaaaataataataatcataataaaaataggaattaggaattacagctgtattttccacagtcttgagagaatcatttttcacccagtcctgatttgctagatacctggctgcatgctggggaaacacaagcatgaaaatattacagtttttataaatattaaaaacaacagagaaacacaaacaggcctacatatatagagaccacttgatttatttgataaaaacatgaatccagcttataaaaaagaccaccactcgaacaaatatatgtactgtcaaacaaaaaaacaatttagttcaaaatatcctccaactagttagagcatgcataattatattgttcaaggcaagcctaaaaccttaaaattcatcctactaagaaataagaaccaacaattatagcacaagtatcagtctcaaactgctatcagttatcactaccacagcatcaacattagttcttttacaaattcacaatagccatttacactctgccaacgtgccaaaatacctgaaggcatgtttctttgataccattgcgaccctccaatattccagcttctttaattggttcctacattaatattaattcagcaattatttctttcatcataataaaagaaataagggagcttaataagcaatttgatcaagtgaactttaccaggttcctcacaggaggaagacaaaccacaaggtctacatcactggtaggaagagacaaaccagttgcattagaaccaaatatgttagtcctggaccttggccacagcacttgaagagaccgcgtaacccgcttgactgcccatgttatgtatggttttctacccagattttgtgcagcaaccttgtgattaaacaaaaaccgatgaaaaaagtaaaatcacatggatagatgggaactatatacttttagcattgggaaagaatataatggagatgataatgagcataaagcttcatacctgcttgcagaaagagtcaatctcatcatggaggaggttgtgcatcatagatagagaggcttttcgtgaaggacagctttgcaattcagctggctgcatgggcaaagcaacatctggctgcatgatgttaaaaccatccattagaatagattgttttgttaagtatgatttaaaagtgttataaagactataattacgtgttcctgatcacgggcaagatgcgacatagcaatcagccgatcctgaagcaaagctgcaggaagaggttgaatcattgagtggcctgaaaatgtagtgtttctccaagatggccaaacaacttcagctccatccctgtataaacaagcttcctccaaattagctccatcagggaaccaacctctcataccccaatgccttgggctagagctaccagatctaacagttggaaaccccctgtgtttccttgattcactcacaggagagggtggaggagggggtcgtggagcacgtgtaacacaacgcacgactggtgatggtggtcgtttcatccgaggttgctcacgcctagtgagagggacacatggacttttaacatcatgactacacttgaattcagaccttgacctatccctcctcatatttggaataatgattggaggtaaaatgtggtaaggaagcaaatctcctgtcttcccttcaacatcaacagatagctctgctaatgatctagacgcatcctcctcaactgttgaatcagtcgctgcagatggcgaatgaagcaccttgcctggcacctcatttccagtcataacatagcctaaggcctgagctggacccaaagtatcaaagggcgaacaaaaagaagcagttggtgaagtcaaaccatttgtactatatggagaagaaaaggcaaccatatcatcaacagccctattcatgtcagcttcacgccaagcccatgagctatcatccgaactcagtgaaggagggcgagagaatcctcctgcaggattatcagaagaattccagtacatcacaccaccaccaaagtattggttataatctatccctgagactgcatgaacatcaacttcatcttctgacatctggctgtcccagtcatctaatagttcttgcttacttgttaaatcaggtgggtcagtttggtctccagaatgcttcctttcatcatcaatggttgttccattaatagtaaaagcctgaggataatgccatcttgagatgaacccagagtcataattacgagccagcgatggagccaacccacaagcaccacgaaccattggatgccaatctacactcatgggcaatcttcgagacaaaactgggttacagcccccttcaatattcctctgatgtaatgcaggtacaaaggattgatgaaagtggtgatgccaattacgaccaacatccagatgcaagcgatcagtggcagggaggagatgtgggtaaacaggtggatagtaggtagaagccacaaaaggccattcatatggaaggccatctgaactacgtgaagttgatgtatcaaatacatgtctagtctcttgctttagatttaaaatgggtttctctttaatatcaaaaaccctgattggtttctctggcgaaactgatttttcatcaatttcactattaggtaaagatttcttggtatcactatcttggaccccggaggcattggtgtccattgtatgcaaagaagaagatattgctttcaaatctactgtatgatttatagtttctaaggtattattttccgtaaaacttctatttaactgataacattctagtccaccattctcttgaatgattttggtggtttggtcatccacgataggtccacttacagaaccagatgaaattgtgtttgatggaggggtatcattctctgctgaattctcacctgaaacactctgtaaggttgaatgaacagacacgggacaagttgctgcctcatcttgagaaacaacggataaagaggaagcttccattagtggtcgtttacaattggaccattcaactggattcttgaagacatttactttcttattccctttttctcttctcttcttccttgtagcggattgagcttttccaacactaactgctttggcaggttcctgatgacaggataacaatcataaactattcaaaccatcaagaagatatgacaaccaaattaaacaactagtgcaacaatttctacttttaatgatgtatcgttgcagatatccttcccctgatcaacatcaggtgtcttctcgggctcatccaactctgacttctctttaccagacaatgtacatccaagagcctggcataacaaagagttaccagttaagactaactcttctcaacatgcgttgtctgtataagttactacagaaaacctgccaaggaagagggagcaagaagataccttgagatgtttttcacgcgaatcaatagtaacacatccccctgaaataagatttagcttctttgtattacgggtcctcccctttttcttattgctacaagcaccaacctttcctttggacttaataggagaggacttaacgttttcttctgctataagttcaagtttagtgcaatcaagcgaaataaccattagaaatcctcgcacttttctaagtataaaatcagaaatggtacaaattgaactcattgtgctgaagaaaagtttccctttatcatattcattatcctgacatagtgctgcagtcatcgtaacaatatcaagaagcacaaataaactactgaaggcattggataaggaagcgggttttccagaaagagaagctggaacaacatttgacccaaattcaacatcagctgcaagtgttgggatagtctttctcgtatttacagtagagtacttgtacctcattggtcgttccgctcccgtgttgaagagccaaagctcatcctccgatgcactagaagaagccttcaaaatctcacgacactgaaattaaaagtttcaaacttcagtaacatttcaataaaaggcatcataacaaaaaaaaaaatcaatgaaacatgctgctacgaacaaagaaaacacaacacttcaaaatgatcaattataacagataccaaagatttcgctgattttcccaaaaccgcagaaagagtcttcctcctcgttgaagcatccaaattttcccaccagtctacacaacccttcttcctccaaaacacatttgccgccacaccggcagcactcactttctctttcaatttcacccctcttttcttcccattactactattaagccacgctaaccttaaagccacctctaaccgattggccacaaaagattcgatactgtaataccctttttccttcaaccactccaattcgacccaattcgaacccaattcattaacttcgcctctcaaaaaagctccattcgaaactacatccatggcctccacaaatcgatccaaattctcaaccaactcctcgctcacagttaacgtattcaaacatttcaccgacgacgaacactcctcgatcgtctcaccttctgttgacgaaaatagccgcgtggactcaaaaatcaacctctctgattggttcgactcggaaaccctgtaaagaagaccgtgcgacctcttgaagcagatgcttgggaggtcgccggagaggagatcagggaggacgatgaagaatccatggccgcgcctacgaatagtaccgagcatctgaaggagaatctgaatgaagttggagtcgatggccgtgaggtgagcctggcgctggtggagagtgagagatgaaaaccatttgaggatggaggacctgggattagagattgaattggaattggaatctgaaaggcgagagtgagagtggtagagagagatgtgggatgttagtttgtcaacaagttggttgtgagttgcgagcgagttcggaagggaattcagctctggtttcgacattttcgatgctcgacgttcgcctcgtgcatacagacagaggaaggaacagaaagagacccggagcactaaatcataaatttataaaatcagccccatttaattatacttttattttttaattttaaaaacagaaaaataggaatagatttttgaaatttttacatgaaaaatctattttgcacaatttattacctaaatacctctacacgcctatgtctacatttttacttacaaagttggttttattacacaaataccac

SEQ ID NO: 377958 - DNA, 1563 bp, Cannabis indica
ccagcagcacttggaaagtgaaaatagtgtctatagacaggtaagtcccgtttcacaaagtcatttaatagcaaaaatacttgttgcttagtcgagtaggagttataactgaacttcattaactacattgcagaagaatttaatgcgctgttgtaaagagtaggatttactcttgaaaataaatgcacactcaggtgaaagctaagaggaaacagttgtgcattacgtacaattttttgatttactttatttgttttgttaagtacaattcaagtaagcgtattaaattgcccattttcggcctatgaaattttgcccacttgtcaaaaatgacatctcttatcccaccaccccactcggcttaaaaaagaaaaaagaaccaaaaaatcgaagtgactcgaaacctatacaaaactaaaaaagaaagacagatttagggggaaattatatgaactgaggtggatggtaaacgacccaaaaaaaaaaaaaaaaaaagaacgaccccttcaaacaggtcaagaacgagagatgatacgtgtatacagaaactcgttccacgtgtcaggtaacccaggaagacaccaatgtatacaatctgcatacgtggccgggtcagcctgctgttctggggtcaacatcttaccctgtcgtatggtgtggactgaagtatgtgcatctttacggtactcagaaagagttgttatgttgaggaagtgaaccggaattttgagcgacccagttatgttattggctatcacaaacagccgacggtctgtccccacttgaattgggcttgatatgttctgtataggcatagtttctttggcacattttatgccatctggattatcccagtccaagctcctatattcaattttaaaaccagtaaataaatcagttagattataaatagagacacatgtatgtagtaatatattacatcaaacacaagcaaaagcacgagcacatgacaatgattgtttgtcataagggtaatttagggtacaaagggacgaccccactactacaaccaccaatgttaggttcttacttgcttacctaattagaagtattaggttcgttttaagaaggattagctacaacctacacgacctataattatttggtatgatatgtcttgaattttataatatatatttagttgtacttggaaaacaataaggcaatttttttgttttatcgtatcctttaaaatttagttgttaacaagccaaaagaacatgcccaagtaagcgttagttacatcagtgaacttaccaaagccaaaatttgggcaaaactaatttcaatggtaaaagaaaatcagatatagaaaagaaaaaagaaagtgtgaagagcaaaagggataagaaaattattacttgatatgaagaggggacatgctactaaagaagacagtagtacgattgggatctatattttcgttcacccaattagcccatgtcctcaaaactctcccatatgctactggccgttcgatctcatcatactctgtggccccttcatcgaacgatcctcgtctttttaattaatcccacaaag

SEQ ID NO: 377959 - DNA, 3551 bp, Cannabis indica
ctcatcatgtcttggctcatgaactctctgtccgaagccatgattggccatgttctacagtgccaattcgcctcccagttatggaacactttttttgctctgtttgccactcaatcgaaagccagagagcttcaacttcgatttgcaatgcaaaccaccaagaaaggctccctcaatattggcgagtatattctcaaaatgaaaaatcttgctgagtccctggcagttgctggacatcgtctttttgatcaagaactcgcaatgtacattcttggtggggttggccctgaatatgaaacaattgttgtcttcctcacagctcgtgctgaagctcttactctagaagaagttcaatatatgttacaaaatcaagaaatgcgaattgaacaaaatcagcatcccactttagatcttccccaagcaaatcttggtcatgtcaatagtagaggtgttcctactggacggggttcagcaccatctcgtggacataacaatggtcgtggtcaacctactagtcgtggaaattccactggcccttctcgtggtgctgcaaccggtcgtggacgaggcaacagaccagtatgtcaaatctgtggcaagatacgacatcttgcatataagtgttatcacagatatgatcccgaacctgctaatcctacatccaatacaggttcgaataacaacaatcctcaagctctgatatctgactccactacttcaacagatgacaatagatggtatgttgatagtggagctacacatcacatgacctcagattctcagcagctttcaaataccactgactacaaaggcaaagccaaaattacagtcggtaatggttcttctattcctatttctaaagttggttctacttcagtttccactaatgtttctaataaatctttagctttaaatgatattctttatgcccctgctatcactaaaaatcttcttagtatttccaaaattacaacagataataacatcatcttgctttttgattctaattcatttctcatcaaggacaagacttcgggccaagtactttttcggggtactcttaaaggagggctatacaatcttgacctctcaaaggctttgcctgtgtcaactacatccacaaattcctttactacaccacaccaggagctttcacctgcaccaaaaactcacctactgctatatcagaatctcaactatggcattggagactcgggaacccctcacataaaattctaagaacagttgtaaatgggctcagttctaaaataaaatgtaatgatctttctttttgtgaagcttgtcaagttggcaaacttcacagcatgacattctctagttctgtacctaaaacaactgctgtatttcaattaatacattcggatgtatggggtccctcattttataattcaatggaaggcttcaaatattatattagtttcattgatgattactccaaatacacttggattttccctacgacacttaaatctgatgttactactatcttcaaagaattcaatgcctatgttgagaggagttttcaaactaaaataaaagcattacaaactgactggggtggtgagttcagacccctcaaacctttgctgcagcagttaggagttaagtttaggcacccttgtccccacacacaccagcaacaagggcgtgcagaaagaaaacataggcatgttgtggatattgggctcactcttcttgcacaggctgacatgcctttaagtttttggtgggaggcttttgttgctgctacttacaccattaacaggttaccaacacctgtgttgcatctcaaaacaccttatgaggtactctttcaccataaaccagattattcttttttaaaagcttttggttgtgcttgctatcccttattaaggccctatcaaagtcataagcctttagaactgcgcaatacttatttcttgaatacaatactatgcacaaggaatacaggtgcttgcatccctctggccgcatctatattgccagaactgtcaagtttaaaacacttttcacatcctcatccctaccaacaacctcacaacccccaactcactcaaaccagcagcctatttacactataccttaacctgtcaccaatccagacacatctaaaactaaaaactcctccttgccaaatacatctcctcctatacaaccatcaccagcagcagcttcacaaaccccaattccaacccctgttcaaacttgccttgctgtacctccaactcagaataacaccactcccaccaatatagtttcccctcaaccacaacctgatcatgaacccccacctatcattacacctttaccatcatctgggttacaaattaatgcccctgtagccattccccaaaatacacactcaatggtcacaaggtctaagaatggaatcacaaaaccaaaagcctttacaactatatctaaagtctctcacgaactaacttctctcaaggctgcactccaagatcctttatggttcaatgccatgcaaaatgaaattcatgccctggtcagaaataaaacttgcattctcgtgccttattctccagggatgaaagtagcaacaaataaatgggtgcatcgtattaagtataactcagatggttcagtggatagatacaagtcatggcttgttgctagaggttttcagccaacaccaggtctggattactttgagacatacagtccagttgtcaaaccatctactattcgtgttattttcacacttgctgcctgcaatgattcgataatccaacaggttgacataaataatgtctttttaaatgggaagttccatgaatgtgtctatatgacccaaccaccgggattcaaaagtgatgattatcctgatcacgtatgcaagcttaacaaagtcatatatgggctcaaacaggcacctcgggcctggttcaacaaactgaaaacatatttgatttagtcaggttttcacaattctagggctaacacgtctctgttttttacaagaagacacagcaaacttctacttcttcttgtttacgttgatgacattctcatcacaggggaagacatgaatctcatcaacaaagtcatctctgatctgaactctcaatttgccttaaaaaatttaggccctattagctacttcttggggttcgaagttaccagaaattcaacagggatatatctcactcaatctaaatatatcagagacttactcagttccacaaatatgaccgatgccaccccaactcccactcccatggtcctgttgggattttatgccctaaataaaatcttttacaatctaatctgatttgtcaacaataaaatattaaaaaacatttatgcttacatgttatattcatgtttatggtttaatttatatatatatacacaaaatctgttaagtccagaacatatagacatacacaattacagtgatgtcaacacagtggaatgtgattgtgattatatgcttcgaaagacaaagtccctgtttcatcagttcattagatttactctgatgtgataatcagcgatgaagt

SEQ ID NO: 377960 - DNA, 3595 bp, Cannabis indica
gcaccacacggtccctcacgccgccacgttcgtcaactctcaactatggagtaaggaccattcgccttattcaattttctcttagagattttatcgaacacttccccgcatcaattttctctcaatgcgacggtacccaaagtttctttcttttcttcacttagaattgttttattttagttcgaagaaatcccaatttgaaatcaataatgctttcccttaaactgaagcatctcgccaaaaacaagtctagttctgtttcaaaaacccaactttctgtaatcctgaacaccattaccaatccaatttctccttcttcttcttcttctcctcctcattatggaggtaacggcactggttctgcaatttcaactccatggctagcttcaagatcaactacaacctctcaagtaagtaatgacggtattagttactatggtcgattgtccatggaccctgtagtggtatcccttaaggaatggtttaagactaggaacaacaacgcccttttctatgagatcttcaaaatcatcggcagcaatcgaaacgagggcgacgacgtgtcgtttcgcatcacagatttggctctatctaacttgaggatccatcttgacgagtcgtttgtgcttgatgttctaaattatgggaaatacaaagacgtactctcttgcctcaagttcttcgattgggctggacgccaacctggatttgtgcatacccgtgccacgttccacgccattttcggtattctctctagggctaagcttttttctcttatgctggattttcttgatagctatatcaagcaacgttacgttcatagggttcggtttcataacacattggtgatgggttatgctgttgctgggaaacctcaagttgcactccaactgtttggtagaatgcgctttcagggacttgacttggatgcctttggttaccacgtgcttttgaatgctttggtggagatggaatgttttgatgctgttaaggttattgctaagcagattgaaatgaggggttttgagagtgagcttacatggtctgtgatggtgaaaaatttctgtaagcagaagctctttgaagaagccggagcttatcttcgtgggttggttagtgatggacggtccttgaagggagatgagcttggtggacttgttacttctctttgtaaggatggtaagtttgagcaggcggagaagttgatcgaggagtttaaggacaccgagaccgttcccatgactaagtcctacgatgcttgggtaatgaatcttgtttgggctggtagacaagatgaggcattggagtttatgaagaagcaaaggtttttagatgggtatgttccggatttgtttcgatataattccttgatttgtaagcttttgagggagaaccggcttaaggatgtgtttgacttgctgatggaaatgaaagagagtgagctttccccggatgatgtcactatgaatgctgcattgtgcttcttttgtaaagctggtatggtggatgctgcagttgaactgtacaatgcgaggtcagagtatggcctcactcttaatagcatggcctacaattttttgatcaatactctgtgcttagatgggagcactgataaagcatttggtgtattgcaagattctgccgagcaaggttattttccgggtaaaaaagcaatttctatactagcagatgctttttgcagagagggaaaacttgacaagatgaaggaactgcttcttattgccttggaacgaaatgttaaacctagtgcttcaacttatggcaagtttatatcagctttgtgtgcggctaatagggtagaagatggctatttgatatatgaggaactcaataagataaacgaggttgccacaaggagtactttctttgacttaatacatggctttaacagattagataggggagatgttgctgctaaactcgtcattgaaatgcaagaaaagggttacaagcccagtcgtaccttgttcagggctgttgttcgttcccttagcagaatgcaggaaccagaaactcaattcctcgagctgttgaagttgcaaatgtcttgctctgaccccagttgtacaatatacaactttttcatcgaaggtgctggatacgcaaagaaacctgagttggctagaggagtgtatgagatgatgatgaagtgtgggataaagcccaatttgcaatctgacattattatgttacagagttatttgaagagtgaaaaaatcttagatgctgtaaatttctttaatagtttgcgcaccagcagagtacttggaagaaaactatatgctgtcatggtcgctggtctttgcaaagcgaacaaggtggatcttgcgcttgaatttttgatggaaatgaagacagctaaagtgactccaagcatggagtgttacgagttacttataaagtcattgtgcttaaatggaagatacgatgcagtggtgatacttatcgatgatttagagaaaactggccgttccattacaccgttcattggtaacacgctgctgttgtattctttccaaagtcaagagctttatgaggcttggactcgtttgaaagaggatcaagcagagaaatttgatacctcaatgcttagactgctaattggtgctttctgtggccgtattagggtgagcgaacaggtagaacacttggaagaagtgattggaaattgctttacacctaatgtattcacttacaatatgttgttgagaaggatatgctcgatcaatatggacagtgcttgtgagttgttccttaggatgtgtcaaaatggttatgtgccggatcagtttacctttgatatcttagtacaaggtttttccagacatgggaggacaaaagaagcacacagatggttagaagaaatgcttcgcagaggatttactcctgctgagtcaacaacaaagttaatgtagagtgatctggtttctgaatgagtctctctcaccccaatttttgttaagggactagaagttgaaaacgatcaggttaatttcttctcagtgttcttgtgattgcaatgtatcaatgaaatgaaataaaaaggaaagaagttttcatctctatgcatctcttttattgtcttctctttcacttttgttagtagaattggattttgtttgcggtagattcaaactatataacaggagagaatagtacagtaatccttcaattgtaaatattgcagtagtagtaagattcaaactataggtttgattttagtataaactctaaagattagcgttgtttctttctcttcttttgatggtattcgtgacttaatatcagctaccataaaataaatgtttgaaattcatctaagaccatgatgacaaaaaaatagaattttccttgctagatgaacattgttggttattatctctgttaccaccgaaggcatcataaattttaagttcaacttggcatgttcgtttctacttccacatttttctatatagaatttcatcatactgacacttaaatgaaattctggacttcagagtagggctgttcatccgattcaatccgcacttttttggtcaaacaatatccaatccacactaagtgcggattt

SEQ ID NO: 377961 - DNA, 1502 bp, Cannabis indica
ttttttaaaaaaaaaaactcttcaaataaaatgtaataaaaaaacggaagagtcatgcaatttagtttattgtaatcttaaattgagtacaataaataataataataataataataataataataatgaaatgttttttttttaaatgtaatgaaataatttattaaataataataattaatgaaataaggaacaaaaatgttatcttttgatgtaagtgtgtggctaggaaaatatagtgaaaaagcctgggattctaattttcagtgatttctttttgaaatatcattctttttttttcttcttcgaaaaaataaagtaaaatacattttgtaaagaaggtaataaaggggtcccaatatagtcacacttttatgatttcacaaaaaaaataaataaataaaaaaatcacttttatcttgtactgtctacgattctccatcactaatgatcactcaataaaattcaaaaagaaaagaaaaaagaaaaaattggatcatttcactctctcacaagctagctcaattgtcacttctaagttctataacaagatttttgtatatccatagattttattacatttataagatttagatttttgaactcaatctattcttatatttgtgtgtcatttcatgttaggtaaaattaattattgtaccattttagatttttttttttttttttgcaaaataaatgaattctcattaaaagacatcggtcaaaaaaaagagaaagaagttataaacaattacgagtctgattctagccaccaaaccataacaacatctaaagtaagagcaattttcgcaaaattatgagttatgaaattggcaaatttcatgtcgtttattaaccccaaagattcaaccctcgagaggccccttatcactacaagaaacaaaggctttaggggtgaccattttagaggcgagacaaaatcgtctctaataatagaagtattaggggcaacaaaatgatgtcgcccctaaaagtaggtgtttaaattttttttacgtctatactatgttgggcgacaatatttacctctaatagtattaaaattgttttttttttaatttataaaggtgacaatgtcatccctaataaatttaaaatttattcgttgcatttgaacgagatttctctcgcttatagcattaggggaaaatgttgccctaaaagtcaggtatttgacacggttaggttattaggggcgacaaaaagtttacttcattaaaaaacctagaaggtaaacttttctcagagccccagtctctctcttactttcattttctttttcttccacaatctatctgaaatagttttccccaacctatacaaaaaaaatccccaccctcctcccaagtctagatctatcgtccccattccaaccaatcgtccccctccttgtcatcagtggcattttgagtgttgtcctcattctccccacgtttcgtgcactgtcctcattttttccagtgttttgcatgctgccgccc

SEQ ID NO: 377962 - DNA, 3554 bp, Cannabis indica
tttaagccgccaggaaaggttcgagggccaccacccataggtcgggtaaggatcaggtttgagagaagcttggaaattgttttaggacgttctagaaggatggaaaaaaacatggttaatggtgaaaggaaaagaaatctttggtttcagttaaattcagttcagacactgtgcgaggaagaagaagaagaagaagtggggtttagggtttaacgaggaacaggaagaagaaaactgattcgaaaaaacaaaaaaaaaaaaaaaaaaaaaaaaaaaaaaggacaatataatttgcaaaacgacaatattgttaaataacgacaacgacaacaagaaatgcaatttctagaacaaacgacgacgtcaagttgtcaacacaaccacaatcgtacattcgtaaattcgtacattcctactctcaattgtcttcccaccaaagagaaaggattggatcctccattcccatacctgatatgctatgcccctctgttcctccttaattgagagtagtttgcatttgttttgggattgcagttatgcaagggcagtttggttcggatgtagctggagtatgaggactgatactactgctaccaactgggaggagtggctagattggttctcgaaatcagacaataggttggccaaccttgacttcaaccaatgcttgggaggagctgctattgtttttgacagcatatggaaggagcgcaataaaatcatccatgaagggaattcaactccgattgcagtcactattaactttataaactttaggctttgtgagttaattccaacccgtgattcttgcgatgcattgcaatctgcttggaatcctccgcctaaaggttggttggcgtgtaactctgatgttgctataggacactcccaatctgcaggagctgttgctttccgagatacttctggaacgattctgaacttgctcactttacggacgaaccattgtgatcctctgcctggcgaggttgctgccctgtgcgaaggtgctgtagctgctgtcaagctaggatacagaaacattattttccaatgtgattatttgaatgtggttactgcattgagaagcaatcctgcagagatacataagctacacttcaatatacaggacaaggtggaacactttctatctcttgttgaaaacttcaacctttgggaagtccaatggatcccaagaacttgcaatggtgtggcccactcggtggctcaatgggcaagtcgaaacaacaagtttggtgttcttgatttggccaattttgatgatttcctgcagtcgtttactgcagatggtcatggttccatataatttgtttgcctcgttttgtttgtttagtgtgttggcagcttttagtgttattagttgttgtgctagtgctagtgtatttttgtctatttctcttgactgttttccgcttctgcttcgggctgtagcaaggcgtctggtttgtcttagcctttggccatctttgttgcttgtttgttggttcttttgtaaccatttatcaaaaaaaaaaagctaatttttatttctttaattgaaaaaatgaaaacaaattcaagaaatcaggcacgataaaaacttttgagaaattctataatgcacccccttgaaaaggatacaccgatacatctctctctgttttagtatccgaaataatttttataagatatcttaaatagctataacgtacatgaatatgaaaaaaaaaaaaattagactaaaataaaaattttttttagatgccgacacaagtggggtgcatcaatacatccattttaagggtgcattgtagaatcacccaaaacgtttttttttaggttttctataattatgagaaaaattaatagagtttatttttaggctaattagcaattttctccctcgaattttgacatgtacaaaatcatgccccctgaacttttttggccgttaaaaattacccttgaactattaagattgttgtacatgtcaaagtttgggggaaaaaattcctaattagccttatttttatgagtcataaataaataatgcaaggaagtatggttttccactatacttctcttccctgtaactccggtttgtattgattgtcctccttctttgtccgtgtgttagagtgtgtgtttattccctttgttctgtgtttgtgtgttgtgtgttatctacttccttttattgctctagtttgctttctttccctgccttctttttattttctctttaatttctctttataattcgtgctttgtctttcccttggacttaagggtttcttttcctttgtctggtgcgtgaggttctttgggtgtgttctgttgtgttgcttttgtcgtgtgagtgtgggtgggtcttccctcgatattttcatttatttgttggttggtgggtttgtcttttgttgtctgcctttatggagttaattagctctaccaactccccccttaaaggcaaatgcttgtcttgtattgatgctactgtttctttggttccatgtgatacttctcttaaggctctttctactttttgcttggttggaaaagtggtggcccctatgatagtggacaaagctactattaggaattttgcagccaaatcgtggaaatttccagtttccattgtggctttgtctgaggtttctaaaaacaaaaactgttttgagtttggatatgctcttgttgaagatagaaaatgggccttggataatggtccatggtgcatttgcggttacactttcattctacaagcttggactcggaccggcaaaacttgactgtatgaggctgtgggttcaagtccacaatcttcctcatgaatatttcttgattgctaatggctatctatttggtggacaggctggtaaagttattcaagttgatctttgggaagataagccagccaattgaagcacatttctaaaaatcttagtggagatggatattaatatgcctctgctctccggctgtttctttggtctggtttcaagagttaaacgttggctccaatttaagtatgagcatattggtatttttcgttataattgtggttgcttgggccatcaacagaggggttgttctttgtcgtctccagttactgtggctaacagcaatagagtttcctttcccctgtttgggtcatggttgtctacttcctcaacttacttggatgtgtttttgggtgccaatactttcactctgaatcttacaatgtcgaaaaaattggtgcctggattcacttgtcaccgtctccctctagcgatcgctggggcttctcacgatgacaatggtgggttcaaggggatggctcccaatggttcccgtttctcgaggcagagcaagatggtgactaatcgtgcaatttttcccgttggtacttctcactttctctgcatgcaaaatggatccccaagtcgaggtctacgtaagttgtaccaccgttatctggttttggtaataaggttgatgttggaggtgatggtatgggaaatgtgttgggttttatgccctaaataaaactctttacaatatgattagttatc

SEQ ID NO: 377963 - DNA, 1677 bp, Cannabis indica
aactataatataatataattataaaaaaatcatatttataaataaaaaaaattaaaaaagattataataatgtacttttataatttcttttcttttaaatttttaatctattatttaagtttttctaataagcaagtacagtagatataaaaaattattctgaaaaaaaaaaacaaaaaaagtacaatgtgtattttaaatcatagaaggtgaaaaaaaaatatggtagaaaaagtaaatagtaaaaaaaggacaagttacaacgatcaaagggaaataacgcacacaagcaacaacgttagatggtttagattagaagcggttgtagagttggagtaatttatcacgtgtgggtacaaaaacagatctaaaggaactaaaaatattcaaattcatttatcaaaaaaatatatatataaatatattcatgtttatataattatttatttattaataaattaaaaatatatgctttgcttgttatcatgggatgagaaagatccccttctccttcatcagatctaaaaagaaaaggtaaaggttcttcgaataggatcaacgagggtcacattcgtcattttatccctaatgcagacgtatttgtattcgagcagttatcccgataagcatgttagattgttagcacacttttttctttcttcaatttaaaataaataaaaattgggcacaaaacttgtggtcctctttgtttttttaatttccttctctcttttggagtattttgccacgtaggaaataggtccaaaatcctacatggaaaaagggagggtctctattggttactttttggtcaccattatcataataagccataaaataaaaaatgtaaaaaatatataaatatatttgaaacgagaaggaatattcgtgaaagataacgttgacggtggagggcaacaaggaccgagaccgtaacgtaacgtgggtggtggagaggtgagatagttaacgtcgttaagttcggggataaggagggagggtatgtgggtggtgggaccgattggaggacttggtgggccccaaattaaggggtcaaaaaagtcaaattcataaacctggggcgatgtagaaagaatgggacgtaccacggttaaactaagtgatgacgtggcatgaatgttatgtgtgtattttaaacacgtgtcgaaggagatggtaaattggcccaaaaaacatggctctttttctctcctattacaaacggggttatctttacacgtggcatgatttaagtggcttaaatcttactcttcagtttcaggagctctctattccgtcgccgtttgtttaggaagtggtcgttagggacactcggctaggagcattaagttatcaacacgcaaagattctttatttattattttaataattttgcaaataaatatcaaagtaaaccgacttcctattgtttgtattttaaaatgtatttccattgcttaaaaaaaaaaatcaaaaattattgtgtggtcgccttgtattagatctttgttttaagaatatgtagtgtttttaaaaaggtaaatgttattgggtgattctacaatgcaccctttaaaaggaatgtacttttgcacccttaacttgtttcggcatcaaaaaaaaattttagtctaatttttttttatattcatgcgcgttatagttatttaagatatc

SEQ ID NO: 377964 - DNA, 1416 bp, Cannabis indica
tagtaatacatatgattgaattttgttatggaattgacagagatgttctgagtttgtttgttggtaacttgtccatcagttcagtgataaaattgtcgtttgcaaattgctatgaatgatagctttactttgatggtagttttttagattgtaatgcacaaatggtttttcagattcatttcttgcaaagcatagaaaacattgcttatgtgtctttgggataattctcgtgctctacttatgaatcatcttttggagataatttggaaataaaggaaaggagaagattaagtattatgaattaggtagaggatttaaaatactttgaaagaaactttggatattgtttcttggcaaacaatgtgcaaggaacatatacttgaggttgatcttaaaccctatgaaagtgttgtttaagttaatctgtccatttttgaacctgcaacccacttatgttatgcttgctagaactcccttatgaatcatgaatctgaagtttgtttaggtcttttatgaagaatagttaactagttatagcgtctatcaaattgtatatacatttctatcttttcgcctcccattgtttgtacattagtttcagagcatactgtaatggagtgctaaaaagtgtagtcactgtggtgtatatgcatatattttagtccatcttcataaaaaataaattttaatggtgatgtataaaatgatccaaacttaacacatgctaaaagttgtgctaaatataatttatagactaaattttacacttacaattaaaaattacttttttatttagtcttttgccaccaattaaaataaaaaaaaaacttttacattttattcatatatttaataaggtttttatatactttcaataaaaatataatatttttgttgatttttaaaaaagtaaattttgcattagagttttttagtaaatttgaataacattaactatggtaaaacgcccaattggctttggatgtgtccctcggttaggtggatgaaaatgggtatcaacgggcaaaattgtacagcagacacaatttgatttgaaatattctataagagagttttgtttgccgtttgcactccaacaatttataaatgcatcccaaatcaataaaataaaggctaattagtaatttttccccccgacctttgacatgtaccaaaatcatgccccctgaacttttttggctgttaaaatgttgtggacattgtcccacatagaataaatggtagagaattgagccatatataagaacatgagctactccactcattgccaattggttttgagatggaaccccatgattcttaacatggtatcagagccatatcccttgcgggcaagcgatcctatccgatccgtacttacacagatagtgaccatgtccactctgatacggttca

SEQ ID NO: 377965 - DNA, 2494 bp, Cannabis indica
ttgaaaagtgctaaaaaataatattacaccacatatttagtactttattagagatgctctaatatgaattgctatgtagatttcttacaaaattaaaaaaatatattttaaaatataaaaataaaaaaacttcagtaaattttgtgaacacaatatttattattgaaatttttgttgagcatttagtcaagacatatgagaccaaaatagtactttttcatacatttaatgttttttactagtcttttctactgtatgttatttttatttaccttcttaaatttaaaagaaaggaacctcataaatattacctttgaattaaatattttagggatatgatcccaacaacacattccatttatgcaatctcaatagttttcgattttttttttctgatttatctgaaaagattctagctatttattataacaactgttaacttgatttaaaattacggggttaaaaaaaaggtaactccaaagattttcaacccaagtatataactttcaatgtttaagcttttatttctaacttcagacaatagtgtgttaataatgctacaattattatatacagttatactcttttatggtaaattttgttctcataccctcttatcctcactacttcatacataaatatatatggataaatattattttagactttgtgttttgcaaaaattataaattataccatctattttgttaaatgataaaatgaaccatatatttttcaaaataataaaaataaaagtatgaacttaatttttgacaattttattttttataaaattaatttgaaaacaatttttaacacgaacaaatacagaaaatgtaaattattttgtcatcacatttagatcggattattattaaattttattttgataaaaatcagttcaaggtattatttgtactattttgaaaaatacagattctattttgtcatttaacaaataaatggtccaattaataatttttataaaatacaagatccataatagtatttactcaatatatatttgtttgtaaatgtaattcacataatacgtattttatttatctatttatttttaaaattaagatcccatctaatcttactatttgagaactagaaaactatattgctatgtaggtatttaggagggattcaaactttaattttgtggatgcaaactaatgtatgaccatttgacctaccattcttggatcacataatttgtactttattattgtcaatttttttaatgcatgtactgtttctattaaaggaacttcatcacactctttattcattacttttttttccttaattttctttcttcactattgcaagttgagatagagatattatttatccaactactttggctttggtgaatcaattcaatttgaagaccaatatttattagcagattctattaagttactaaggaaaatttatggagctatgcttgtggctcttctacatgaatctgttataattgtatttatagatatattgacaagtacaaactaccatcaaattaaagttcaacatctttggtagtactttggaatacctatccatagatagtgcttaaaatttatcccaataaaatattatgctattctaatggaatcattgtgggaatgatctacaaaaaaacactttacatgaagaaaaaaaaggagtttgttttagataaaaacttatttcaagatcattttcataatatatattttttatgtataataatgttagactagagtatctagctagaataaatacactaattaaaaaattgtgtatatatagttttgaatgtcgtagtattactcataagtttatgttttcaaagtaaattttggttggaaggttacaaatattggatatgattttggtggccataattgcatatatcctctaccttaccaaaattctaacatgccatttattaatattttgattgatatggaatgaagtgacatggagcattgttgttgttgtggctctctaaggagacataactattgagtctcctcaaattaaaacgattcagatatggtgtgtctgtgagtctgtaactactcactgtaccaaaatcactaaactcttctaacttggtttctcatagggtaggtatattttcttgaagaccagtcataattgtatcctcatcaacaccatcaataatgagcctttgaagcattacatttttcccacattattagtcacaataaaatttatgattaaaagtaaaaatattgtgactaattatggtgccgtttgtttatacttttttaatcagttttctgtttttaaaattgaaaaagtgaaaatattttttaaaaacatgttctataaaactgtttttacttttcaatttttttaattgagaatcaaaattttaaaaacataaaaaaatcactttcaatatttttttaaacagtttttttttttcttaatcaatatcttggacttcgatcctgacccagacccaaatcccccc

SEQ ID NO: 377966 - DNA, 2000 bp, Cannabis indica
aatagttagggcgttacaatttaacactcacaaatacgctattattagtcacaatacataatgatataaaataatttaccataaaaattgatctggccaaatttattggtgtataagctttgattttgtgattttagaaaattggttgaaattaagattggtgagtatacaacgtgctaaacaataacaattaatactcaaaccatgcctcgcaaataggtaaaaataagatacataacttgggtattataacaccagtaacctgtgaaagaagggaaaaaaattgacacaccaatgggtgagcttcacacttattgtgttgcttgtttgtaaacatatttacaatcatcgcttaaaaatgtcacataaaaaattcgaaacctttgaatgtttgtctttcttagattccttgtttttttttttaattatcctctattaacttatgtcttgacttcccctctagtcaaccttcttagagtcatcaagagcaagttttgttgtaaatgattctcttgtagcatcgagtttatttgtggtatcattctgagccaatttctcaaaatgtgctgcaagaaagaaaaaaaaaataaagatacagtcaagttattaggtaaaatttcaactcgataaataaaactctcatgtacgattttaaaagaagcaacaatattgattggtaatgaccagacttatgtttaagttagattacctaaactaaaaattttgaatcaaatcaaaacctcaaatagcatacttacctcttttgcaacaacatatgtatttggaatcgaaccaaacagaaaatactaacaggtaaacaaaaattatgggttaaaaatagttatgattttttctcttccaataaaaactatgagctatgaccctcgtactgttataggataggatatatataataatattattaggatgaggaattcaaaaggcaagatagaaatgacgaaataatactcagttacaaaattagcattgagtattagtaattaataatttcagttacagaattttttgaaagcatttcagttacaaaattttagtttagttacaattttttttgaaagcatttcagttattaaatttaagtttcacgtgacatataccttatttattagatattgtgttgttatagcttataagtggaaaaaaataaagcttaaaaatatatataaaagtaaagaaagaaagaaaaagtagctcaaacaacttacaaaaaccacaaaatagaaaaattagattgctaagttgataaatcgccacatcatcactctaaacaacaacattatagatatatatatatatatatatattacattcaatattgtgatattcattaaatccacttatttatgtaaggactgttacattactaatttatataaaaaaaaataattaatttaaaaataattaaataaaataactttaatactcttatacatctactttaccaaattaaattagaaatatttttgtcaatacaccacttattttgttatattttcccacaaaactcaataaaataacttttattctaatactttttccaacaacaaaccaaacatcacaatcaattttcattactactataatataataaagtaactagcaacttaacattgcttgttagtgtatattaaaagtagtatagtgtgggctttgtgtgaaatagaaaaaagttctatgtttaacctggctctccacatcctcaatcattctttcaatcattctttttgatcctcctttgagtggtctagaatttttgttcaccttgtattgtagaatactcttttgctctcttcctattcttttcgataatattaaaaatttgactaaaataaatcactaaaaatggacatcataacaacattgaaaatgtattccggggatctctgttataaaatttttacaaaaggaatatatacgacaacaactcaaaacgcaaaatcaagatacatagcagatgcccaaaacaactcctggcaact

SEQ ID NO: 377967 - DNA, 8035 bp, Cannabis indica
tggatatgatgctttagctgtcctcacctcctctctactgccaacaaaggtagacatgtacatggaccataatacattccacaatatttatagttgtcaacaatatatattatcttaaaatattatttttttttaaatttttttttatttaaaaaaaaatgaacgcctttttttataaaaattattttaaatattgtcaactctaaaagttacccactataattctacataatattgtaagctcgtgcgtgtcgtgctaacccgactcatatttattcgtgtttttcgaaaaacaggtcgtgtcatgctgtatcaaaaaaatataagttgtgtcgcgtcgtaccaacatttttaaaggattggtccagcacggcccgtaagtccaatatttcgtatcgtactttgctcgtgccgatctattttttttaaacaagtcagcccatttttatatatgggcttaaattcgtgcccattttcattatatgtttcaaaaactttaattatgtttatataattttgaataatattttacaaatgattatataaaaaaattattaacattattagaatttgagtatttactaataaatactcaaatttttatattacactctataaataaagtaagattatattaatcttaatttatcatgttttaatagttattatatttagtattatatttaagttttattattattttaatttatttataattaataaatttatattttattattattattattaaattataaagttttttaatatatcgtgccgtattttttggttcgttgtgttttttattttttgagctagtctattcgtgtttacgtatcgtgtctttcgtacttctcgtgccgtattatgcttaaagatatatttttcgtgtcgtgtcgtaacaatttataacattgcaatgtatcgtatttaaatctgtattttttcgtgtctagtcgtactttaccaattttatgtcttgttaaaaaaccagcctcatacaacactagtctcacataccattttggtgataaagtaaccttttttttttgaaaaaaaaagttaaataatgctacgtagccattgtttattttggacaataatgtttataaaattaattttaaatgttgagcaaaatacacatgtggcaaagaccaatatagatgctctaactgttctgctctctgctgctatcttttctttttttatcatcaccactccactttgtgtgcgtgcggactactacaactactgtacgtacacacatcacatgtgtttttcaaaagtttacttaattaattaattttaataattaatgctttcctatcatattccttaatttttagaagttattacttactttatagtttagggtttacattgtaattttaaaatattgttttggtagatttttttttaggctaattaggatttttattcttatgtattaaatcataccctttaaaattttttagccattaaaaatttctcatgtcactcaattttactaattctataattgtctatgtaataaatcatgatccctagactttaatatataccaaatcatgctcttcgaactttgacatgtaccaaatcaaatcccttgaattttcatccatgttagactttccttactaaaattagaaagaaaaaatccttaaatctaacaatctcaatagttgatgggatatgatttggtacatgtaaaaattaaggggacaaaaatccttattagttgagtttttatctagtttggcatacaagagagctttttaattttttttttaagatcgtgtacgttatagttattaaggaccaactgtaaattttcgaaaattaaaattatatattatattacaagtgtacgcatggtaagtaattgtttaaatcttatttttctactctaaactattcagaattttttgaaaatttacaaataatttaaataactataatatatgcaatcatgaaaaaaaataggactaaaatactcttttggacaccaaaatagataaagagtccacaaaaaaaaaagttgaaaaatagtacaataaaaaaatttaaaataaaataaataaataaaaataaaaaagtaaaatcatagaagaatatacattgagtaaatgattagcatttccttattgcatatcataagattgactgtatcaatccaaatgaacattcacgatcgaccacagtcacatttccctctatattattatatatttagctaattaagatttttgcctcccgaaatttgatatgtactaaattatattttctaaacttttaatgtcgttaaatgaaattagacaaaaatccttaaatctaataatctcaatagttcagggggaatttttaacagccagaaaagctcaaggagcatgatttagtacatattaaaatttaagaggtaaaaatcataattagcctatatgtttttatatatatagggtgtctacacatttagtaccatgcgttttatctaaatacaagtttggtacccaatatttttaatattaatgcttatttggtatggctgataaacatataaatatatatatatatcgagtgtgtatgtcttgtcttgtgacatggttgtgtacgctctcttagggtgtttttgttcattggtttctgtttgaaaagttctgttttgtcgtgtctatgcgagtattgtgagtttcaactatggcttccagtagtcgtcaaggtatagtggatgcggaggatggatctaacatatggttagattaagaatcagatgcagtgttggcatacgacacaaatgatcaaactgagaaagattatgatgattggtggtgtcttgttggaaggtttttgacagaaagatctatagactttgatactatgcaacaccttatggcctcgccatggcaacctggaaatgggatgtttgtgaaggaattaaagacaacccgatttttattcctgtttcaccatgaaattgacattcaaagtgtcattgaacgtagtccttggacgttcaataaattccttctagttttttcaagaccgaaacctaatgagaatcccagattggttgagttgaatgaggtggatttgtgggttcaattgcatgacttacagttagggtttagaactgctacagtggctaaagatgtggggaataacattcgtaaatttgttgaggcttatgagaagaattttatgggactttggagggactttctttgggtcagagtcactatcaatgtttctaagcctctcaaaaaacgtatgaggcttcagaataatgttggaattgagttttggacaaacttcaaatatgagcatcttcctacatttttttatatgtgggattatgggacactctgacaaattctatccttggagattcgatgttacagatggtatgatggttaaatcatatggcgactggatgagagtttaactaaggcgcaccaatcatatgattgggaagaaatggataaaatagttcagggtggcaacagatgagtgtcagatgcaagaagatcaactgtacttaggccatgataccagaagggctccgacgggacagttaatgccaccagctatttcgaatcaaacaattgtgatgaaggagaaaataggggtcaaggatcacgtaataaagaggtagttattggacagaatagtgaatcaaagattggagagataggagggtggactgatgttgattgtgggcaaaataacgccattaatgtagatgaagatggtttgatggttgttgactcaaaaagacgtagaacagagatgggccttggtgtgggttcaaaagatattttgggaaagaggagttcggcccaagtttaaatggattcaaaaaatgtggattcggtgggttctggtttccaggcccaacaaccattatgagccttttatcatggaattgccatgggcttgggaacccatggactttacagttccttaaggatattgtgatccaaaagaagcccaactttgtgtttctctgtgagacactctgtagacgtgatcaagttgagaaggtgagagtatctttgggttttgatggtatggttgttgtggatgtgaagggtaaaagtgggggtatagctcttctgtggagacatgaagaagaagtttctcttattcgatttgttgataattatatagatgtggaagttactgttgtgggacaattgaaatggaggttcacaggcctttatggtaaaccaaaccgaagcaaaaggaaggcaacatgggatttgcttcgaacactagctgatgcttccaatcttccctggtgcgttatgggggatttgaacaatgtggtgtctcatgacgacaaacaaggtggcaatcgatatcctgatttcttgattcaggggtttcaacaagctcttgctgggagtgggcttcaggatatggacttatgtggttacccatttacatgggaaagggtaggggaacaaacagttggattgaagtgcgccatgatagggggtcagttaaccaatcttggttagacatgtttaatgcagctaaactttataaccttgaagtttcgacgtcagaccattgttcgattttcatggacttgacttctgaattggctaatcctacaatttgaagatttaggttcgagaaagcctggctccgtgaacccatgtgcattcaacttgctaaggagagttgggatggttgtagtgggagtgatgtccaagaaaggtggcagcttgtagtagacagttgaagtgttggggtaaggagtatacatgtaattttaagaagagaattgggagatggaaaaaaaagatgaatagatggaagttcgggcgtgatgaaacatctattacgaatttcaaataggcaaaacacaacctggtcgaaacgtatgctcagcgagagatattttggcgtcaaaggtccaagcaattgtggcttcaagatggtgataataacaacaagttttttcatgcctcagcatctgctcgtcatcgaaataactccattaagaggctaaaaaattcttcagttcattgggtcgattggaagtctggattaatagatgttatgataaattactttatcaatctttttgcttctgctcataccgattggcgtgaggttatagctgctgttcagtcgcgtgttacgactactcaaaatgaagacttgttgcagcctgttacttttgaggaggttcgcaaagctctcttccaaagcatccggacaagtctccgagacctgacggaatgactccgggttcctttcagagatgttggtctgtggttggtaatgatgttttcaactttgttattttttttttgaatttggctattttcttactcgtataaatgcaaccaaccttgttttgattccaaaaagaagcaaccacaagatatgggagatttttgaccgatagccctctgtaatgtcctatacaaaataatatccaaggtcattgctaatagactcaaaaatatccttcccaccattatctctgagacgtaaagtgccttcttgcaaggcagattaatttctgacaatatcatgatctcttatgagattatgcattatttgaagaggaaaagaagaggaagagatgggttatggctctcaaattagatatgagaaagcttacgatagattggagtgggggtatatcagagctatgttagaaaggatgggatttgatggaagatggattaatttagtcatgttttgtgttagctctgtttcattttctattgttcatggaggacatgaaataggccctattgaagcttcacgtgggatcagacaaggagatccattatccccatatctcttcattctctatgtggagggtttctcgagtcttttgcgtagctatgaacaaagtgaattacttacggggtgtaagattgctcgccaagctccaattatttcccatatgttgattgcagacgataattatatttattataaagcaacgaaaaaggaagcctataacatcaaagagttgctacacacatttgaacagacatctgggcaaaagataaacttcttaaaatcatcgattttttacagctgcaatactaatactggttttcgtgatactatttgtgattttttgggtatctttgagtccgacgaaaatgggtcttacttgggtctaccatactcaattgtaagaaacaaaaatgctatccttggttttcttaaagacaagctgagaaaaagaatcaatggttgggaagggcggttgctatccagggtggggaaagaggtgctcttaaaatctgttgctcaagcacctatgagtgtattcttattgccagtcgatacttgtaaagagcttgaaagacttatggctaagttttggtggagtacgggttctactcaaactagaagtacaagttggatgagttggagtcgcatgtgtcgtcacaaacatgctgggggcttggggtttcgtgactttcgagattttaacatggctcttcttgggaagcagggttggaggttgttgactcatgattcatctctggtcgggcgtgtttttaaagcaatatactacactacaacaacttttctgaagtctgaattgggtgataaggcgaagcatttttgaagctaaagacctgttgatttctggtgtatgtcgatcaattggctctggagaatcagtctctattctgaatgacctgtggctccctgatgcaagtccatttgttatgtctaatcatcctgcattaattaatcaatctgttagcagcctcatgaaaattgattcaagaacttgggatgaagatattattcgagacctttttgaggatagagatcagaccctcattttttctattcagctaagtgaaaatgccttggaggatcattggtgctagaagtttgagaacgatggaggttacatggtcaacaatgcgtacagacatcttcaggtgctcaagggagcttggcctgctgcacaaccgacaaatctttggcatactctctggagtcttaaagtgccccaaaaggtctgcaattttttgtggagggcagcgtcaggttgttttcctacttgtgtacaattgcagaagagacatgtaccagtgagtataatctgccctgtttgcaatgtggatgatgagactattttccatgctcttgttgattgtcctgtcgcgagatcgtgttggaacgatcctttgtggatgttggcaatataactaatgtcgatttttacaattggctcctagtggttgtgaaccgtgggaagaatgatgagatggaggagttggtgatggtggcgtgggcgatttggagggcccgtaatgaagttgtatggcagcaggagagttctaatgctgcaagcattgttgcatctgcaagatcaagcctagatcaatataagattgctcaagaacgaagaggttattctctatctcatctggttgatgatgggaataaatctgagcaatggtcgaaacccactggtaacaagatcaaggtaaatgttgatggagctttgtttgttcaagaaggacgttttggtttgggttgttcagccagggacagtaatggtagattggttgaagcattcactctaggaaagttgggtctggtccaacccgaaatggcagaaatcattggtataaaggagactttgagttggattgatagacatgattggcaaaatgtcgttcttgagaccgatagtttaccgtgtgtccaagctattaaaagcaacattcctatgttgtctcaatttgggttacttgtgcttgatgtccgtgaattattattatctttgaattacgttgatatgtgttttgttaaacaatctgtaaacaaagcagctcactatcttgccaggagctcttgtttctcgtcagatcgtgcacttcaattagaggattgttcttctgaagtgtgttctattgttccgaacgattgctatctttaataaaaagttgctatgtttattcaaaaaaaaaaatacttatttggtatcttgtattttaaaattacacttatttggtaccctaaattcaaaattttt

SEQ ID NO: 377968 - DNA, 1709 bp, Cannabis indica
gttcctcaagaagataagtgtttaggaacccaagaatggaaattcttgtttattgacggtgacatggcaagagatatatactctccatgtagagctaaggcatttatatagcctttgaacatgttactatatcctagcttaacacattttagagatagaaagttgaacttgtgagtttggtaggagcagaaacatggaaaacctgtagtaccaaaggtttccaagttgttgtaattttagttttttttttttttgtgaaatgataccacaaatggtgatcaaaaattaagcacagaggagggtagatgattaatgaggtagactgaggtaatgaaggccgctacccaatattttagggacataccagcctgagcaagcaaggtgaattccatatcaacaatgtatgaatgtttatgctaaacatgcccattttgtgttgaggtaatgagtcaagaatgttggaaaatgatgccactatccttaaaacttttaccaaaaggaacatattcacctccaattcaatcttagagtttttatctttgtgtcatattagttttctacaaggtttttaaattaagttaaggcatttaaagtatccgacttatatttaagtgaaaacgcctggagtatatcgtttataatcatgaagaaaatgtatgtaataactataattggtgttggacatgattagggccaggccccagagatcaatgtgtatcagttcaagcacttttattgctctattagtggaaacaatgaaaggaagagaatgggattttcccatttcacaaaagggaagtttttcattagatggaactcttacattagcaaaaaacaaaaacatgctttaggactccaatagaggggtggcctagttgcctatgccaaacctcatttattgaattgaaagagtcatcggtaacaggtcaatttacattattttgtgacacattagactcaccagtgtaacactgagaaactaaagtagattagataagtgactgagatgatgacagattgtgtggctggtagttgaagttggtaaagaccatcaacataacaaacatcagaagaaattccattaggacatgattatcaacattacgttttgatacactgattaagtttttggcaatctgaggtacatgtaataaatcttttaaaataagtggttttagagatagaaagggtaaataacttgttccagtatgagcaattaacaaggtgtttccatctccaatagtcattcgctcattaccaccatatagggcacattgagttagttggtttggatctgaagtaaggtggttgattactccactatccacaaaccatgcatcatgatcgatggcctctggtgttgtaataaagacagttggattgccagattcagaatgaatttgatgaatatctaaattgttaagtttgtggcatgaatatctaaattgttaagtttgttgctaataaatcttcaaattcgaaaaatagcagcataaatatgtaaatctttataacttaagaccatttccaatacaaaacgtaaaatttgtgctaaattttgcacaagaattgagtttgtgttatatttagcccactatttacaattgtactccaatgtaaagatgtaagaaatataattatgttaatcatcattaatgttgtattgaaaaaatacaaacatcattattttttatttttttattgcttaa

SEQ ID NO: 377969 - DNA, 1995 bp, Cannabis indica
gattttaatttgtggtattagtgatatcgggaagttaaattgattttgatttactagggtcttttggggtatttggttatgactaaattaccccgagggctaaaagtttcttaattagtaagataggggtattttggtcttttccctatgttttattaatttaatttagttagaaggagttgtcctatctgtaccaaacctaatgaataagctgaattccctcaaaaagcaagataaactcaaaaactaaactccttctctttctcccccaagctcggccaaaaccaaacaccaagtgaaccaaacctcaacattaaattcaaacctaaactcttccttttcttcttttgatttttagctaggagttgattcaaatcggttttgaaggatagggtttagtccttgctcttcttcttctcttaactcatggaacaaggtaactttaactttgatgtttgatgttttagttattgttcaacctaacaagtgacgagttctatttctaagttttgttttgagttgttagtgattttttttaaggttttggggcttagtttacagctgatgtggttgagagatcaagtttgagtttaagaactcaaagcttgatcacttatggaaagttttgaattatgattcattctatttttttttgtgatttaggttatgttataatgatgttttgtgactgttttatgaagtttgggaccatttggataggtttggagggaattggaagcaagaaaaactcgaggttccatttctgtagaaaagtgacagaccagttttggaaaactaaccgaccgttttctaggtaggaacacctagaacacagtttgtcatttgtaaaatgatctgtcattttgggtgatgttcgtgacctccatttttcgtgttttcttgatatttaaagtatttccatgctttcgatcgataggaaaacttttagttatgaatttaagatctaaaatgggttaggtcaagttgtttactaatttactgctgttgtgaaatagggctgggatcattgggcgtttctacaattagagtggttggtatgcatgaatttagattaaaggtaagaaaaatacatttgtatttcatatcatgtcattttattaaaatactattattaatgttatgtgataaaaatagtatcttattaggcaacgattaaaaggttgtcttattaggaaatgataaaaaagttgtcttattaagcaatgatgaaaaaaattatcttattataaaatgatgaaaatattgtcttatttgtcaatgatgaagaagttgtcttattaggcaatgacaataaggttgtcttattagataatgatatttggatgccaaaaggttaggtatcaaaatcgtcaaaaaatgacttcgagaggttccacatgcaccccatgcccggaggccgagatcgggctacgcggactggaagcttcttcaacctctagccgggttagaggtgggtcatgcgacccagtttcaggctagtcaggtctaagtgaaatttcaacgtaaaactgaatgaaatgacgagatttttttatggtgatcgggaatcaatttctaatcttaaaatcggttcaatttggtttgaaaatgactaaaaaaagagcagatcttatggtgtataatccaaaaatataagaacaaacaagaacccaattttcctatgtgtatttcatctaattcaaaaaataaattatgtaaaaatattgtggattactcaataatgaagtttgaacaattaattttagtcaataattaatataatgaaaaaactcaaatttgatttcattattgaaacacataaatcctaaaagtttaatcataaaattctcaaccaatacttaatgatttcacacatataatatatcatcagaaagagaatttaatgaggaacaaaatccaaagttaaacataaaataataacgaaattaatatgtaattagaaaaaattaacatatatatatatattaattgtta

SEQ ID NO: 377970 - DNA, 1605 bp, Cannabis indica
tttttttttttttttttcagatgtcccatatataataaaattattttgatttgctcttggtataaatgaattagactcctctagccaatgagatttacaagtttggagcttttttttcaatgttgttttcaagatcttgtttacagctttcacctgttcgtttgcttgtggtctagcctcgactgagaagctttttatgattccgtgttgaacactgaagtcggtgaagtgtacactatcaaattacttcccattataaaaaacaaacttgtgtggaagtccaaaacgacacacaatattcttaatgatgaagtccaagacttccttggaggtgattgtgttcataggttcaacttttactcatttggtgaagtaatacacaataactattgcatatttgactccttccttatccgtgggtaggtgatcccaccaggtcaattcctcaaactgaaaaaggctaaggactactcatgagtgtgatctcagttggcagtgctcgcagaactttgacatatctctaacattgttcacatttttgggtgtacttcagacagtccttttccatcgttggccaaaagtacccttaacgaagaatcatcttggaaatgcttggtctggaagtttagtctccacgtgaacctcatggatgactgaacttatcttggttctgactatgcacctcagatatggtacagaaaaccccctgggataaagcttcccatctaagatcacatatcaaggagcctgatattggacttttcaagcagtagccttgtcaaccggaagcttacccgaacaaaggaattgatagatggtgcctatccaagggtttgagtgattgataatggcatataccgtcattgtttcaatacccggagcctttagatgtcttataggcaccactccgtattgcacgatcttcgggtctgttgcaagtttggccagcatgtttgcaaatgacttttggtcccttgggacctgacaaatgttatagcttttgaacccttgtagtagctcacaggaccgcatcacaaaggcaaccgttttctcacctttggtttggtacccctagatatttggttacccacaagttgggaatcactgtacactttaatgcattgggctcccacttccttagccaattctaatcctgctaacatggcttcatgctctatgaagtatatgcacattctccatgtgccatttgacttagggaccaaaataggattgaccagccacactgggtacaatgactcccaaaggatttgccagccacactgagtaaaatgactcccagaggaaattattagcagtcaacttttcgacatctgcctttaccgcttctgccattactgggtctagaggtattctcttctagtggacgagggttcttgttgatgttcaaggcatgcatatattgttggggttacttcccatcatatcataatggctccatggtagcacatcctggttcgtcttgacagtattcacaattttctctttcaccactggatgcagattcctccccaccttgatggtcttggtgggatcgacttcacagattctgacttcctctacatcctctagtggttcaatcattct

SEQ ID NO: 377971 - DNA, 7886 bp, Cannabis indica
tttttttttttcagttttttggtagttggggttttgttcccttttggtttggattctattttatttattttttattattttgcttttgattgatggcacattgcttttgcgtttgacttttactggttttattttggggcattggctttgacggagcgtgttttctctgttgttcatcacgtttttgtgttttgtgattggtggttaccagaatcccagaactgttgctctccctcgttaagggtttttccctatttcgttaattttatattgtgggtttttttctgcgttatttatctgctttactctggtaactcacactttttggagagatttcttttggatttttttaaggtaaatatacttcgagcgtgtgtttgctactttgcatgtaaatattttcttcccgttttcatttatcattttgatatgttacttgggttttagtttctgttagatggctgtggttgttatgggtctgagatgagagtatttttcattacgtacttttcatcatcattttttctttaagggttttggtcttcgcatgcttattttggtgtaagtatattgtttcttttacttctgtagttgattttatgtggaagttttgtgtatatcattttgtaaattgcatgtgtagtgtagaatcgagtttacttctttcgtccgaaaatcctgcctcgtgctaggtagatttgtttcgagtgtttttgtccgtgctggttattttctacatgtatggtgtaccatatgtgattggtttggtgtgatttataattgttacttggtcataatttttggttattatttttccttgctgtcttggaattttgttcttcagtttttcattttgcatgtttgttggttcttagtttttttttcttcctttttgtcttcgttgaacttctgccttttttctgaatctggcttgcatgtttatttttgtgctttgtgcacaggaaatgggatcttccgatgatggaaacggaacagaggaggcattgcctcctccacctcctgttattccaccagacattgttccaatcaaggctgagtcagaacaggctattgagccagttaagaagaaacctgcccgtcttccaatggccagacgcaatcttggaactaaggggcaaaagataccgctgttaaccaatcatttcaaagtgaaagtcagtaatctgcaggatcaattttttcattatagtgtaagtttatctttctttcgtagatttgagccagtttgtttatcattctgtttatgtactgtagacaattttgactgatttatgaatggaatgagtaggttgccctgttttacgaagatggccgccctgttgacgctaagggtgttgggcggaaagtcatagacaggctccatgaaacctataagtctgatttaggtggaaagaactttgcttatgatggtgagaagagtctgttcactgttgggcctcttcctggaaataaacttgaattcactgttgtacttgatgatgtatcatccgacaggtagccttgctcttttcaacttatttggagcttattttcttctgtttattagttccttttataaaggattcatgtaaaaaatttatggttcagagtaaatggtagtcagagccctaatgctgagggtgacagaaagagattgaggcgccaattccattccaaaacatttaaagtggaaattagctttgctgctaaaattcccatgcaggctattgctagtgctctgcgtggtcaagaaactgaaaactctcaggaagctctaagggttctggatataattttaagacaacatgcatctaggcagtaagtgaaatatgttgtttttccattttgtaaggagctttctgtagtttggtgtgatatttgatccattaatttatgacatttaacataagtgagttgttccaggggatgtctacttgttcgccaatctttttttcataatgatccaaaaaatttcgttgatgttggtcaaggagttcttgggtgcagaggatttcattccagttttaggacagcccaggaaggattgtctttaaacataggttcatctttactttttcttttatgatctttgaaaagttgcttttctttttatggtttgctcacatttatctctcatctctatttagatgtgtctacaacgatgatcatacaacctgggccagttgtagattttttaatttctaatcaaaatgtgaatgatccttataggattgattgggccaaggtaatcaacatttgtatatttagtgtgtttgtatttttttttttgctcatcttgtctttgaaaacaggctaaacggacactcaaaaatttgaggatcaaagttgagccctctaatactgaatacaagattactggtctgagcgagaagccatgcagagaacaaacgtatgattttttgttttttaatcacgctttcatttgttttattgtgtctttctgcttttgtgcttcattttatcaagtttattgtcccctcttttatttttttttgttggatgtaattgacatgcttgattgttatcagattttcattgaagcagagaggagggggtgatgacagtgaaccagtagaaatgactgtctatgattattttgtaaatcaacgtaatataaatttgcagtactctggagatctgccttgcattaatgttgggaaacctaaacgtccaacatttttccctgttgaggttacttgagaatgctctagctgttgttaaatattgtttttttttcggtgttaacattattatatcattctaacagagtgtctgtttgtgtttgctagctctgcacgttggtttcattgcagcgttacacgaaatctttgtccacatttcaaagatcctcactggttgagaaatctagacagaagcctcatgagaggatgcaagtcttgtctagtgtaagtctattctataagtcttattttcaaaaagacatgcaagattttattctaagtttcttgtgtcaatcattattatcttcaagacatgctagatttgtctcaagttttttgtacttggttccaggctctcaagcgcagtgattatgatgctgaacctatgttgcgcacttgtggtgtttctattaatagtagtttcactcaggtggaaggccgtgttctgcctgctcccaaggtctatatacatatatatatttatattgatttcttggtcaagtaatctatagttgttagcatgagctcttgttactaatagctaattatgttgtgacttgtgcctttaatttgtattttctcctcacagttgaaagctggtaatggggaggacttctttccccgaaatggtaaatggaatttcaacaacaaggtgggctgttgaaatgaggaattttatgtttgttttatatttaaatttggtttatgtattacttctaacaaatgaggaattttatgtttgttttatatttaaatttgcagaaattagcacagccaacgaagatagacaagtgggctgttgttaacttcaatgcacgatgtgacattgataaccttgtgcaaacactgataaaatgtggagagatgaagggaattgtaagttggttttcttacagtgttttaagaatttctgagctggtggtggcaattaagtaattgattatcgttgttggatttatttttgacagttgatgaaacctccttttgaagtgtttcaagagggtggacagttcaggcgtgccccacctgtggttcgcgtggagaaaatgtttgatgagatacagtcaaaacttcctggggctccagattttctcctttgtttgcttccagagaggaaaaattgtgatctttatggttagattattgttctcttgagttctttattttatatttaatttgcaaggattattgttttccccattttgaatgttactgatgtttgttttttaatgaactcccaggcccatggaaaaagaagaacctttcagagtttggaattgtgactcaatgcattgctccccaaagggtcaatgatcaatacattacaaatgttctattaaagattaatgcaaaggtatttgttgattaacactattcattcctttaatatctttggttttggttatgatgcttttccatgctctcaatccttgcagctaggtgggttgaactcatttttagctgttgaacgtaattcaatgatcccagtggtctccaaaagtcccactctcatccttgggatggatgtttcacatggatctccagggcagtctgacataccatcaattgcagcggtaatgttgatttgattgtgtagtgcaactgttccattctgtagcttattaagacttgtcagagaaagtgctagttttcagatgctgatactttgatgacctctttattgacaggttgttagttctagaaattggccctcaatttcacgttacagggcttctgttcgtacccagtcacctaaggtggaaatgatcgattcattatttaagccagctggtaaagatgatgaaggcatcataaggtagtagcatgtctatatagatttacttcttgtgttatccccctctctgagagacattgcctatatgtataatctattcatttggtatgcaaacctaactgattaatgaatgaaagtctattaaatatgtttgaatgaaaattgactttttctttctttattgagcttcatgctggctctatctctttattttttgttatattatttaatactgtctttgtgatacactttccttcattttcagggagcttttagttgacttctttacgagttcagctaaacgaaagcctgatcagatcatcatttttaggtattgtatttattattatgaatagaattgtatcactacaatatacttgtaaattgaagcaatttccattgaacagaggttaattaatcttcattaaaattagctgaattaaggtatttatatattatgccaaatgataaaaatgataacttaaagatccaagcaggggtacagttcaattagctttattatcatttttaaattttggtctggaactggatccaagatttgcttttagttgatagtatgattttttgttttaagaaacttgttgtaaattcactattcattctcttatacagacttgtctacctatgtttactcatgtatgcagtccttctgaaatgatttgctaatggctttttgtgaattgaattagggatggggtcagtgaatcgcagttcaatcaagttttgaacatcgaactggatcaaatcattgaggtatctagttctgtgcctttttccagcaagttacgtgctcaactttgaaattatgttgacttctaatgctcttgcaggcgtgcaagtttcttgatgatacttggaatcccaagtttgtggttatcattgctcagaaaaatcatcatacaaagtttttccagcagtcgactccagacaatgttccacctggtaaaccatatctttttttttcaccttcatgatgctaataaaccatatcttctctttttattcaaataacaattcttctcacctttttttttttcttcaggtaccattattgacaacaagatttgtcatccaaaaaacaatgacttttacctctgtgctcatgctggcatgattgtaagtggattgtggataattttttttttcatgtttcgttgttgatattaagttccaacctgcttaatcataggatttattttatcaaaaggattcatatctaaaatggctttatatgtaataatatactaatcttcttgcttcgttgtcttgttagattgacttatttaattgtttttctgaaaagggtactacaaggcccactcattatcatgttctgttagatgaagtgggtttttcagctgatgatctacaagagctcgtacattctctatcatatgtgtaagtcaatattctccaggatagcttatcgttaactaatttggctggcattaaactcgatactgaattatatttctcattcttgcagttaccagaggagtacaactgccatttctgtaggtaaggtttttgaggtttttgtggtcctgtttataattactcaaaataggtgtagcttgctctgacgtttttgcttccacaaataatgtgaccatatgacaaggaccattacaccagatttgtctcccacctttctatccatttgaaaagtttaatttattttttccttttgcagttgcccctatttgttacgcacacttggcggctgcacaggttggtcagtttatgaagtttgaggacagttccgagacgtcttctagccacggtgggctgtcctcagctggagttccacctgttcctcaactccctaggttgaaggaaaatgtctccaattccatgttcttttgttgaagcttcgaaatcctaatcttttatgtaattagtttcgtttttttgttgtggtccttcctatgggaacctctgcatgtctgaacttgaagaccttacctttggtgttttgttaattttgtggttggtctcttgtttaggactagtgatatgcagactaggtaattactgtttggtgtgttaagtttagtgctttgatattttatctatgttaagcatgtagtagtgccaaccttggaattttaccgtggctctatatctgttaggtctgtttttaatatagcctgttttgatggctgtgctgtgttttgatggagcctggttttatggcagctgttgtgttggattttcatgaaacgtattttaatgactaagtttcttcatggaaaaaggatttaaagtattacattctattttctctattcttcttttataatgtaaattgaatgggttttgctgaaacatccagctgttaattctgcctaactaccgatccaacaattaattttccaaattacttcccagtagatactttttttgtttacaaggagaattttaaactattcatttagcgtaattgttctgattagtatcaaccagactgtacaaagcagtaaaagggaaacttgcagttaaaattacattttggggtaaaatctaacggtaatcagttttgggaatactctttctagtgtttgttgtgctttaatttagttacataatgtattgtagtttaggcaccattattactggattgtgttgaagtttatggtaaaataaatctccggttgtaagtacaatggtttggttatagactattactgcatgcatgcatccaaggacttgtttggtagactctgtggattgtattatttaatgtataacaaatgaaaatgattcatattagtttgtggcaagcgatcaatgctcaactgttaactcgggataaattcgctcaatttcaaatagcccttgaaagcattctttgtccagagtgtggtgcagcagctgagactaactatcacttattttctaactgctgcctttctcaacaagtccttgatcaggtatttaactggatggggacaggaagaaggccaactgattttcaaagatggaaaagttggcttttacagaaaggaaggaaaaaagacaaagagttcatacggcgattctggtagctatgatatacaacttatggatcaataggaacaactgcatcttcaacaactactcgagtacaacttccaaaattatacaggatattaaaatatagtgcattatagattacaaattgctaaaaaaagaacctaaaaaatcataagaagagatatatagagagaaaatatattgtagttagcttgtgtttgcccgagttgcctgttgtagttgttgtgtaattgcttgtgattaatgaagttccttcttgataaaaaaaaaattagaccttacaaagtctcttaattaataaaaaaaaagccctaaatcctcttttcttctca

SEQ ID NO: 377972 - DNA, 6981 bp, Cannabis indica
caaaatatgttaaataactaaactatacagcatcatataaaaattataactattcaagtatcaaaaatacgaattggggattgctacacccgagcgcgatgcgcccatttatttatattcttcaagaaatagtgaaactacacccaaaaaatcaacctgctatatccatttttaatatattttaagtcctactcaaatccgtaaatcacaagacaattagataaaaaaagactgcaaaggaagggtgattcagtggagccccaaaatttgcacatgaaattctaaaacatggggcaaagactcacataaatattggtttgtgtaactagtcaacagtgttgcagttgcagaagctagctcttgctctttagttttttctttgaaaaaagtaagatagagattcaagttaagttgtaaactgccatgaaaggcatcagaacacttcctatccataattttccatccttttcctcaacttcactaacagctttaacaaccttcccttggctgtcttctaatatctgtaagagcttcccttctgggctatacttggccactactccatgtggccagcctccaatgtgaagcatgaattgcattttagcagaaatcgggaacttaagcaggaacatccttacctttgggtacaaagcagttaggtgagaatagattgtcctgtgacagtggattgctacccaaaattcacccttttcgttggtcctgacattatcaggaaatccggagaggagggcgaatacatctgtggttcctgccttttcccctttcaaccaatatctacttaacctgcattattacaacaactttgaatcagaatataattctttcatgagaaatattaccacagtattaaaatagctcccaggttctttttaaggtagataacctgcagaattttcaaaacctgtacaatactcaccttggtttaacaagacaaatttataatatatagtacagttctgtccaaaatttattttttatgttagaagttctcttttagtattgaatgaaggtaatgtgcccacaatcaagttaagcccacagctatattttgcaagcaatttgtcaattttcagatatttacctaaaagattttgccaggatagaagtgtgattatcggcaatgaaaatgtaataaaaatccaccatgcaacacttagattctaaagtggatgacaatgaatctttcatttaaacaggttagcatttcaaatccaattttattagtcagataaaacctgtttttcttgtttgctaaaatcctctaaaatttatacattggcccttcaatttgttccatttgacatgctgtatttgtaaagtgagaagctgtgtgcatgtatagcgcaacaaaagataaatggaactacatatgaaagcgaatttacctgcccaaagatccctcggcgaagataaagaaagaaccatccttgcttaaggtcaaaccatttggaaattggatattccgtacaagtacagtagttttctttgtttctggattgtactttagaactctgccagaatcgtctccagagaaaaccaactgcaagaagttcctggacagattgtatcatgttagaaagaaaacaagacattatatcttctgattagacttacaataagaaaaaggaaaatggaaaccaaacagaactcagaagagaaatataatgaattcaatgccaacatgttaaaggggcaacgttaaacacttgctttacattttaactatcttccactttaatgactgcatatagtagactcaatctaaggcctcttctttttctcaatttgtcaaatggaatattgagatggagaattatgttcctcattggaaggataactcgagggatcaaacaaactatgcttctttttttgcaagactttactcatagtccaattcaaaaaatgcatccacataatttccattttctcaatttctttcgaaaatcattattgaaaataattgctgcctgttttgaaaatatttcccttcctgactcttcaccaaataataaagtaagtgtgtgaaatgttctggtagattttcttgtaaataatcttttagtgttcttgaccgacctagataatctccctaattttgagtcttttagttttatttggaaatcatctgttcttacatgaataaaggtctttgctaggctctttaatacgagaatgattaatacttatgatttaattcggaggaaaaggcctcatttgactctattttcttcacagtgtctgatgtgtaataaaggacatgacctaataaaggatcatctaattttgcattgcaagttcctctggtgtaatgtgttcatgattaagaaaataaattggttttggtgaatctatgaatgcacccattatgcagaattgtgtgaaagctactagatttgcattcctgtggtaaaagttaaaattatcatccctttgagcttatgtggtaaaggaattcaaggaattctctatttcctaatcattataggatggaaaaattacttgctttaggcagaatttttttttggttattgatgtattgtgttacttaatgttttactttatcttggtctgtaatagatatttccaatcaataaaggttttgttttttcttttatcaaatatttatatatacacatatcactttcagatattgatgtgaaaatacaagtacaatcccgtaatgagatcttgctcatttaaggcatcacatatctctcatatgtttataatgaaataaagagtgattttttatgcagttctaaacagacacaacagaattgaagatgccaattattctctttcatgcaattgtatgtaacacatggatacttagtttcagcaatgcccattgggcttcacatgttaaccttcagagtagaactaattcaaaccacctactgttagcatcttaaaagaaatagcaaaagaagcttacctcctctggtacttggtgctgctatctgtgaaatagacattcccttcttcatcaatgtctagatcattagtaaaacctaatggcactccttccgcctcagttgtaagtggtgttgcgagtccaccttcaggtcccaccttgagtagcccaagataggcatctgcaatgtataaatctcccgttttcttgtcaaaccggagcccaagaggccgaccacagatgtgctcatttgcaatgtaactcaaaggtgatggtttgggatcacatatttctgatctgaatccacacagacatcaaacaaagcaaaatagaagttttaatataaacaaaagaacagtcaaataatagctttgaaataaaattaacaaaacaagagcatgacttcatggaaccacataaaagccagtatttctaacattcatgttaaggttgtgagttaaatttgctttggtgatcatgttaaggatattacccaacatatacacatacaaacctacagcatctacagtatatccacagggcaatcttctacatgatcagaagtaatctcccctcaattgacaagtaaagaatttcacactgaatatcaacaaaatgactatgtttcatctatacataacaacatatctgtacatatcctttttcacagcaaaaataatttgacactaacaaagctacacaaatggcatatattctcctaacaaaaccagactacttaacaacgaaagtacatcattatgcatataatttactcataattcaaaatcaaccgttcatttgaaatacaaaaaaagaatgaaaccccacatatatacatttatatataaaatctgacctattgggcgatgtataggcgaaatcagtccaagagtggccattccagaagagaattctaccatcggcgacaccagtgtaaggtccacggccaagagaatcaaaggtgacactctcaggaccctgaacaaggttcaaaaacttaatctccgagttttggagcaaattttggcggtctctgtgggttggaatttcggaccaagaggagatatttatgtagtgagcttgaaagccggggaaatcggagatggcgctgtgcttaaatgggtcagtggcacagtagagagcgaggaggaggaagagtaaggcgagaactcgggtggtgaaggccattgagaattgagaaagaagaaagaggaatgagagtttagctatagctatggctactgcatatgcattatatatgattattattattatattgaatgggaaatgaaagagtaagagtagttgtaatgtaggtaggtgaacacatttgttgttattgttaatatcggtagaaactagataattgccaactttcactttttccaactaccaacgtgtctaactctcattcctttaataaaaaatttatttattggtattcgtattttgtaaaagttacaaattgaattcagggattcgttcaataataatttagatatgtttttcaaatataaaataagtttaatatatgttaaatgaaaaacttcataatagcttaacatagaggtattatgatataaataattacattttttttttgtatttatttaggctagagagtgatttcatgtttggttatattagaaagaaaaattagcgaaaattaaattcatggtttattttgtactattttgaaaaatattggactgcgaattgttatttaacaaaacagaaggtccgctctgtaatttttgtaaaatacaagatccaaaataatatttacccaacaataaatctacaaaaaaaattatttttaatatctttatttagtagggatgcatattttcttcattgtcatggtcccaatggggacctgtctttaaccgaacgaggattttccatctaaatggagaatgtggtagggatgaagtttttttttgtcgccaaatgttagtagaggcatgatggcactctccacaccaacaagacttgtttaatattttttaactaatcaacaggtcgcgcttcgcgtaaggttatttataatttttttaaattatatatatgaataatagaatcatatcaaataattattgagttttaaataaaatactattcaatgtaattttatttatctatcaataaaagattaaatatcattttgactattgtctattgtatggttcacatgtttatttcatgattaattgtttaatatataaattatgattaatctaaaatatataaatattcacatttatagtgttgtcaccatagtagaaaataattgtaattatataattcaaactatttaagtctcatgatctcagtgcactgaatttgcactgacgtgataattaacgataaggtttacttacacttggataagtgaaatgtcttttccaatgtattagcaagaatcagaagtataggatttatatcataatggactgatattgataatggaaaagatatcataaacttatcattatatctttccagattcaatatcaattagttaatcatatatcaattgatctaaaacctgagatgatgaaggtaattgcactataagagttctttgatttgttcgttaccagcttacacattggtctagctcatacttacatattgggaacttagtagttgaattgattgggagtattaatcatatatatgtaaatctatagctttcatgattatttagaagtgaaatgataatttcttttgagcttggctaaacgagattaaatggtggagtacacattttagtaatgttatccacgttttcgaaagggaaacacatggcattcccaatttaaaattcaatcaattaagcctgattagaggccttatccagaggacaggcccaacatgtacggaaggatggatctaagcccatttgaaacctaggatatacacttccaagactgggtttatccgaatctggaaaggcctctcgctctcatgagaagaaataattgaaacccttcgaataagcatctgggacacatccagagagggcattctaagaggtgccttgaagacctggtacaggatgacatggtaaccctctgacaccaaatcccatagaattagggtattatcccttatgtcagatcctaagagtgtatgcaccaccaaaaggaaatcttccttttgtctaacgacacaattctaagactacaatacataaaaatagtgcatgcatgacatctgtcgaagattgcatggtccctaagtgtacagattgccttcgccccatgggctgcccttagtctataggtccccagtcaatgttttttatgtatttacctgattagtgggccaagtttgcatgcaaaccctagcaggtcatagatatacttgaacctatatcctagcctataaatactattctataccctcaagtaaggggttggaaaatcattgtgtaaacactatagcaagaagctagggttcaaaagcttgtaaaaacccattgtaatgcattaaagctactcaggccaatacgattgactcatgtactagggtttattaatacctaaaccacgtaaaaaatctccatctctactctttattaatttctttagcttctcaatcttattttaatcaatttttgaaaattccagtaaatattttggtgctttcattgagagttgaagaaaactttgaagctactttgtgcctgcaaccatggtggctaccaaaaaaaccaccgtcgtactatccactgcccataatcgagatgatgcaatggacgatgtggacctatgtcttgcagtgcatgcctagttgggcacagccagggatagggaaacatttgaagttggcggccgtcccatgaatacgacccaacatcgagagaaacacgtcaataaaaaccccatcaacgaagacaagatggaagaccctaagggcaaaaatgatgatgaggataatggtgaagacgatcataaatataaagatggatattacaaaaatgggtattattatgagcaagatccaaatgtactctggatgtttgtgttgggttttgtgcc

SEQ ID NO: 377973 - DNA, 9467 bp, Cannabis indica
gacgatgatgatgatgagctgcaaacggcgtcgatgctctttcagctttgatgtaaatgatctgcacggtgggctccagtgggccccgaagtatagcccaattgctttccaccagattttggacctgagtctgcaatgggcttattatttgataatgctaaattaatttgaattttatggtatttttgtaaaaaagagaaattagtacctgagttccatctcttgaaataagatagttacgttgttcatgtgacaaaagtagttccaatttacctccatgaagcttagccttatcaatggcctttaattcttcccttctctccctagtgaatggaaacgcttcagcaccatagtcttcaatcaatccaattagatcctcttcaattgaaacaccattatcatctgaactcaataatggattaataagagatggaatacgatccactttgaatttctcacttaatcttctgtgcacatctaaatgaaatggcacagccaaccaaggcatacacttgaaatgctcttcaaatttagtgttgtcgcggtcgaaagagatgaagatgatctctaattctttccctccatttttcagggaattgtaaagctgaaccaattttggagtgaaagctttgcaaggcctacaccaatatgctgagaaatataggcaaattttcttgccatggcatgaggacaatggtacctgctactctcacaaaataataatagaaaaaacaagagattcagtacaagctactgtaaattcagcaagagacaataattatctaaactaactaactacctctccttcacttgacagaaggaattcaaccccttcagatgataagatatcagccatatcagtagacttagcttggtagttaagtgctgccatttttagctacaaaagccacagaaaaatggtttaatctggtttctcacaagaaaacttgtggtcaatatataaacaaacaaaaagagtgacattcacaaaagagagaattttatttttggccaatgactctttaaaaggtgcacctcagctttattatgcataatatgtatatataaatatgtatccagcttgcattttcctaagtttgggaatttaatttgcaaacatattcttcaagagaatttagattaccaacttgaagtcaaaagatttatattctgatccttaacagagagtgacaataattaaaaaaaatgatgccttgaattgaacccatcatttaaaattaataataaataaatgtacaaccgctattactactgttgcaagaaattagaataataaacaaataatccaacataattaatttcttattgaaataagaaagaaagatgaacacgctatgctacgcaacacaagaaaaaaaaaggtcaatctttagattagattagatatattattttattccttttagaaaaggtaaagggaccagccatattgttcacacagcttttggtctcattatccattcgattctttttatttatttatttattttttatcaatcggaaggcacagagtccagaaataaggattccttacatattaactcacctccaaatccaatctacaatttgtcaatatagtatctaaacacatcatcaatgatcccaattgaggtaggaaggaactattatattctctatgaaacactttattgggatcgagttatgtaattaagaatctaaacaacacaactagaatagaataataaccatgaacatagaactagaacctctgtgaggaaacaacaaaatttcaagtgggattggtccagtcatcaaagttccttagctttattatatacatatatcaaaataagaaaaagaaagaaagaaaaagcgagaaaagagaattaccttacctatttggttatggaatggttataatctcccctgtttttcttttgctaagaacttctcttaaagctagcccaaaggagtaggaccaccagaccaaggtttatggataagtgcccaacaggcacagagccaaagactgaggttatctctatcgatataaagagacccttatattagatatgatataatgaatgccaaagataaagggagtaaaacttaaactattgagttagttatgaattaatttagtgatgatgttatcttgaattaatggtatatccatattgaacattaaagatccctttaagctcttcacacttgcacccaatcgggttggtccatgagtcatgacaatgatgagtttggttttcaaatcaattcgaatttaaaggaattggtagtatgtactgtttgcatgttatttatgacaaaattaaaaacatgtgtgtgattagcagcatggtgaatttaatcaacttgttttttttatttaattgataataatcaaattctttaaaaataagataaaataaaatgtaacatgatacattttagctctatgaactaattcaataacaactatggctaaatcaatatatatgaaataagttttaatgattatatcgaatataactataatggttatatttaattttagttattggatcattattagacggttgtaattaatttaaaaatttatcaaaaataatttataaattaatgtaacctagtactaacatgattttatttattttaaaataaaaaaaattaatttatttcaagtatgtaattaatttaagtctaaaaatagaaattgtacctgattatacatatataaaggaatgttcaaggaagactatcatgtgacattctacatttcttttagcctaacttatctattttatacaccgtgcccacccaacaagctaggttgcttgcaatacaataatttcatattttctttgaaaaaaaaaatacacatatagttatgttatgaattactcgatcaagaacacaaacaaatacaaaaccgagaaaatagttaaaaacaaaactgaacataacacaaaacaaataatttagactaatataatcaagcataaaacaatgtaaatgaaagagatattatgtggttcgaacaaggaataacaatgtgttatcctgcctaccccacggccagaaacaatccttagggcctttgatctttattgaatgaaagtcactaaagattacaccaaaaggaaatgttaagaacagttcagcacactcaaatgaagctttgtttcaattacaatgattctcagaattctctcaactctggtttctctctcattcctctctctcaattctttctctgaatcgtggtctagattttggtgtatttagctcgattgatgaggactccttttataagccctggactagttttcaaatagcataactgtcataacagaatattaagtaattctattatgacattagccgagctagtgagatagtaccaaaaactaggtacctcaaatgtgtagccaaacataacaaatcatccaccttaggttttacatttgagttgtagtcaccctgttgagaaagagctattctgggcttgataaactcaacaatcaagtatgcttagcaagttcagataaagtctgaactttgttaaaggaacatactttgttagcttatctgttgggttttctttagttcctccaatcttcttcacttgaacttctccttttgcaatcatatccatgatgaagtgtagcttaatgtctatatattttgatctttcatgaaacataggatttttcatcaagtgcagtgcactttgattgtcacaaggcactacaatatcttatgaattgaagcctaattcagatgaaaccccttagccaaattgcctccttgattgcttctgtggcaaccatgtattcaacttttgttgaagatagtgccactaccttttgaaaattagatttccaactaacacatccacccgaaacagtgaatgcaaaccctgttatagaactcctggtatcaatgcttccaacataatctgagtctacaaaccatgcaacttcagtgtttatcttattgttattgctgtaaactaattccaaatccattgtaccttttagataccttaagatccatttgacagcagaccaatgttcattaccaggatctaaaatgaacctactcaccatgcttagactgtatgcaaggtaaggtcttgtacgcaccatacagtacatcaaacttcccacacaagaggcatatggaactgtgtccatttgagccttatcctcttctgactttgggcctgggattgagaaagtttaaagtgaggggctaaatgtgtggtgactggttttgactcattcatgcagaacttatccaataccttctgaatgtaatatctttgagataaggatattctagtaggtctttctcccttgatatcaatttttaggattctcttagcttttcccatatttttcatttcaaattttgcactaagttgctgtttctccttgttaatctcttgtctttattttctaatgatgagaatatcatttacatataatagcaactagatctgtatgctattatagtacacacaaggatcatagttgcttcttgtataactagtttttgttatgaactcatggaatcttagattccattgtctaggagcttgtttgagcccatataaggacttcttcaagaggcatgcttgatttggcttgtcacatttgtagccatctggttcagccatatagatttcttccttaagctttacatgcaagaaagctgtttttacatccatttgatctatttttagatcaaattttgctactttggccatcgtgattctaatagaggtatgttttaccactagagagaatatgtcgttgaaatctatgcattctctttgactgaagccttttgctaccaatcttacacttgtacttaatttatttacaaccaattagtttatgtcctggatggtcttataacaattttgtttttttttttgtttagtgtgtataaagttcctttttgtttttttatcaacttaaccttacttttgagacaaaagtctctctctctttattttattttattttttttttgctgtatctttttgggaataccattgttgacaaaagttgtgttaatttggagatccattgaataactaaagagttgatctaaaaagatttcaaattgaagttgttgaagggaattcaaagaatagctcaagaggatcttgggctaagaataaaatattatttgactaagtacttaaggggacttgaaaccaatttcttgggaggaactcaagtgtgggtattactttttacttagttgtatcaatgaaattaaattactagtttgtaatcagtggataagtgtttctaattttgacattctcagttgcaaagaatagctggtcgaaaggttatggtttgatgtttcttgaatctttaatttgttagattagatagatactgaaatatatagtaataggtttaataactttcaattttagtttaatttgcaacaaaagtggatccaaactaacacaatcattagtttctccataaaagaaagaaaaagagattaatgcttaagtgagaatgaaaaagcatcatcagcactcaaaacatcccaatcagtgacataagatgaataatcttcatcttctgaatctctctccctcagctcctcaattctctccgctgcctccttccaatccaaccgtcgctcaaccctcatctcgctgcaactcattccgatcttcaacagcttcaacatttccccttccccatgtcctgatctcaccatctctttatcgaacacctcacccgtccactcctcccgcacaactgagttcacccacgccgctagatcacccgtagaggacgacaacgacgtcttcttcttattattattattattcccctgatccacataattctcagggaatttccctgtcagaatctcaagaatcagaatccctaggctccagatgtccgtctttctggagattcgacgatttttattattattattattggaggagaattctggggacttgaaagcagccatgaatcgatgtgcatggtccttgttggtgagagggacgagggcgtattcagtgaggattggggagaatttctgatcgaggagtacatttgaagatttgaggtggccatgtgggagggctacgtctggaaactccttatacaagtatgctaaccctcttgaaattcctttgattatgctcagacgagtagcccaatctagcccaactcctcttttattacctgatggtcatggtgaatcaaataattaattaattagttgaaattattattaatatatatattaattaattaattaccatggagatggctggccaagctttgattgtcaacaaaatcagatatcaaaagcttctcttctttcctgtaatagtatgcaacaagaggtagtagattagggtgtgacaaccttccaagcttggccatataatcatggaagtactcctctctcccaacattgttcatgtgactaaacctcttcacaaccatggcaggtccatttagaagaagtgctttataagatgacccaaaactaccacttcccaaaacctcagctgatgccctaagaaggtcttccaactcgaacctctctctatctttcatcacaaattgcaagctacctcttttcttgtagccttggctgctgcgcatcatgtcatgatcaagatcaacagtactattcatattattatgtgatgagtattgatcataatgataattagccctttttacagcaccaaactgctcgtaattaactacttttgggggagttgagccatgtttattgggttgtaggagtagtagtggtggagatgtagtggcagttttggttcgagctcggcggaagcataggaacacaattgaggcgattacagctactactaacgtaactaatatcaccattattatgatgtgcttctttttcttgtttgatgatgttgaggacttgcatgttgacccaagaggcggtccacacaactccttgttccctatatttatataattaaatatataatctgaatgtataattgagagaaatgctaaaagtatattgggtttattattggtataattaaatactaaatttcatatatatttaatgtaatgacatctattgttaagcatcacccttatagtggtgctagttacaatgctcatgctctatatatataaaggccaaggtttgacatagttatatgagatgaatattgaatacataataatataatatattttgttaataattttttacatacaattacataaattacatatgatgatataatttttgtccaccagtatatataacattacattttaggaatatgaataattatgtgtactggatgtatgtagataggcgagtcaacaatacttattatcactcatatcaaatataacgtgcgtcctaccaatactatctacaaaaatattgctgtatattaatattaacactattacttattattccatatttttgtcatatattaattgtttagatattatcgatattctatctaaaatattttttcaagttcattgctaaaagttaaaataattaattaaggacaatatatagtttatcgttataaaccacaacaacacactaccaaataataataataataataataacagcaaattaaaaccttttgtttttttttacttgtataattatctattcatttcacgatattattcaagtatatgcatcatttaattttgtgaatcattataaacagtactgtgtaattattatcaatgattactcatatcacaaaatttgcagttaataaaattaatatatgcatacattttacgtacctaagaaggcggttacattagcattgctaagggtggagggtattggtccctgaaattgattattagcaaagctcaagaatttccaatcctggcgtggaaactctggtatcctccctacaaaccggttactctcaacgtttaactccacaagcttagtcaacctcacaatggagttgggcaatctcccatcaaactcatttctgtccaagtaaactttcttcaagtaaaccattccttcaaaactatcgtccggtatgtcccctgaaaaatcattgtacgacaagtacaaggctctcaaccctcgaagcactttgaattcaggtattccacccccaaagtggttgcctatcacgctgaggctgcgcagagtggttgggagcttggacaatgtgtagacatcgatggtgccacctagtcccatgttttcaagtcttaatccgtaaaggcttccattgacgcatgtcaaccctttccagttactgtcgtttgtgttgggaatgcataagggaatggaagtgctccaattggccagctctgtgtcattgcttaatgatttcttgaattggaggagtgtttcaccgtctgttacagcctcggcggcttcttctactattactactaataatgttattatcaatagggaaacgagatcatagctttttttattattattattatgagccatgtatatatgtatatatatatatatgtctaatcagctagctagctataatactgttttgatgagtagtgttttacataatataatgaaaatatggagaaaagggttggataaaaagaaggaaatggaagaagaaagtttgaaaataaaagtgacaaaagagaggttggtggagtctgaagatatatcgatgagattcacaaggtaattaataataagagtactagttatactaaatgtatatatgaagaaatatgagctgtggtttgttgatgatgatcatggggctcgccggcctcaaattaattaattaattatatataatttaataaaagtgtatagtgaaaatcattatttggatattacctcttggctctttattcattaattctaattatgtgtatatatgctgtgccctttaattagtttcttgtttagtagatttttggtgtcgttcagccgtctctatataatataatactatacatatatacaatcattctatatatatgtgtgttcatgattcatgatatcattttcatatctgatattgctaagtgcttgccatttcgttcagttgagtcatatatatgttatatatgctagctggatttttttaatttattcgcttcacatggaatatataataaaatattcatacaaaagaagaaaaatggagcattgatatatactatacatatttgctgggctttgtttgtagttataagagtaaatttataaactctgattaaagtgcatagattagtcaattaatattttgcgtgatcaaccattatttttaacgtataattatgtgacgtaatatccaaagtaataatttgacaaattgtacctaaaacgacacatgcatgcaactatagaagtgaagtgaaaaaacgtgtttttgcaaatgtcagttatatatacgaaaatataaaaactgtaagcgtttgcagcagcagaaagta

SEQ ID NO: 377974 - DNA, 5609 bp, Cannabis indica
tatataaacaaaaactactaacatgcagaacttgaaaataaaattttatccaagagatataaaccctatattgctagatcatacttactccaaagcctgagcaacgcctatcgctatctggagcctgaggccccaagacagagacttgtaaccactgtagtgcagggcctcatcaaggggcacacttctgatatagttatatatgaggagatgttgcccgtgctctgcacaataacctataagtggtacaatattcggatgcttcaatcttgaaacagtccaaactacatccaaaaactgttcttcttctttgaaagtcagtgttaccatgttgatgttcttcactgccataacctggatagcaataattcttgttagataccaaaaaacaaacaaaatgtaagaagatactaagaagcctacaatgtttcggttttatacttggccatctggaaactctgctttgtacactgagcctagtgatccctccccaagaagattagtttcactaaagctatttgtagcggattgaaggtcggcaatagtgaagagttttgctctcatagggaatccatgtttcctcgtgacactttttcttttagatgtcttttgagttctgctattgtaaattggaggcatcctccttggaccaaggatcggtgacctaaaagtcaacatctgtgggctttcttcaacttcagcaggagaactgtctacaagtttacaaccatgaaaaataaaagtgaaaattgagattgaaaaataaaaagaaaaagaaaaaatgacaatggcttcactaaatgtttcatacaaggttataagacctgtttataactaagaaaatagaaagtgaaaatgataaaatcgaagaagagggggaaaaaaacttatgccatcattctttagtgtttcatacaaactcagaacactactaattgatacagataatagactaaaaccagaaggtataaaaatcagcttaacagcattcgaaatatttctaaccactaaatactgaaaacattgtattgcatgatgcaaaacaagtaaagattcttgcacaggattgagttgttcattcttatgatatgatacatcacccagaaaatcactactcggtcttaagataagaatatacatcagatcttaaggaaaaacttgtaagaatttcaatcatgcttaatgagagattatatttttatctaaacaccaaatttgaaataaaagttgtgttcacctcttactgcagtgactggaagcgaatgtgttgtattgttgttcaaacctgagcgttgaagccttcttgcacggtattggttgatccgaatggacatgtagattacaatacacgatgctaccagagtccctccaccaactataaaagctattcctccaggacccatacttttcttttttgttataaatgtttcaacaataggatagctctcaattgcgctcgactcagttgttggaggcctactgatattttgttcaatgggcactgtttccaatgggaaatgccaaggtggagaatcacctgaatggaaattattgccgcccatcctataaacagtaaatgaagaaaaataatcttgaatgctagttacttaagatatgaatgtttgattcatttaggaagagaataatagcaagaagagatttatagcttaccataaatttggtattgtagaaaaatgatccggaatgatgccactgaaataattatttccgatattactgcaagagataggtcttagcagggaactaaagaaacatatctactgcaattgaaaatgaagtcgtggagcaaaacttacaggtcaagtagtggaagtccagataggtatgtgaccgatccagtgaacttgttattctgcaaatatctgcacatatacattcacataataatctcagaatatacaaccaaaaaagactctccaagcacttaaggaaacaactcacagtccagtaagatttttcagcgatccaaatgaactcggtaaatctccagtgaaattattaaatgacaagtccctgtaccataaaattattgtttgacatatcagtcagattaaataggtctgttacaaaattatgccattcaatcagcaaaaagtgcattagttgataaaacaccatttcactgaaattaatacagctcaaatcattagcagtagatagtcctttgtttgggaatgattctaaagtttcaatataataatgttcttattttacaataccaacttaagcaatttagtaaattggttcacttttttatcccaatcttccaatttctttctcttcaaagttgaaataaattttttaaaacaagtacaagtaacaagacaagaacatacatctctctaagattactcaagcctgtgaaaacattacccacaggtccagataagaaattatggctgaggttcctgcatcagaaaaataataaattataactgaattaaaatataatagttagcaaaactgttttctcgtagacaaagaactcacaaatgccggagatatttcaagtttgatagagagttgggaatgttataggtcaaattgttgcgtgccaaatttctaaataatcaagaaaatggatattgagttagttgcacttgcaatagtaaaatgtaaattaataagagcttatagaaatggaacaaattaaaacaagaatcatgtttacatatgagtggcattgggaggtaattcatctggaattggaccccaaatcttgttgaagcttatgtccctaaaagaagaggaaaaattaaacatctgttgattgagcttctacataaattgactaaataacaaataaacaatataaaagtcatttacatttgcttcaagttacaaagactagaaagctggtgtccaagaaaacctgtaaggtttaatccacgaagtttactgcaaaagaaatgtaatccattaatattttttaactattacatgaggttagctaataacaccaaaacaaagttacaatagttacagatatataatagatgactcataacatgagactcctgcccatgattcatcacatggatctccaccctccgttctccatcccctcagctctgatggaaggttgagattccagtaaagatcttgaagagctgtgactgcatggaaaaataaagaaattttgcctacttttaagcagtgataaaagagagtagctcaaaaagaaaccttaaagaagaaacaggcaaccgttttttaaaacgaacattagaaagaacaataatcttaacacgatactgattagaaagcaatcataattagaaaaacgacatcaaacatcttataagctcaagagacccactaatcctaaatacaacaattcatatgaaacatctactatttgaattgaaccccttttccctccactaccgaaagatacagaagcatattttaattctacacaaagagaaatcagcgtcactttttgtttgttttcccagaaaagcagggaaacaaaacgaaaatcaaatccgaaaatcattttcttacatgattttatttctccaaatcaaaatatatctaaagaacaaagaaaaaaagagtaaaagagtaaaagaaacaagaaacaataaaaaaatcgatcagagattaccttcggaaggattggtaaatgccaaagtttgtgaagccataattgccgagaagacaattacagtcgaccacatggatgcactctgctttctcattttcttactgatcaaacaagtcaattacgcactaaactactccctgagatttctggaaatacaaagattagagaaagactacatgaattcagcattttctttctccctcatgcattttcttgggaaccaaactagtcggagaaaaaatagagaccaaaatgttatcttgaatagaataagtaatgagaaaacaaatctttgacaaagtgcaatttgtatattggtagggaaagagaggaagtactgagcttatttttacagaggccggaacaatagaggaagaagaagaagaagtagtagtagcaattcttactgacctggactccacgtcatcaaaaaccgttagtcgttataggattccaagtaatcctctgctctcgtccacacggtacttacattttggcttctttccctgaaagcataagtgggccttggaccactgatagtgggctttcgacttggttagtggcccaagttatgggccattttaattagtttctcattttcttctctctctgttctgaagctcatgagctatggcggaaggtgaagaaaacgatgattacatgggggacctctctcagtttcttcctcaagaaacatcaatccttccaaaaccttcttcatccaaaaaggtaaaaccattgacttttttgatggtttctcatacattttcctttaagtttgtcagtatccaaacagtgaaatgatttctttatgaacctttatcaggtttctcattcccaacccctagtcgttcaattctcaaagaagaaggccaaaaccctaaattggcaggagcacagaaagctcgaaagagagaggaagcagataaaagaagacgaggaaatcctggcgagaatagaggacccgattccacaatccaatataggtttcaaattgttgaagcaaatggggtacactcccggttcagccctagggaaagagggtacgggtcgggctgaaccggtggggctggagattcggcggtcacgagccgggatcgggcgggttgacccgagggaggagaagaggaagagagaggagaggaaggcagagaaggagatgaggaatgaagctgcattaatggaggaatttgggtgtaggaagaagtctcagtggaggagtagaagagtgtttgttaattttaacaaggcaaaaggagctttggatcaattggagaacaaggaagttatggtgccaaagaaagatgaggatgaggaggaggaagaacaagacctagatgatgaagaagaggaagaagagataacagaagaggtatatatctatatatatatatatatatatatatttgtatatgtacctagctttgaagcatttcaattatgcttttatattttatgtgtgttttccttttggatgaagtagagatttcaaaatatgcatttgggtgggcatattggttgcacttttccaatagttaaacctgaaactctattatgtaacaaatgaattggttaaaaaaatttgataattgaagctttgaagttttaatatagttcatattgaactattattggtaaatgtaatcactcagacacgggttttcttttttatatatttgtttgttttatttggcttaaactaggaaatattattaggtgaataatttggttttgggtcaatgcaggatttgctgaacatattaatgaaactaagagatgagcacagatattgcctttttttgcggattccaggtgtagttttccttttttttttttttagtttaaattactctatttattagaaattagtaattctcttattaggtattttttatttattgtcatatattttttgttcctttagtaagtagtctagattgtatttagttcacttactttcttcctacgtatgtaatct

SEQ ID NO: 377975 - DNA, 7359 bp, Cannabis indica
tgcttgtgggcctgacgagatttgcaaagctgggcatgtggggcctccaccatttgttcataggtgggcccagttcgggccataatggttgtaatgactccagcatcacgttcatgaggcatggggcgggaagaaaatttttgaacaatctctttttctcgaataagaggtgacttacccgaatggtgattacggtgtcccctaggagaagctgataacgtcctcttttttcattttgatggtctctcttccagaggtagagacttggagctttcaatttgcatagcaggagcttcattggttgttgaattcacaatctttaatttttcctaaacagagtccctggagtattgctatgggttctgaccgccttcttctttggtctagagaccggtttcataggtgcctcagagggaggggggttattaaccattggttccttccccttggccgatgtttgcttcgccgtagtgattatcttcttcggtgtcgatgccagattagccgagttgaaccagtgcaattgatttcgagggttgaaacaactgaaaaatgctgtctccgccttcatccatgggtcgtaagcagggacggccttgccttcaggggggaaggcatattcagtatttctcacacaaaactgcttgtcgtgtccgagatatccacagttataacataacttcggaagtttgtagtaacggaattgaatccattctttcctccctctatagatatcaagatagaacccaggaatgagcctgtgtcgagtatctagttcaacctggaattttaaaaaaccccgcttgacaatagtcttcttgtcagccatatcgtatcccttgtaggctcccgccttagctgcgatagtcggagtgttaaccgcattgagataaggagtggggagacccaatgcttgcacccagaatactgctttgaaggtgtcgatatcgctccaatggccctcctcaggccattcatgaataatgagaagtttgccatttatcagccatggcctgttctcaagaacataaacacagtcttcttccaggtcgaaaaaaattccccatacacctggtttaagggttttaaatcgccagttaccttttagtttgcccttagtcttccaaatctgagttaagatctccttgagtctggttctagagacccttttcccttcaaaaaaattagccaccacacctgttctgataacttcatcattcagttctatgtctggttcaagctccagagtcatagattcaaaaaattcctttcgcaggttctccacttcatcaatcccttgctccctagagggaggattggcattaatactagagccattaatattatcttcagtgttgtgcagatcgacatcatttactctgtttccatctacctggtttgacaaaaaggtaaaagattccccctgccccatttggtcattaatgtcccccattaagaaaacaataaaggattccaaccaccacttgctttgactttcgaaactcaaaaacataaaaaccaggagacaaaagaactaaagagaggaccaaagagtagaatattccaactgttgaaaaggttgaagcactcttacgcacaccagatggtatagccaccaaaacaaaaagagtcgttaggttggagttccaacactctcatcctgagagaaaagcgtaaattagcatctagaacacaaacattaacgcctttcttccaaaatagcgcaactcctccaatgttccactaccatcccattcgagaaacctaagcgatgtgaccaagtctccgtatctcttcgcctccatcaagaaaactatcctagggcttacacttcagatcaacaattgaagtgcgtgacaactgccccaggcttgccaagggcccaacagttccaagaaaaaggattaacattgggactttgggggcttgattaggcccacctcatcggccactagtaaatcctcctcacgttactgaacttatcaaagcctttttctcacactcaattatacaattctcttttgatgaatttcattcagaatcgtcaaactaagttgatggctaatcatcgagttgtattcatagttaaaacttaaaaccatctgtacagaaaaacaggtataacaatttaaaaatcaatttttctggtttttgtatttaaaattattttgaatttttaattgactaatttatgacctagtgttttggcttatcaattgtccgtttaaacactacattttaaaaataaatccctgttcaatttgatcaaatacctttgtatatgattttaaaactaactgatcaatatcatttatgtatgattaaaataaaaacccttattttaacatttctcagttttgaaccacttacaaaggtattgaagcagaaacaatatgttaaattaaattgaagaacaatgaaaataataacttagatttcaacacaatcatcctcatctgcatcggcatccgactctgcatcccagtctaaactataagagttggccgatttcatcaactccgttagtccggttaaatcctccagataagtaggaaggttaatcgcctggagaatgaattccattccccttttcctatattctgatacaacctggaaaatcattaccattaacacataatttggaactagggtattatgaagcataggactaggcttcacaaggttagaaagatcaggcctcagatacatcagtttctaaagctactcactaatatgaatcaagtttcatgaaatcaaaagtttacggatactttggagaaaggttgagaattattgacaataaaacttactgtgccacaacaagctgtgcaactgtttgaggattgacccacaagcatcatctgagaaaactgcgagagtgaacctcggatttggtgcggtaaaataccaagaggcagctcactattcccagtagtaatagagcttgaaacctcaccttctgcaaatatcctgtaaacagcagaaatgccaggtcagctagaaaaacaagcaaaatgaaactactgtttaaatcttccatcaagaactgaaaaaaaattatttgtttatcatgtattgattttgcttatttctcaagcattgatttatctagtttcaattagccaatttttccaaggactcacccacgagggtgatgcaagactcccaccaagagttccactgctagggccgaagcaattggagcaagccccggccgtgtaacagtacactgctggtccaaagtgcggttggcagttgactgcactagcaataaacagctgatcagcaaactttataaatcacaaagtaggtaatatatcagaaattttaaatccaaaaattacatcaataggagcaaccacgtcattgcaaaaatagcagcccaatctttgcctttcatgattatccaccatgtcaagattgctcaaatcaacagataaagcgtttactgcttcatttttcaaggcgtgttcagagctaagaggtcctgctccatgtcgcataactaaaaagctatcaaaccctaaagctgcagttacagttatctgcaaatagtaaaaaaagaatgaaattgaatcaattaccacagctatgtatagctggaagggaaatcatgcacgtggagctcgggccatcaggtcaattgactttttaaaaaagaaaggcaaaaaggtgcaatgttagcgaattagaaagtagaccttattaaaattggcacatagaagtgaaggtagccaccgactttcccttgtatcagtcaacaagaaaactacatcatgagaatcaataagatcatgcagccgtttacaatcatcaagcacactaggttcttcttggctagaaactggatgcccaggcattggtatagccatcacaacaccctctgcttcctgagaaatgaattctagttaatattcgtgttagtttctgtttgcagagaacaatacaaggcaaaaaagatcatatacagtaccacagctggaaatattcgctggagacttctaacagctgctgtggctttaaactcacctccattaaggcaatcatccattgtatacagggattgccttaaaggattagacatagctaccttcccattgtcaagtaacgtaatttttcgaacaccccacgcctgtaagtatacataatttgtaatcagttaagaaataacatgagaaaatcaattataattgtttgatcactcaccatgagcatacgagccacctgacacccaagtgtaccagctcctaggagaagacactttagcccggacaagatgtttaagttcaaagaaggcaaagcacgccatctcattagttttaaattcaaatctgcagcagatatggccaacctgtaaaagttacttaaaaatttaagaaaatattgtaacaaactaacaatacaaccaaaggagagagagtttcaacagatcaattactgatggacaagatagacaaataacctagtgggatccatagatctagcaaggctaatgcatcgaggcatctttctccctttattaagttcccatcccactgcattaggaacacattgacgatcattccatcctacacagatattaatattataagctacggttatgaatggtaaagttaagaagtgtatcaacctctacacatataaaatcaaaatagacagagttgttacccaaaagccgcagctctaccttgtggaactgcaattagggtttcaccaacaagggatgatcccaagtcagcaaaaccacgattctctctgtagcataaaaatctaactgagttgaggttccatcttgagcaaatgagtgcaagaaagttccgcaagggccaaccaggattgttcggaaggtggcatgggtcataaaatccaaagaacaactgccaatggtatgaacaaagcttaaacaaagataaagttttaaatttaaattttacagaactagttctaatttccactggtctgttaattttaatgcaacttttctaaataaccttgaggatttacagaccttattgctatcaccttgacaggtttcccagtccttaagattcttaatagtggcatttgaatttgcatcaacactgattaaaaagaatggaatatctgcatcagagtcattgacttagctaggaaaatgaagataaacgagcacatttacttctattaatataagagggcaaacttacctgctgttgagcttgagtttcgccacgcattgcatgctttcgaaatggattcagtctgcatcataaaacaataaatgatcttaaagttgtaatataaatctaaatagttagcatctacttggacaaataaattatagtttgagcacctcttcagtgctaaaatactgcaaagctggcctcaaatctaccaaggtagctgggggatcaagtaacagagcaggaaaagcaaaccaataatgaaaagtccacttcttcaggtctgcaaaagagatgagaaggaaccttgaaagtacagaactgtcctccatagcttttccagtatgaatgtcctcccaaatctaattaccagtgaaatgtcaatgtctatatttggtttagcaaataccctaataccaaagtcaaattttactttgctaataatgttaatgagaattgaataaagggaaaaaccacaataaatttgaaacaagacattagaaaaacaacatacaaaaatgcagataaacaaccattctaagcgaaataccttctttgcttcttcttttaacaagctcattttgtcaagtgaataaaagttttccaccgtattggtgttgtaaaggataccagggacagaacacctgtttcgattacctagacttgcgactgttagtgttgattgttcactcaattcatcaggcaaagactcagctaaaagagttaaatgatttgatacttgggaatgagaacaaggagcatagaaacctgaaacaaattttagtttcaagtaattaactttagtaacaaaagtccacatttacaagctaagcagccttctgtagtattcatcagtcaaaattaagtctttagagttccacgcataattttgctaaatttgggaaagtcacaacaattttttttaattcatttacgattctttttcattatccgatattaatttggccctaaattcaataacttcttatcacaattgatcaaaaataaaaattggaaattcgaataacaccaagccaagcccagaatagcctaattaggaataatattcgctggttttattatttaaatcaaatttttatattttcacacaatacgaaggcgttaaatttaacaaaataaacaactttggacgacaaaagcagtcaatccaaaaaaaaaaaacatggaagaaagagacgaaccagtaatgggaataggagagtcatcaatcccaagtttgttaagcttcaaagaagaaagtctatgccagaaaccctcgtccactgcgctctgaaacggtgcaaattggagtagagatcgattaccttggtccgccattggacttgctcgtcgaggaaatcaagtccctgttattctctcacaaaatcttcaacctgctttatttagttattttaaaattttaaattatgacaaattacaaattacagagaaagtgctttgagtcgggaatctgaaatttctgatcagttagactgagaaaaatcttttataaataaaagaaaacacgaattacatataagttcgtggcgtgttggctccggtttccagtttgtgtcttttttctgtcgtttacactatttagttttagtaatttgggatataagtttaagtttgtgaataattatttaaatttaatttttagcagtaataatatttatattatatttgtagaattctgtaggttctaaccgagtcatgttgcttttgagctcattcacaatattaaacatagaaagcgaggttccaaaggattcgctgctcttaaattggatatgagcaaggtatttaatcgtgttgggtggtcctgtttagcagcaatcataggaaaaatgggtttcaatattcgttggattactctcattatgacttgtttgcactcaactactttctcattcctcatcaatggggatgttacaggttcagtcattcctcaacgaggccttcgtcagggggacccactctcaccatatttgtttttaatttgttctaagggtctgccccgacttcttcaatacgagacgtctacaggacgtcttaaaggtttggttgtctctcgaatagctccaactatttcacacctcttttttgttgatgacagttttcttttctatcaagcgaatgatagattttgtggtgctaagagagctttggatatctatcatcgtgcttctggaca

SEQ ID NO: 377976 - DNA, 3293 bp, Cannabis indica
tttcacctgcaaagttatcctgatttttttctcattgacaagttaactaggactatattttcgcaaggcttgtttgcattggtttctatgtttggattaaagttttttcattttcttttgttcaggagatgaagcgacagtgtgatgaaaaaaggtatgtaacttctagttttctttttactaattttcattttgtagaagggaatttcatttgattttggaagaatttttcaggagtgtataccaatacatggtggatcaacaaaaagagaagggaaagccaaaaggtagtaaaactgaaagttttagctcgcagcacctgcgcgcagctcatgaagcatatgatgaggaggcaactttgtgtgtttttcggctgaaatctttaaagcaagggcagtcccggagccttctcacacaggcagctcgtcaccatgcagctcaggtttatgagttttttagcaatctaaatttcagtaccttttttctcaaacatactgatgttatgacactttttttccgctctcctattacaaattcagttaaatttctttcggaagggacttaaatctcttgaggctatcgaaccacatttgagagtggttacagaacaacaacatattgaataccaattcagtggactcgaagataatgatggagaagatgccgaggatgatggtgagaacgaaaatgattctaatgaatatagggagttgagttttgactatcgaccaaatagacaagggctagatgtttcaacttcaaggaattcaatggaggtgagaatctagtaagaagaaaatgtgctgtgtgctcacatttcaattagagaatcctatattcaactttgttccttgcaagtattttcatatcgcatatttgatgatttgtaaataattgtgtaaaagaaaaaggaacgcaataaactaatttgaatgataatcaacatctatatattttttcttctcattcttgcctgtttttattatcatgttcatcttccttttaccttttttttcctccttttaagacttctgtggcttatttgacaggtggatgatgatggaaatttgtccccccagccttcaaaggtggaaaatgcagaggtatgattctaccgaacccatctgtggaaatttttagctgcatgttgtatattgtattactatttcaatttcggggtaacagatagtctgatttccaaaccatcagaccataaatcatgtgtttattcacgattctttgaaataatataattttgtaaagattttcatgcaaatagagttatcttaatgtggtcgatgtaaatatttttttctctttcctaaactgtattattgttacttttgctgtagatgattctagatagaaaccaaggagatttcaaggtttcaagtagagaaccaagagttagcagctactcagctccagtctttgcagaaaagaagtttgatccagctgaaaaagctagacaaatgcaacttttatctgcacgcaaatctcacacatatgtacttcccactcctactgatgcaatgagctttgtttcttcaagaaatagcagttcagctatcctcacaaagccaacgggtcggacccataacttgtggcattcttccccgttggacgaaaagaagcttgaaaaagacattggggatgtcaccttttctgcaaccaatacctcaaaagcaccattggtactaaaggagagtggtgctagaagttccacccaattacctccacctctagcagaaggtcttgcactatctcagctcgatacggttaatacatctgattctaaaaagatcaaaagacatgctttctctggtcctttgactagtaagccatcatcaacaaaacctgtagcatctgccagtgctcctattgtatctgctgaaattcctcagctagcatctggagtggcatctcggttgcaaatgccacagtcatcttcatcccccaaagtatctccaagtgcgtcaccaccccttgcatcttcgcctaggataagtgagctccacgagcttcctagaccccctggtagttttgctgctaaagcttcaagatctcctggtttggttggccactctgctccattgggtttacggaatcaagagcttggtgctacaaatagactcaatattgcatctcctcttccaactccaccattgtttgtgcctcgaagctactccattccttcaagaggtcaaagggaaatggctttgcacgtatctaaacattttgagtctcctcgtggttcaaccaaggctgaagatgttgcttcacctccattaacacctatttctctttccaacatcaacccagtaccaacggtttcagaagtatcttctcagtctagtccaatacaaggtgagcactttctaagtatcctacctatatttgtatgacactttcacatccaattatatataaatagctctagttaactaagttatgtataattaactactcaactggttagtcatgtagtttgctccctgaagatttggatttactttgttctcaaatattatagggctaggcagggactaagtttaactatagggcacgtctatagtacaacactcctatgttgtattagtacaacatgcccccaaatcggcattgggcgttttaattcccattttttttacgatggcactcattatagttatagtgaatttcctgtaaatttttaagaaatgtcaaatgtttattttcagtattgtaaaatatttagaatttttcaaaaactcattacgatgaacacccatataatttatgtataaatagatttatgttaatagtaacacaccacaattctgagttgaaagttcagtggatgcaggtgggagatgatactatcatgccaaccattaggtgatgaagctatccatttttttttttttggttatttaaaatttgagtgtacccagctgaaggttgtgttggggctcttttgttttggtctgtaaatatatgatatgttattatcaagtgtttagtttctgatcctgatctttgtttatccttttgtatttgattatgatggaaactaaactctacacaagtttttttcttctttaactctctctgtcatttcgtatatatcttcgtacgaggaattttgttattttttttattggttggtttaacctagtaatgaagaaaagatttttcattagttaaatttggtttatctacttctttctattgtatgttgttagtataatttttttattatttcaaaatgtgttgcataataaaatattgtttctaattattttctattttaa

SEQ ID NO: 377977 - DNA, 1428 bp, Cannabis indica
tttgggggaagcaatgcactagccttttatcaggctacatttcaacaaaaactggtaaactcaaaaaaaaaccttagtcaaaaatcaaataaataaactacatttttagcattctctatatacatgatactgattttttgtgtaggtgttcctcttggtattgggactatatcaattgctattattcaggtacttaaatctttaaaatatataacttgaaaacaagttttggaagagaaactcagttagttacataaataacaactcattcaattgcagattcctggtgctgcattgggtgttctattaacagatagattaggaaggagaccacttctaatggtatgattaatgatataaatttggtgtcatttaagttgtaaaaatgtagagattatgatgaataaattaacaaccaagttggggttttggccaattacattttcagatttctgcagctggaatgtcttttagtacctttcttcttggcttgtcattcttatttaaggtttgtcctcaaactgtttggtacgccgtattacatcgtattgtattgtatagtattatattaaatctaaaaatataacataagattatatgtctatttttaccaaatactctattatagaaacatgtttcatattctattgtattgtaatgtttttgatcagggtctgcaccagaaccagttacatgagctcactcctatgttggtacttatagccatactggtatataacaaaaacacacaatgcatctttctttcattttttttgacacatttgaatcttttcactttaaaactcaccttgtcattatttgtttttgttgttattcaggggtatacagtgtcattttccatagggatgggtggattaccatgggttataatgtcagaggtacatacctatgaatatattggtgtaatgaaatatcgctaaccatttacaagacgtatagcaatgttcttttctagtggtaaaaactaatgatatgtgtgtgtgtttttgtatgtatgaacagatatttcccataaatgtaaagggttgggctggaagctgtataacattggcaaattggtcatcttcatgtatagtgacatacagttttaatctaatgatggtttggagctcatcagcaacatttttcatgttttctgcaatgtgtgcttttactgttgtctttgttgcaaggcttgtaccagagactaagggaagaactcttgaagagattcaagaatccatgaccacaatcaacatcaacaacaactcataatatcatataattacttaattactttattacccttgtataccaaccaatacaaccaacaactcctctataagttgcaatgttgttctagcagtttttgttatctaaaaacaagtaattctatggtaaagggtgtatcctttctttttttggtat

SEQ ID NO: 377978 - DNA, 1853 bp, Cannabis indica
ttgtcaaattaatgaagaatccatcatccatgttttagttttatgtccttttgctcaatcctgctggcataggactgctgtcagcactgttgctgcaacagatggggatttcaaaaaatggttccaggatgtaactcaaagtggtaatgcctatacttctacagaaattttaatgatagcttggcaaatttggctaactcgtaatgatgtgctatggaatcaaagatcaaaattggcagcaaatgtagtcttcatagcaaaatctcactttaatcaatggtattgcgctcaacaaaaccagttggaatctctccttgttcataacaaccaaggattgattatagagcattggactaaacatgtggctaatatgattaaggttaatgttgatggggctatatttgaagcaaattgttcttttggatttggtttcattgcccgagatagtaatggacttatgcttaacgttgtttcgaagagtctccctggccatgttacagctgaaatagctgagacttttggtataaaggaggccctaagtttgataaaaggcaagggatggtagagtattctgcttgaaactaattgtttggtggctgtacaaggcagcgacaatgtaaagaagctgccatatgcatttggtttactgatttgggattgtaaacaactccttgctgagttaggtaatgtcaatttaagatttgttaagcgttctgctgataaggttgcgcattttattgcacaaagtgcttgttccttgtcagctcgtgtttttcattttcatgatttccctgtagaattgctagacattgtaatggttgagtctttaatctaataaaatgtcataatttccattaaaaaaaacacacacacgagttaaagggtagtgcaatttagggtcgacaaaaagaggcggacacgataactcaactcgaaacctgcacgcgagttagtgggttcgggttgactcatctaacccgtttaataaacggattgtgttcaggttaacacggctaacacgaaattaaaattattttagaattttaacgtgtcataaatgggttataaacgtgtcattaattgacatgtttaaacaaaatatgcttataaacgggttacacgggttgtgtagtgtccacccatttataaacgggtcgtgttcgggtctcgacacgacacaaatacgacccgcaaacataattttccagccctaatgcaatctagtcagaatatcttaaggaaaaaataaagatgaaatttaaagacaaatcataatagaagacttcgattggataactaagctattatagaatcattttatacaaacaaaggtgagaacacaccaaggttctatcagaaagtgattgattgtgctaaattttggcttttgtttttttgaaaattctggctacaaatattctaccaagttttatttgtagataaaacctatgaaatcagtgataagcaatggctctacttagataatagtttgtaattgcaaaaaaaaaaaaaaaaaaatctttattttgtggtaattggcaataccgcgttgttggattgctacaataagttaatactaataagatatcaaaataatcattatctaagtttcatatttcatatttcagttgcgaaccaaccataaagatgaacatgaatatgccaatcagccgttagttcggatgattggggccttaggttgcaaagtccaaagtcagagttcgagtaacccaccttgagctccttctttgtgagttgttcgacactattttatcccatattcgagcccaaaaaattataattctttagtcaatttttatgggattaattacataaggcaccattttttgtaa

SEQ ID NO: 377979 - DNA, 5769 bp, Cannabis indica
atgatatttgtttccatttcaaattatagttttcattttgaggttagattgtttccatttttaatttgtgttgtttacaatttcattgtgagttgtttctattttttatgatatttttctatttcaaagtatagtttccatttcgaggttaaattgtttctatttttaatttctgttgtttttatttttaatgtgagttgtttctattttttatgatattttttccttttcaaactataatttctaatttgatgttaacttgtttccatttttagtttcagttgtttgcatttttaatgtgagttgtttctctttttttatgatatttttctattttaaattatagttttattccgaagttaaattatttttattttcaatttgcttcgtttcaatttttaatttgaagtagtttctcttttttatcatatttttttatttcaaattatagtttatatttcgaggttaaattatttacattttttaatttgtgttgttttcatttcacattcacacagtcgtatatatatgtatgggtatataagattaaattatttctattttttactattaattgttcgctttttgaaccaaaattatttttatttttaatttgagttatttgaggttaaattattgtcttaagagcatatttttatttatttatttattttgcttgaggaggatcatgaaccttcgtatttttagaaaacaataagtaaatgtggttagttttctataataccgtattttgaacataaattaaattataaatagataactgaaaacttcccttttaattattggtccatttaacacaaattgctactctcttggtggaaccaaaatacctcacccatctcctatctctagatcatgctggctctgcccaagtaactcacgtgcgtgcttaggaaacgatgaagcagaaagcgggaatgatactacctaggaacattattctatattttccatgttaatttcacaagtcaaaattacatatagtcaaaaaggtttgtaagctacactaggagttagtaccgaagcaccagaaattaaggagaagaaaaagaaaaatataattcaacaccccccacaaacaccaaggcaccaaaagtagttactcgaaagacttctaacttacaaaactcgtagctaaaatgtacaatcagtcaaacaatgaagtgagctttataataagattcttaagctaaaacgcggccacattcttgttggttccctcttaatttacgtgccccttctaatgccgtgactcctgattcaccactactgcgtagatttgccacaagtaattttctcgttttcattcacctttttcgatttaccatatattaaaaactaaacttcctttttccctttttcctatgtttttgatcagcttcaatttacaacatctccatatcttacagtgaatttcatttcatggacgaaactcaaatcttttgctgccttgttcgctactattattactgccattgtcacaagaggtactagtggtgatgctggcggtctcttttttggttgccaatgtccttgatttcctcggtatgcatttggctcgaactcctccaacttcttcttcggccaattccaacctcgaactcctgtaatacgatactcttttagaattgtttttactataaaactataattcagatcgataaaagtgagtcaactcgttcaaattaaaatttaaggcatactatacacgagtctctcgagcaacatgaaaaagaaatattcaattctatacttttggctaaaagaccccaccagctgccccaaccgataaatatttaatcatcatctgctaggtaaagagattttctagacttaaattcccagctgggagatctttaacttcagggtcccacacattattaatacagaataaggtcagctattcaaatcaatatgatcattataactacggttgcaaaaagctgcttcagctacgtaccgcagtacagtgtaaaaatattactatgtttgtgctacaaagtaaataaagccagctggcttttgtgtgatacgcacgaatcttgcaattaaattcaattaaattgtgcctctatcacaattattatcaaaaccaaaacgacaagaatgaaaaggcaacagggcaaagaaccataccctgctctacttgtatgaaatttcaatgtactactttactctgatctttaaggctcataaggagccttttatcaattttttccaacattgctttatttctttattcttgtcataaacagcttccgtgttccaatataagggtacaaaaagtatggccacattaattaaggtagaaaagacaataattaagtctactaataagggcaatacatttcgttgagtttagttatttgacatttatgtcacaaaatatttgagcaaacgaattaatttaaacttaccgatctgcattgtacgaagtagacctttgtaaagcaggaacctctactttctttgtctccacaaggctgccgctaaaatattccttctcttccaatttcaccctagaaaaattagactgttccgaacgagtccccactggattccctgcaccgcgtggcagcctagccttgtattgaccaatcaacgacatcccatgatccttcaccaaagtgggaccacagtccttgaacgagaccgaaccgcacgatagcaactgcattagaaccgacgaggccttaacttttccacccccacaattctcgggcgtccggttcgggcaaccatcctcctcgttcactccgttactgccgagtatcagccgtccatcagctttcaacagagactccagcgtttcgggactcgaatcggacggcggaggtgaaatctcctccctgctcagctccgtgctttgactttcgtacatttggcgttgacctttctcctccggttcaaccgccgtctcgtcctcttccctaatcgcttgtcgccgccgacgtctcttgtcgtcggtctgagtagacgcgtctgcggcggctttaccgacagactcgccgatggactcggccttgtaaactttatactcatggaggtcaatcgcgctccacgactggtttctccgacgtacaaccaccgggaaatcagaatctccgctggaattttgagtttccggcggaggtcggagagaccgagaagaagctgattcgagaactttaggatcgtaggctgccgggtcgagaagaagctctgagcctttgagaacgtattcgtggccgtgtgcagggtatatgagatcgttctctgataaatcgtgccacacgaatccatttctgtaactcctgaaaatttcaaacccaaaacgcaaaataaatcaatcctaaaaataatcaaataattagtgtgtatggaaaaagaaaaaaaaagaaaaaaaaaaacaagtggggaatgaaaacacaccgtttagaagaccaggagtacaaggtagccatgcctttgcctcggagatcatttaagcggttgataacgtctgaaacaataacaaaacacatgagaaattctacatagaagattttctgtttggttcccgtgataaagaatgaaaagaaaaaatatatatatattacctctgaggaaaagtccttcaggtgaagaaagaatgacctccatgaaatgagggtgctccagctgaccatttctagccaaatagtaaacaactggtacttttttctctgtattaggtttaagctttggttcagtccaaaccatattccgctcgggactggttgctctgtttttccatctcttctgattttggagctgtatagtttgtcctctggcattgaccgccatttctgcttagaacaaagacgtgtaagatttagatatagactctgagagagagagagagagatgagactcaaagaattatttttgggtttagagaggtgaaaaatgtaatattggtagccgagaaaaaactgctggaaagtgactttaccaggggcatggaagagaaagaaagagacaaaagaaagtaatgaaaggaaaatcgaacaccaaaaaagagtctttcttggaggtttggagggaattttatataaaagaattaaacgagtgacagtgaaagactacagtgtgaattgagagactattcgtattattaagtaagaagggacagactcatatatttaaaatttgagggatgcttcagacaacagctacccaacaaaccatgcctgtttaagatttcagtactcttcttctcactattatttttctgaatgttttttgtttttattcaattatttcttaatttaatataatttgttacgagtaacagtattctactaattgctaaacaaaactcctacctactgatatcttacattttaaagattataattaaagattttgtgtttttggtcacaattgattaaaaacgagtaaagtttgggactggaaatagatctcatcacatcatctgttgtaacatatatatgaaacattaaaagaatgaaaatgtccctagtttcactttatttgggaaaacttatttatgagtgtatatattgtagatgtgagcaattagatttgtttttcgcagcaactatttcaccatcttcttttatgactttgtgatgtttgctttaaagagtattatctcacgtttccttactttttaataaataattagcaattttgttctttaaactttcgacaataatgtcgactagaaaaatagctaacttactcagagttaaataatcattgattaatcatgactaaggaattaaaaataaaaagtaaataagagcacacaacaattatagaggttcgatccccttgtatgtgggtaataatctacccccttttagttgtatagattgtaagataatatcgtacagatcactaaggaagataaagtgaattctagctacggctctcaaagtgtttacagagaatatctttcagcaaagtgctctcagatgtgtgagtatgatttcaggtctcggtcccttccccttgtgaattcattcactatttagaggggaaaggcggttaaatttggctccgtaaagggagtaattaaacggtaaatatccctatattcttgggtgcagttacgatctgttgaagctcatttattctcagatagatttgttgagtttgagtttgtaggattcagtttgagatatctacggaggcttgttgaagaagagatcaaggctcatgtggccttatccgacactcctggcagtgtttcttctagctggcatattgactacccagtcaggccttctacgagacttgtctttcttgtggggttagttgtagaacttctcttgcaaggtgttacccttatctcatgtggccggtatgttgatggcccggccagatgcttcatgaaaggtcatcttcaacttatggatgacagccccatatgggacatgctaggcacacttctacctggaagttacttgtcacgctaaagagttggttggattatgccacatgtaagtgtcatgtgagatgtacaaactttgggataacatttggcccccaagtccttgtacgaacgtctatcctaatggagaattttgatacctgtacgaatgctggcaggcatgtgagctccatgtggttggtatcctagcaattattccgtgcaaaaatgaacagtcacactttagtctcttcaagtaattgaccattaagtgtcagctctcattatgcagttttaaataacattggatgagctatcatactgatggttgtactgttgggttttatgcc

SEQ ID NO: 377980 - DNA, 3894 bp, Cannabis indica
tcatttcaccttctatcttgtacgtcttcctctaactttacttttcgcagacatctcttctatcctttatggcacaataaagaggtctccaacacattgagattcttaatgtcgagctttgcaaatccaaggaacattgcaaagttttagctaagcaatggaccaattcacagtcgaagatctcaagagttaagaaagatgttgaggagcaacaaaatatcctcaaggtagatcttgaggtcgcctagaaaaagatcaaggaacttgaagagacaaaccacaaggcccaggttgaagctgataagaaagtttaagaagctaaagttgatgccaaagctagggttgatacgatcgctaagcgatctatttatcgagcttggtttgccaaccttgggatggatttgagttttctaggagccaaggctaaagagatgcaagcattctgcgagcaaaccaagaaggatgagattagaaatactaaggaagaggtcgaggaagaagaagaagaagacgaaccaactaagtctccaaccatgtagacttagtcatctttattttaattttcaaataataaccttaaggctaagacaatggtttgccccttgtggtatgtaaaacttttactttgttggatggccaacattgttaatatatatacttttatgctttttatcctacttttttgagttattaatatttgtctattgcattttaattcacaataaaatatttttctctctcaatttagcttaggatatttttggggttatacgcatgtccatgtcattatcttgttattcaataggcgagcaattaataatctgctttattttctccaagcactttgtaatctgctatgtttttgcgagcaatttgtaatcgatctgttatgtttaaagcaaacttcaaatattttgaatggttcttttaagaactatttttaataatttttgattccttgtatgaatagttaattccctattcatattttagcttgtgtattatttttcaagatacatttgtatctcgtttataatacatgctataataatgcgagccgttatttactcagatcgcatatagcttcttgttgctttatgagaaagaatctcacttacaactgctaatttaattttctcttaaagaaaatatttttcaattcttgactttatactgtccaaagataattttttaatcaatcatccttttctttgtgaaaaaaatttaatttttggatttttcagtattttcatatatatttctaggtagaatctagttattatacacatatatgcccccaagtaattttaaagaaaataaaactttataattacttgaaaaattcaacttttattcagaataatgaacaattattacaaagattaatacaatatttacataataaacttttagtgataaggtcgtaagtgctcgctgttacagtgattctttattagcgagacattaagccaagctactttataaaccccgattccaactacatcttcaatgatgtatgggcattcccagtttggtgtaatgtttgagtgcaaatggctaagctaagcaccaccccaaaacccaacattgggaattggcagagcaaagattgacgacaacgtaggagttgatgaagaagaaggcccaatcgaaacaacaactgaagaagaagagctagaaatgggagtgttgctaagctcgaacaaatgtggtcgaagaacggttagaaacagcgctgggaatggagtgagcatgttcaagcgatgactggtgagattgaaattgaatttagggcttagggttgaggtttaggctgggattgaggtttgagtttgtggagggcaactcaggagtagagatcgacgaagttgtcatggacgatagaggttgttactgggtcgaaggttgtggacttgaggaggggttgtacttgtaatggtggtacggtaggtgggttggtggcacctggtgcggacatgggttgtggcgtgggatttggttcatccatttgcataaaacagagaagagacccttcctcttagttttggtttggatgctacagatagaacaaggagaaagagaaagggaaaatttagtggcagcgtgaagaagaagaaataaaaaaataaaataatttatttagtttttttttaattttaaattatttaaaattaaaattacaatttgtactaattatttatcaaaacgtagcattttgaattagtaaacaattcattagaaaaagaactaaccgaattataaatatggagatcttgtggattattattgttaatttttaagattaggaacttatttgcattagaataattttttttagaacttatattacaattttctctatataattataaaatgtgggtcaaaaactattcatttttgttttagccaaatctaacttaaatttttgacaatacattgatcattgatgttggtctaactttatggtacgtcccttacaaaattataacattatcatacatcatttaataaaaaagaaaaagaattatgctatgttatgtcatttataagggatgacatcataaaattattccgaaatgcttccacaatacaatgaaagcgtgaataattatttttctttcaaatttgtgaattgtgattttattttgcaaaaaaataataaaaaaaattggcgagtgttaaaacgcgctgagataagcgtggatgtaaagagttttagaagatggagagtaaaatgagttcgtgagtaatatgcaacgtggcttcctaagaaagcaaaggttagagcaatgtgctgacgttatatatccgtgactcgatgacgtatgtgaccaaaaagtaattcagtctatcggcccaaatcagctcggctaatcagagtcggctcgtagtagctatcagtttcgcattcaactccactgcattttaatttaactattttttttatgtcaaatcgtgcatgttgtaatttttcaaaccacaattctaccgcaaaaatatattattaccaaataaatatatattgtgttttgattttactatctttttatttggctttatggtttaacaaaataaagtatgcttcttcctatatttcatcctacatttattttagtttggagtcgcaacgtgttgtgttcgtgtcatattttatgtgatttatttttatattttgtattagacgtaccgacttgtttttttgacttgtgtctaattttctcaacttgtaaaaaattgtgttgtgttcgtattgacttactttgacttattttattattattgaagctaaagttgtaaaaaaaataaaaaatttaagttttattagctagaaaatttatattacatttatgtatatatagttgcgatataataaaaataaaaatatttttaatttcatgttaaaaaaataaatttaaaactttttaacttaacattaaatcattaaatataatttttttacataattattattaataatattttattattttatttcatttaaaaaaactgtgtcaaatgtgttaaattcgtgttaaacgaatcatgtcatatttgactagtttttatttcgtataaagtcgtgtcgactttatttttaacttacgtctaattttttcgatcctaatccgtaaaatttgtgtcgtgtttgtagtcgtgtaccgtatcaaaacccattttattctcttaattaattttggcccttcaattaatcaagacattataatcaactcggagcaagttatacgtgtgctcctaaatcctaatataatcaatcaattcttttaattcatatatattcctcagttatgagtgattgaccaatatgatgtttaatataaatagaaattaaaaaaaaattacgtactttataatagtatgtagtgcagtgtgtaa

SEQ ID NO: 377981 - DNA, 8865 bp, Cannabis indica
tcgacacgcctatataatgacaaccctaaacccttgaagatcatctctttctcattctctcttctttgtagccacccggtagagagacagtctcatcttcaggtactaaaccctatttgcttttgcatgaatttatattcgcacatatcgaaggtttgtgggtgtttttacaaaagcccgtgaactcaaagactgtgcaaaatcattggtcgtccctctttgtgaatcctctaatgaagcttctttgctggagggttgttacacggacgatgaacatttcttgacccatctaattttttatatttataatttgtctgtgttattattgttgtgagtttgttgttattttcagctacatgatttaaaatatcattttttttctggtacttagagatgtagaaaagacccattaatgttttagataatgtctctgctctggaaatggtaaaaaagtttttagcttaaataaactttgaaaggaatatgagttctcaatctaattaactgactttctctttcaaatgatgtagcttttattattattattaaggatctctgagttgttttgtgaggattatatggattatcttttagttgacattctttgattttgaacaggaactttttcttctgaaaaccaaaatatcacaaattggttttacaacatgtcgaaccccaaggtcttctttgacatccttattggaaagatgaaggctggccgagttgtaatggaattgtttgccgatgttacgccaaaaaccgctgaaaacttccgagctctatgcaccggagaaaaaggtcttggggtatcagggaaggcactgcattacaaaggctcagcctttcacaggatcataccaaacttcatgtgtcaaggtggggactttaccagaggtaatgggaccggtggagagtcaatttatggtatgaagtttgaggatgagaacttcaagttgaagcacactggccctggaattctttcaatggctaattcgggaagaaacaccaatggctctcagttctttatatgcactgacaagaccgactggcttgatgggaaacatgttgtttttgggaaagttgttgatggatatggcatagtcaaagaaatggagaaggttggttcaggtagtggaatgacttctcaacctgttatcattgaagattgtggacagttgactgagaactaatcttgtagaaattgttaaattaagattccaagcaacttgtattgttttttgttgcttttgcttgaggcctctcggggaaataatttatgtactaaatacttatgcaaagcctgaattacaggctggggtactccaatctcttaatatttgactctgtatattttatgctttgatgatactaaaataaaatttctttattcatgaaatgtgggttctttttcctggaaaatatattaataccatttatcatcctggaaatgactttttttttaacataacaatactgcgagcatttgatgattcagattaaagatcaatatcttgttggtgatctagaaaatgaggaccctgactcccatagataaactggtctaaatctttttccataaaaatcataagataatttttacttgttgaacttggtcctgtccagatgtggagtgacattggttgaaattaagaacatttctaatgcattgctaaattatttgttgatttctgtttcgaggatgatgaacaaagaatcttataagaaatcaccctgagtattttctaatttgactgaagacaacagcaataagcatcgtcaaacatgagtatacatttcaattattgcaacaaacaacccaggccaaggcgacacctcctttcaaacgacagccttttggcgaacctgcaaagaagaaaagcttgttatgacaacaaacttaaaaaaccagagtggtgactgtcatttcatgttcttcttacttgataagctcctcttcatatgtgcgtttgtcttgagttggttcacacacaccagtttccaggttgacattagcaacaggtttcttcaaaagctcattaccaatcttcaccagattttctagattttcttgctttgagttgtctgttgatgcttcagtgtatttcaagctatccacctactttcattaataaaatcaccgatattaaacatgtctctttctttgatctgaatcatacctggtacataatcaaaggatgttaagaaatataagcaaacacaaactccaaactccagtttattggtacctggactctgagatagttgtccttaaaggaagaggctccaaagaaaacagacatgtagatatcaaccatgtcatccattgcagtcaagacaacatccattaagggtgtggtaccctttggtcccttgaaccatttatatagaccccaggttttgccatctccagcctcaaacttttcacactgcttcgatgagcctgttccgagagagagaataagaagcttgctgtgatccatgatgtcaaaacatgaattttcgtctagagacatctccttcatcacctcacgaattgcaagcaatgtctgggaaatttggaagaaatgagttagctaagcataaatttttatatgttgactgaaaaatactacacagagctgaaagattacagggttattggctgccacaccaccatcaatgaggttaaatctcttagtgcctttggatgatttgttttcgaaataatatggagggaagtagtaaggtgctgctgatgtgccaatgcagatatctgttagcaaaagatcttctgaatcatcacgttttgcctacattagaagttaaaaaagatgttctcaattcaattgtatggattatgatactactttgatgtcatagaacttaaaggaaaaatacagaccttcaaggtggaaaagataacaggttggagaagcttgatatcaaaggatggaatgattacattggttaaagtctcatgaagccttttctctccagttatatccttaatcttcttatgcagataatcaccatcatatttgggattgaatacttttctttcaaccatttcaatgaacccttccatcgtttggtatgctggaacaccataggaactccatattgattcgacccaattcgctatgttgtcatagcagtggggtttagacctgcccatcatcaaatcacattgaagcatttcattcgaaataactacaatgaaagttatcaatggaggagaggtggggttctgtactgacttacatgaggatacttttttttccctcttcggatccttgaggaaagatcagctcactctcatgtaagtaaaagttcttgatctcctctgcagcaaacataggacggtttctttcattcggcatggtaagcattgcagttactaggcctcctgtgcttgttccagcaataaaatcaaagtagtctgcaatccttgcatcttcgccatctagttgctgcttatgcacacataaatatcaaaaacattgagatgaaaaaaaagaagaaaaaactcaacttcaaaatcaccgagtttcatcaacatacttgaagttgggtttccagaaagtttaaaattatcccaggaatgatgcctcttactccaccaccatcaatgctgagaatagttacaagttttccatctacaccaaccaaccacgaataaactcattttcttaagaacttaaaaaatatgagaaggcaaaaacaactacttagtaacatagagattagcagactcaccagttgccatcatgcctaaaaatataaatttccaaattcaattccattggaacacattatatggcttgattggagaagtctatttatgtccgtttctcaagttgtctaatttttcacgaaatgtcatctttggcagcatttatgaaagttgttgcttcttttcaccttgatataatgaatattatgtcactgtttttgggcagtactatcaagttggtataaaatcattacaagcaatcaaatttgaaggtagagttgagagagtatccacatttcaaacgagcttacgatagaacaacaaagcaccatgatttaagtgctgagataaaaggagtcgaatctactaaattccttaactgatattaatgttttcaactgtttcttcattcagttactaatattaatgctcacaactatttcttcagtcattaactaataaaaatgttcacaattaactgaagtatatatgctcatggttattgttctgatgttataaaatgaattttaagggtttcaaactcatatatatttcatgactttagtgtcaagctacatgatgttgccatgggaaagaaaaaagaaaaccacataggtgattagggaaatttcggagaataaatttaatattgacttttcccttgataatctcacaatgatgattgctttaaggaatttttctcttatccacattgcatcaataatgacaattctctatacaaggcacagagccccgggaggacaaccaaaaccacaaaaaatgccttatttttattattagtattattcatcttttaactcagaaacaaccttagcttggttggtaagatctatgagctgtcttacttgattctacatcaagttttagcagaagctcaaggaaagaacgttctaactttaatgaaatggatttcacaggacagaatttagaagatgatagtttagtgttttatgatagagcaaaagcattgaaagcctttgatgacacaaaggctggtgttaaaggacttgttgatgctgggattgatactcttcctcaaatctttgttatgccacctgaagatatttcatctaacatgtcagatgatcacttggcctggccccagttcgaggtaccaactgtagaccttaaaaacatggatgatgatagttggcgtcaaaagaaaatcattgacgaaatcagagaagcttgtgagtcatggggattcttcaaagtaattaaccatgggattcagcaagatgttatggatgaaatgattgatggagtgagcaacagcaggcagtgatggaattctactctcatgacaagattaaaaaagtccggttcaattgcaactttgatctttaaaaggcaaaatctgcaaattggagggacactttaatgtgtctcatggctcccaatcctccaaagcaagaagaatatcaagcagcctgcacgtacattcatcccattgaaaatgattatgaaatttttgcttaaatattcaattttacttgtcaacatttgtctaaaactagcatgagaatccataattgtttttatacactcttgtcctggaatggcagagatataatggtgcaatactctaagcagcttaagaagttaggggacactctgtttcggttgatatctcaggcccttgatcttgatcctaatcaccttgaagatatggaatgtgccaaagggcatgtcattttctgccactactatccagcatgccctgaatcagataagaccatcggacatgccaagcgtacagatccgacctttctcactgtactattacaagatcaaaccgggggattacaagttctacaccaaaatcattggattgatatttcccccagaaaaggaacacttgtgatcaatgttggagatctctcacaagtaaatgcttggacattttcaatctattcgattgagattatagactaccttctggtattttgataacagcttcgtccattgctctgttgttcgcagctaatctctaatggtaagttcaaaaatgttgagcatagagtgctggcgaactccaccagtccgagaatctctgttgcttacttatttacaacacattttgaagagtctgaaaagttttatggtcctatcaaggaattggtaacatatgaaagtccaccgttgtacaaggagaccaatttttgcacttgctctgtcacagaaggagaaagatctaaaccagtcttaaaacaaaacataaccatgggttccatttcgtaaatcaaaatgaaacggtagaaaatataataccaatgccatacatacactcttgtgccactcacgacattaaggaaataagatgaatgtaactaatacagcaaagtagctgcaccggcttattcatctagtctttttttttttttgtgcttatttttctagtttgtcatgtacaatgccctcaatttccatcttgactttctcatttccattatttgtttcaaaatatcacatagcttagttgtaacaccaagcatatgtgtgaatatcagtagaaagtgaagtaagcactcaagataccaaagtgaagcagccaggattgaaaagatcaatgtgtggcataatagtaggactaatatgccaagagtggatggtgcttaaattaatcaaattgtgataaacaagaacaatttatgttttattgctagatgcaagaagaataacaatacatgtaatccaatcatacaaagattcggagtcaaaaatagaggccaaattctttttttctactaagtttaaattcaaagtataacatctaaacacaagtcatctatgactgcaaaaaagaatgagatgaaaagtatgaaccccatctcaatgaacatccgagagtcccaataagcttgagattctacaatggtacttcacatacattctccaagactattgaagttttttttttcagtcccaatcttcatcatccaactgactatccatctcatctcttggtggcctaatcaccataataactgtagctagacactcctccacacccaaatttttcaattccaatcccctcacaacctttaacccctcgccaaggcctccttcgccatcagcagcaaccaaataaactccatcatcagttgccacctcctttctctgcctattagccactaccaaaattgattcttctttgtaccacttattagttttccatggcaagactctagcatcactaaaagcgataacaatccctccttttcctaaccccactacaggctcccaagctggcaacaccacccacctcttccaccctttgtcggccacaaccacattgaactctccctcagctctacactctcctggcgcttctaagacctccttctccctctcctcagccctgcaaacgggcaacaccaccaccgagctagcctccgccacctcgccaatcttcaacctcactactggaacaagaacaggatcaccaagctcatcttttgcctctgagtttccctcagctccatgcaattcctccaacaccctagcctttgcaccctcagtttctgcaaatttcaaagcttgctcaaaagcagtcgctctcttatcggaatcgctcttatgctctctaccttgcctataatacataaaagcgagacaatcccctgggcgagtatagtcaaaaactatcccaccctttatctccgcggcggcgagggaaatctttcatggagcgggcgaggtcttgagctccctttccgtcgaacccattggcaataatgaaggctgcggcggcagatcgttgttggacactcaggagccgaatttcgtacaacaactcagcaccaccagcatcgaaatgggcaacgatatctgggtcggttttggattggattaaagattcacgtacctgggcagcaaccaaaaggcgattttgctcgaccccagaaattccagtggcttcttcgatggaagagggcgtgaacccttcttggacaagggaaggaatgattggggcgtactcgaaccagagaccgaggcggttggcgagaacttctaggcgactgggagtgtcgagagagcgaaattggttgggaagaggagacggtggtgggcgaaagggttggtaaggctgctgctgcaactgctgatttctggagctcgatgatgaaggggtgagagtggccgagatgggtttatttgagggtttaaaaagaagggtagtgaagggagaggaagaaaagagcttatcgtggtagaatggagaaaggggtttgagagtgtttgcagtgaaagagagcatcgccatggccatggtgaagtgagctgagctgagctgaaactgaaagctaaaacatcacttggttttcctatcgcgccttatctgatctttaattcttggacaacttgaaattttgtttttatcgttacattttagagcatggtaaaattaggatggtttgtgaggtaatattgagatgttatgtaaatgtatgatattataattaaaaaattgttttttgtttttaaaaataaaaattgtttttggcttatttggccttgtttcttgaaaacagttttcggaaataaagttacaaaatataagaatttcgaaaactaaaaaccaatttactattggttaatattgtttttaaaaaacattaaccaaacgtgacttgtgttttaaaaacttcaaaaactatcttttgttctcatttctaaaaacaattttttgaaaacaaaatacagaaaacaataccaaacatactctaaatcatccacactcaaccaatcaccaacctttcttctacctcataggtaaacaaaatgttcaatatgttggtgcttcactatcttcattagagaactcctcaatcacagtaaatcctgatgaagatgatatgcgtcatcttcttcactagacaactctttcccaactttactttaatagtttcattcagtgaagtaagaaagaattaattacataaatttatgatatttctttttgaatgcgacagtcaatttggatgactgacagcccttaagtaggttttgtatatttttttgattgtcaatattttgattatatagtggttaacatttgttgacctcgcttttagccaatgacaatgagtctaatttgtaagcgacaagtagtataatatgagtgtaat

SEQ ID NO: 377982 - DNA, 1586 bp, Cannabis indica
cgacgagtaagccgatctcgaattgtttgaggttgaattgggatcggagactattttcccggaaaattgatcggaggaattttctccgggtcgaacagtagcgcgtcggaaacacgcatgggggataaggatcgagtccctttaatcctggctgatgatctttctcttccgcgtcctaatttattttctgggtttggttctcgatcttgattactgttcttacgagtttcttcaatggcggcagcgaatgggtcgaaattctcgtccctttttcttctgggtgacattagtacatcttgaaccattttcttcccctgagaaattctcgatctcggcgaattaacagaagaattaggtcccgacgaatcgtaatatcgaggaggtggtttcagaggtcgaattttcccaccatcgaataattcatcggccatagataacgaacctttctctaactgtccactaaaatcaaactcaaaatcatcatcatcatcatcatcgttatcgtttgtattaattcctttagggattccaggcttttgttcccatttaaagggaatattagaagaagctgaagaacttctgggagaaatagaatcggccgagatgagagagatgtcgacgccgtataaggaggcggcggcggtggcggtggcgacggcgacggcggagacacgtgtggggctggtgggtgcgctgaagaaaaagtttccgaagcgttgaggactagagggagctgtgatgtaaggtgaggaacaattactgtcgaagttgaattcggaggcggcggagggtgggagtactgttagtggtggtggaatcatggccacttcggccatctccattgttggagctgtaaattgggtttttgagaaatggagaattgggatatggtggaatagtacggatttatagagagagaaaatgaggaaggagagaggaaggagaagaggagtatgagtatttgactgaagaggttttaagagagagaaagccgcctttttaagatttagtagtttactcttcttttatgcatgtcacactaattataaacataataaaataagtgggagtgatatatacatagtttaaattttttattataattttttagttaatttttgtccctaataatacatgtgaaaatatttttactttgtttttatagtggtgtttattatacttacaatagtaatttatgtctgtaaatttttaaaaattttggaatagtttacagtactaaaataagtttgaagtttttttgaatacatgtactaaattaaaatataaaaaactgtcaaatttatttttgacactgtaatttatttgaaaaagaaaaatttcatatgtgatttaagacgtgaagattgattaagaagttgtaatagaatattataattaatttttcttattatattagtaatatatatgtagagaattgtagaaatactgaactccatcaacgaccataaataatatgttttaggaaaattctacaatgcacccccttaaaatggatatattgatgcacccctatctgttttagcatccgaaataatttttagtcaattttttctcatggtcatgta

SEQ ID NO: 377983 - DNA, 6655 bp, Cannabis indica
taaataaataaaaagaaagaaagtccagcctaacccgaaacttgaccccaacccacccagaactcgaccaaaccggatccgaaactcaaaaaacttggtttctatatgggcagattcagtctcaagattccaaaatccaaacccgaaaacttgaaaattcgaaaaacccacctaatgtgtgcccctactaaatatagtacaatttttacatctctaatgtttatatgggtatgggagaggaaagaaatatcttttatatttttttgaaaaataataaatggaatttctagttataattatttggaaataaatatatgccaacaaaaatatatgcgccaatatgattttggaaacggatcacaaaaactctaaaaactagtatagtaaaagcaatgtttgtataatacacaacttcaccatttattagtgtctaagctctatgtaatcttgtcttgaacactactatgattcttttgtataccaaatcttttgtatcatcaaagaaacgaaaataagcatttctccaagaactcttgagtagaaaagtgccacacactccccaaaatcctatgaaataacctatccctatactaacaaaaaacccaaagcttaaaatctcattatcctcacctttatctttgtcatctccattcccataatgggcaccaggatcttggttcatttcatctcctgggcaatgttctgtgagaggttggccacaaagttggagatttcccacatatgaagaagcatcaaagctctgaagttgggtgccttttggaattctaccactcaggttgttgtaggacaagtccaagtagctaagaaaattcaaatttgaaaagcttgttggaatagaaccagttagccagtttcttgacaagtctacagactctaaattagagctcaatttgtcaaacttttctggaatggttcctgtcaagtgatttcttgataggttcaaagaaatcattttcaagagactagtaaatgtttcaggaattttaccacccaggttgttgcttgagatatcaatgcttctaaggtgtttgagattctgtccaaactcaatctctatgcctttccagaccacttgtacaaggccaatgatgatgttatcattcacatcataagacatggctgttatattgttaaggcactctggcaaggacccagatatgttattctcagagaggtccaaaacatgaagagctggtagactacatagactcaagggcaagcttccatgaatctcattgtgccttaatcttagaaccagtagatttggtaagctttgtccttgaaatgttggtaacataccagttaacttattccttccaaggtcaacaactctcaactctttacagtcttccaaagatggcacttctcctgataagttgttatcgtgtaaacgtagcaacactaagttttttagatgacttaaagagattggtatgtttcctgagaaattattctttgctagattcaagaacagcagtgtttcataatgtatccaacaactgggaagctcccctgatagtcgattatttgaaaggtcgagacgaaacagttgtagagctggggcttcacataaggaagaaagaggtcctgagaagatgttgttggagagaatcaagttggttgcactagaaagtaatggaattggaccactcaaattgttgtagctcaaatccaatgaaagatagttcttttgctttggggatagatttggtaattgcccatgaatttggttgtaagagaagttcaactcagttaaggtagttgaaagattccaaaaccaaataggtatggaatctgaaattgtggcatttggcatataaagtgaacgaagtttcttctgtgtttgaagccattttggaaattcagggcccacattgcaagactccatgtttaaaaattcaagttggaaaggtggaatccaatctgaactaaagttcaaagacataggattatgagaaatatccaaattgttcaaatgagagaggttcaagaaatgagcttcagttagtactccattcaaggaatttgaagaaagaaacaacacttcaaggctataaagcttcccaatactctcaggtacatatccactcaactgattatttgcaagaaatagcaatcttaaagaagaaagtcctgtaaaatctggcaatgacccattcaactgattataagctaagctcaaaatatttagctttgaaaactggctaaggtttttgggaagagggccactcatattggtaccatctatgaacaattctatcaaagatgaaaaatttgtgagatcaggaaatggaccccaaaagggattgccactaaggtgcaggtacttcatggtctcctcagcacatgacaagtttttaatggaatcataaagtctatcagaaaatttatttgactcaagattcaatgattccaaactacacatgtttttaaaagattttggtaacccgcctttgagttgattatgtgagaggtccaaagacactagagaagccatatttgtgaaaacatctgggattggaccttgtatctggcatgccatcagtccaagatgaataagtttactgctgatattggaaatccagtaaaatattgaaggactgaaatggttatcagaaagattgagaatttcgagtgagtttgaaaaattatttagtggaagtgaactgagaataggatcaggaagagtagttgaagataattgaagctctataagagaaggaagcttggccatagatagtggccaattgacaatttcagaaaggtttaaacgagtgaggttaagatatctcaaagaagaaaaatgagtcaaccaatcaagatcattgactgttagaaggtaattcattgaaaggtcaagagtatgcaaacctgtgagattcctaagctggtgaggaatgggaccaacaaaaccaacacttgcaagtttaaggtgtttcaattgttgaaaagatcccataaagcttggaattttgagtccatcaaaggtgttgaaactgaggtccaaataattcagttctgtcagttcaagtagtgaagaactgatctcacctgctaggggttgctcaacagagaagacatcagaaatgttatgactcagatcaaccattatcacatgaccagtttgattgttgcatttgattcctttccatttacaacaatctttttggctttcccaagaggaaagaacattagactcatcaagtaggccttgtttaaacttgagaagagattgtctttccttctctgtgcacaaaatcttggaagtctcagcacctaaacaaatagctgtagaaataatgaaacaacacataaaccttaattgaactgagtgaagggagcttagagaaatcattattgatgaatgtgaaagcaaagaattcttttgagatatgaagccaaatctactaacttatacaagtcttgactaaatgctttatctttgaccattttgtgtatttgttccttttaatatttattaaattttggttcagctccaaaagtctttgttgcagcaaaaaaatatacatattgtgcataaaatacaaatatacatatgtgacatgtgccaaggaaattataaaatttagaagtctaaatcaactttagccattacttatattccaagttaaatatccacctcatgatctgtttataccttagtcctattttttttatttcttaatcagcttgtaattatcttgaagctttgtttattctacaaggattaattatttgtctttgtagccacaatagtttagtattgaactttgtatcgtattccttaattggtcaaatcactaagcatataagacaaccaagcaacaccacaaaatgtagaatacataattttgggttcaacaaagtcaagcacaatttgtttttattattgtttttaattttaaaagctggtggaaagaagaaaactttgataagtgataggaagtggatcttgagtgacaaatggaaaaacatgttcatggaacttaacacccctggaatagaagatgcgactagtaatcaaatcaaacaactataagctttgatataactaggatagctaggaaaacacaagatactgctctggaagataactttgagatgggatgagcatgggccaggcacccaaaggccttaaagtgagaatatgaggaagacttaagatataaaacttatagggacttatgctacaggttaagtaagtagcagtatagatacattcaaactagtaagataaagggattgaaacaagtaaatgtgggtgggtgcttcctctcaacaactgaattttgttgaggtcttcagacacaagaaatataatgattgatttctagagaagcaaagagtaggaaatttaagtctacgtgcactatctgaactaacagacttgacctgaacattgaactggttttgataagattgaggaaagctggaatagcttgttgagcctcggacttatgtttaataaaatgaacttaggtgtatctagagcaatcatccacaatagagataaagtatttaaaattctgcacaacagtgatgttaaattggccccagatgtctatgtgaattaagtcaaaacaatgagcagagaaattatgattagaaatgaagggaagcctctttcatttggcataaatgaaaaatggagcaatgaaaaggtgaaaaggagaagaattttgagtaaaatgcaaatctttattcaatgaatgagtttttatacaagctggatgccccaaatcccaatctcaggataaatttttgtatcagaaaaagaaaaagtagtagcacatttattcaaagggaaaagaattaactaagtaatagagatttccaactagttcacccttcccaatctgatgtgtccgagtggtgtcctgaatgacacaatgatcatcaaagaaagtgaagaaacaatcagctgagacagttaaggcactaacagataaaatattaaagtgaaaatctggtacataaagcacaccagatagagtaatagtaggagaaagaacaacagtgccaacacatgatacatcagcatattttccatttgctaaagcaacagaagataaagatttactagtgaaagtttgagtaaacaatgacaagtcatggcagatatggtgtgtagcactagtgtctataatccaaatatgattgggaacattagagttgttatcagtgaagcttaagaccaatggttgatctacagtttgagaagaaatatcttggattttctggcattgagcaggggaaagtgtggaaactaaatcagcagaagaatctggttcagtaaaattagcacctggtttcagtgatggactatttgcgaaacgaccttttccatgaattttatggccagggggatagccatgtaatttgtaacacttagcgattgtatggccggaaataccacaatgatgacagaaaaccttggggcgcccagattgagcattccctgaaaacagtctttgaaaacattcctgttgaatgatagtagagtagactttattgatgtttggcataggatcttgcataagaatatgtgatcgagctccactgtaggactcattcaaaccaattagaaattcaagaaccttatcttgttcttgataatcaagtaaagtcttcactgcaccacatgtacaaacaggtagagggcggtattcactcaccatgccccagagagatttgagcctagtgaaatatgcgctcacactattttctccttgagtaagggcttgcaacagaagcttgacttcgaacacgcgtaggccattgttctgatgaaatcgatcattgagtttgctccagatcgcagcagcatcatcaagatacataacactatctgcaatttcagtggaaacagaatttaagagccaagaaattaccatactattacagctacaccacgcattgtaatcgtcatgatcaggagttggtcgtggaagtcggccatcaacaaactcgatcttgtttttagcaagtaaagcaatagacatcaatcgacgccaggtactgtaattttcaccacttgtgagaatcttaggaacaagctttgctcctggatgatcggcatgtgagagaaagtaagggttccgagcttcatcacgagaaagccgaacaggaagatcgatattagctgaagaatttgtctcgagagcaccactactacaagttcgcaccatcgcgatcgacaagaccaacaaagattctaagaatgaaaaaaagaaaaagaatggaatgattgaagaaaagaaaatgaagcagttcgagtaagaatgaagctcaactgactcaactaactaaagtctattataagcaactaactctgaacttattcagttacatttaacaaatgctaaacaacaaaatgactaatcatcaacattttatcgtgtcatatttagattattcttctccaaaatatggacttttgttgtagtgagtaaactagtcttagaaaatctcaaaccacactttttattttttttttattaagttttagttaaaatagctaaaaagttagaatagaaagccattttttatttttgcttcaatcatcctcttagtgtttgattattttaataatattttataatttaaatttgttaaatataaaataatgaaaaaa

SEQ ID NO: 377984 - DNA, 9219 bp, Cannabis indica
tttactctctcaataatctattctaccactgactaaaattaatttgctgcttcttgtggatttaggcatatctatcagatgaagaatttgtagccaaatttggaatgacaaaaggaaacttttacaagcttcccaaatggaaacaaaacaagctaaagatgtcccttaatctattctagaataagatatattgggatcaaaaccaaatgtatacattttaatgctgtggttttattttttatttttaatttctggttgtgagctgtggtgacatcgttttctgtaaggtggacactctttctataatggtgcattggaagtcatgaaacaagataatgaaattagatatttttccctcttttctttcaaattattgcttgcaaaggatgagataatgtgtccatatcaaacttaaatggattaaaggacactccgtttagcttttttttggtggtatctgatcaaaaagtcatataagaaaaccaattggttattatcactattctttgcgctttatgcccgccagtgccggctgagtaacaatagtagtttgaaaattatattctttgaaataaattttgtcccatttagatatttagtttattcgtattgaataaattttattagtttaagttcaaataaatcaacccaagtttataatacattaaaatgcatccacaaaattccttgcctatgttagataatgcttagctgtcactggtagttacatgtttctgttatgtttgttattctgttggttcagttgtacattctgttactcttgttttctctatatataagctgtactcgatcaccattattggttattcaataaagattcatttcttcaatcctctattttccttaacatggtatcagagtgattttttttctctctattttgccttcgtctaccttggttcttcctctgttttcatggcgcaagttcacaatcaagcagagcaagctgctcctgcgatctttcatcctgtcttcttctcccacaaactttcagtcaaattagacaacaataactatcttctatggcgccctcaagtcatttctgccattcgaggccataatctgcaagattatatctccgatcaccctccgcctctggaatttctttctgatcaagatcgtctgcttgaaaacacgaatcctctctttactcagtgggaacaacaggatcaacttctttactcctggctcctctcttcgatggctgaaggaattcttacacgagttgttggctgtcaaacctcttctcaagtctggaatactcttcaggtatatttctccactcaaacaactgctaagattgatcagtttactaatcagttgcagaacatcaagaaaggagccttgtccattaatgattaccttctgcgcatcaagactgttgttgatcgccttggttcggttggtcatcatgtctctgtaaaagaacacatagctgctatcttcaagggtctaccaatggagtatgacacttttgtaatctctgtcaattcaagaaaccagccatacactgttgctgaaatcgaatccctcctcttatctcaagaacatcgcatggatgctcatcatcgtgatctggactctgttaatgtagccatgaatcgcaatcatcgcagcagaccatcctacaaccctactgctgactccagatcaagcttaaattccccaccaggtttcggtcgtggccgttcagtgtggaatccgtatgctattcccccccgtggagcctctttctcttctccaccaccatccgctgctggtagagggcttacttctcagaatccagtctcttctcaatcaaacaccactagctctcgaccgatctgtcaattgtgttcaaaacctggacatcttgctgcgcgctgctatcaacgttttaatatggaatttcctggtgtgggagctgcaaacatggaacaacttacagctaatattgctacttctgacactataaatgacccagcttggtaccctgattcaggtgctaccagtcactgtacagctgatgaatctgtcttcactcaaaaagaaccatattatggacatgagcagattcatatgggagatggagttggtctttccattcaaaatgttggtaagaaaatctttcatacaccttttacatccaaacctttacacttagatcgtcttcttcatgttcctaatattactaagaatctgatcagtgtttctcaattctctggtgataacaatgcttattttgaattttatcccaatcattgttttgttaaggatcagcattcgaaagcagttctcatggaaggccatcttgatcgtggcctctatgtcattccttccactcaactgcagactgctaaaccttccacttctcagccatctcatactcattccacctcagatcatgctttctcaatcaataatgttcaagcttctaattgtaataacaattctatgttttctctttggcatagcaggttagctcatcctgctgctaggactgtaaaacatatcatgtccatttgtaatatacctcatagtaatacaaatgttctagatttttgtgaagcttgttgcaaaggaaagatacataagtttccttttcctttatccaccactgtgtacaccaaaccattagaactaattcacaccgatttatggggcccttcccctactctttcttctaatggtttcagctattacattcactttattgatgcttattctaggtacacatggatttttctccttaaatccaagtctgaagctcttcagactttcattaatttcaaaactcaagtggaaaaggattttgaaacatctataaaagctgttcaatctgactatggtggagaataccaagcttttaaaaaatatttgatgtctaatggtattagtcatcgattgtcttgtccaaccactcatcagcaaaatggagttgttgaacgaaaacataggcacctagtggagactgccttaacccttcttgctcatgcttccctacccctctccttttgggatgaaggtgttaggactgctgcatacaccattaatcgacttccctctcctgtcataggaaatcaaactcctgtggaacgattgtttcacaaggaccccaattacagtcaacttagggtctttggttgtgcatgctttcctaatattcgtccttacaacaaaaataagcttgaatttaggtccactaagtgtacctttttagggtatagtctccaacataagggttacaagtgcctatcttcaactgggagactctatatatccagggatgttctttttaatgaatattcttttccttttgctgatttggtctctcagtcaactaacaagtctcccacagcttatcctgaaacacaaactgctgtcattcccattgttgctcaaccccaccatcctccttccaatattcccactcctcatgatccctcacctcgagttacgccatctctcccacacacaaacatttccccaactcaacctcctgctgtcgttgatgtttctgcaccagcagcaggtaacacatcttcagctgctcctattgaatcttctaatgtctctacagctgctcctgtagttagttccactcctctcatccctgttaatgctcatcatatggttactcgggcaaaatctggtatttcaaaagccagagttcttcttgccacttgtactccaacatcttacaaagcagccatgcttgacagtaagtggttatctgctatgaactctgaaatgtctgctcttgtaaggaacaaaacttgggttcttgtgcccctacctaatggtaggacacctattggttgtaaatggttgttcaaggaaaaactaaatgcggatggtagtgtggaaaaacaaaaagctcggctggtagctcaaggtttctctcagcaatttgggtttgactatagtgatacttttagtcctgtggtaaagcctcaaaccatacgaattatcctcactatagctgttacttatcactggtgtattcagcaaattgatgtgaacaatgcgtttttaaatggggaactccaagaggaggttttcatgaaacaaccaccaggatttgttgacaaagataaccctcatctagtgtgcaaactccacaaagctatctatggactcaaacaagctcctcgagcttggtttgagaaactcaaaactgccttgctgtctttcggatttaagtgtgctaaagctgataactccttgttctttagggtgaattcagatcatacaatctatgcattggtctatgttgatgacattattttaactagcaactcttctgctgctattactactctaactcatcaacttcatgccacattcgccttaaaagatcttggctctttgttatattttcttggcattcaagtgcaatatacttctcaaggacttcatctctgtcagaccagatacataggtgatctcttagacagagctaagatgcttgatgcaaatcctcttcccacacctatgacaggaggagaaaagctttccaagcagggtagtgacccagttcaagatcctcagttttatagaagcatagtgggggctcttcaatatgccactgtcacgcggcctgagatttcttatgttgttaataaggtgtctcagtttatgcacactccccttgaagcacactggaaaacagtcaaaaagatacttcgttatcttgctggttcccttgactttggtctgcttattaaaccagctacatctcttaccataacaggcttttgtgatgcggattgggcttcagaccctgatgacagaaaaagcacttctggcatgtgcgtttttcttggtccaaatcttgtttcctggtcctccaagaagcagaaaaccgtctcccgatcgagtaccgaagcagaatatcgtagtcttgctcacactgctgcagaaatctcctggattcaagctctcatctctgagattggtctgcatattccgactactcccaccatctggtgtgataacagaagttctgtcatgatggctgcaaacccggttttacactctcgaaccaagcacattgaattggacttatactttgttcgagaaagggttttgcaaaagactctaattgtcaaacatgttccagcctgtgatcagttagctgacattcttaccaaggcattatctaccactcggtttgtttttcttcgagccaaactaagcttagcctcattagctacacttagtttgcgggggggggggtgttagataatgcttaactgtcactggtagttacatgtttctgttatgtttgttattctgttggttcagttgtacattctgttactcttgttttctctgtatataagctgtactcgatcaccattattggttattcaataaagattcatttcttcaatcctctattttccttaacagcctatattcattttatatattaatttttaccttaacgtgtctaaactggcaagataaaatgctcccgtccttagagttcttctatttcttctatttctgagtcccgactttgatgatgttaacaagaaataccaaaaagtcgataatcacaacatatggttgaaaactatactataatttgtgcataatttaatttttttttcaaaataaataaaaaagtgctatctgtttctgttatcttatttggaatataccatacctccatctttactaacacgacaataaaaaaaggaaaagtttctttctttgcttctggggctctgacttttccttttaggttctggtcaccggcaatgggttcccggcgactacccatcatcaccattttcttcttctatctcttggtgtgttctcagtccctagatgtcaagtttcgcaaaaggcacaaaatcaaaggacccatcaaaaccgtcgtcgttttggtcatggaaaaccgctctttcgaccacgtcctcggctggcttaaatcgacccgacccgatatcgacggtttaacgggagaagaatcgaaccgggttttggtcactgacccggagtctcccaaagtcttcgtctctgacgatgctctgtttgttgactcggacccgggtcactcgtttcaggcaattcgggagcagatattcgggtcaaacgacaccaccgccaaccctcctcggatgaatgggttcgctcagcaagcggagagccagacccctgggatgtcgaagaccgtcatgagtggtttcaaacctggggtgttaccagtttacactgagttagccaacgagttcgccatattcgacaggtggttcgcgtcggtgcccgcgtcgactcagcccaaccgattctacgtccactcggcgacttcccatggagccacgagcaacgtacggaaggacctcatccatggcttccctcagaaaacgattttcgattccctggacgagaatggtctcacttttgggatatattaccagaatatccccgcgaccctcttctacaagagccttagaaagctcaaacacgttgttaattttcatagttacgccctgaaattcaagctccacgccatgcttggtaagctacccaattatgtcgtcatcgagcagcgttactttgacgttgaactcttaccggccaacgacgaccacccctctcacgacgtgtcgcttgggcagaagttcgtgaaggaagtctacgagactctgaggaaaagtccccagtggaaagagatggccttgttgatcacctacgatgaacatggtgggttctatgaccatgtacccacccctgcttctggggtaccaagccccgatgggatagttggacctgacccgttttacttccggttcgaccggttgggtgttcgtgttccgacaatactggtttcaccctggattgataaggccactggtgagtttttctgcatctgggtttgttggcttagtgatgttatttatggtagttttatttttgttggtcaaatttttaagttatgtgctatgatttggtttgtttcttattgtgcactttgattctgtacttattgggtaactggccaccctctaaactatattttggaagatttaattcttattttgaagtataataggatagataattaaatagggcaaattttctggaagcttgtgaaatggttttggttgaaattttggtattatttgtattttacttaggtcaattattagaattaagcttagcttctttttttttgctttggtattttgttttatagttgctttaaccctttttttttggtaaggttttttgcaagaaagttgctttaacttgtggggctgttatattacttcatctggatttacatcattatgaataggattctcttttttttttcttcttttggatatcttcttctatagttgttacttcattttatatatgctatctgcgaaggacacttgcttcccctgagattctcacctaaacaggtaaagctggattaaatttgaggattgtaaaactagatgataaatgtttgttagtggctagtgtcacactcccatgaactagttttaaacttctttgtcttgatataattttttaactcgaaactatgtccgccaattcttttgattgatgcatagtcttccgatatcagaacttataagagatcgctacaatattttttgcacccttttgacaccttagaaaatgagggcatcgttattttacattttacatcaatttagttcgaatatatgagtgagtaatctggagaataatcttgttcattctcaactaactgaaaagtttgaaccttttgttgattaacactcgggtttgtttggtgcagtgatccacgagccagatgggccaacaccatcttcacattatgaacattcttcaatacctgccactgtaaagaagcttttcaaactcaaatcaaacttcttaacaaaaagggacgcatgggctggttcatttgagaaatacttctctatccgtgacactccacgcgatgattgcccaggtttgctctaagtcttatgagcatttacaaaaattgaattgtcttggtgtttttcaaatcaaatatctttctgttggttttgtagttctttagcatggtcacatattttaaactatagatcttaaagttttagatgcaaggcccttgactgtaccacatttactgtttggataggaagtattatttagttttcttgcttctagtaattgaactgaaagaaatttaatttgaaaacagaaactcttcctgaggtgaagacatcactgaggccctggggtccaaaagaagatgcaaagctgtcagagtttcaagttgaaatgatccagcttgcgtctcaactcaatggcgattacgtcctcaatacgtacccaaatatcggtgaaagaatgacggtaggtgaagctaacaagtatgcagaagatgcagtgaagaggttcctggaagcaggaagggctgctcttaaagctggagctaatgagtctgcaatagtcactatgagaccttcacttactagccgagctagtgctggaagttacagaaactacattgatacatattgattgaacttttcttgtctaattatttgtcatctttaaagtgcatgtttgtaaatattttataaaatataatatatgattggtgacaatcaattaggctatagcgtttttccactatgttaattatatgatggaacatgtgcgtgcacaagtcttggaaactatttgtagaccagtaagtttatcctctttagtaaggggaaagaaaaactatttacagtgaacatggattttataagtacttttcatgatgtccttattaatactaacaattagcatttgtaatcacttaaagttccactcatacaaagatagttaatgaacaaattacatgaaaaataaacactagtgaataattaagttttagtttggttcaaaatataccataaaactatatttggtctattttttatatttgtattctaatgcacaaagtgtaaattaagtataaaagtgaatattaccattaatgctcgttcaaaatatataaaataattaattttatttatattattttaaatagggtaaataccattttggaccctgtgatttgcaaaagttacagattggaccttctgttttgttaaatgacaaaatggaccttgtattttttaaaatagtaaaaataggaccctgagcttaatttttaacaacttttttttttaatataactaacttgaagacaatacttaatac

SEQ ID NO: 377985 - DNA, 2014 bp, Cannabis indica
aggccatcaacccttataactccatctggttgtcagatttcaccatttcggctaccaaaaacaagtttgtagcattaggctgcgacacttacggcaccatcgtcgcctaccggggtaacaggaagtacacaaccggctgcatatcgtcgtgtgacaaaatcgacgaggatcagttgcgtaagtcttgctcgggtgtggttggttgttgtgaaactccaatcactagtggactcaaaaatttcactgtttggttgtctagtttctacaatcatacttatgtttgggacttcaatccgtgtagttatgcctttgtggttgatgaatccaagttcaaattttctagttttgaagctttgaggaacactgaaaagcagcctttggtgcttgactggtccattggggtagtttcttgtgatgaggctgtgaagcttactaattacagttgcaaagcgaatagcaagtgtgtcaactctaataatgggattggctatctttgccagtgtttgaatggttaccatggaaatccttaccacccacaaggttgccaaggtatgtatcacaatctactactaactatagtacatttcctcttactcttttcgcttacatatgtttttgcaattgttgtcattaaggcaaatataataaaaccaaaatatagaaatacaaaaggaaccaacaaaaaaaaaagtcaaagtggaagaaatttctaaaattacatatttggcaacttgtaattaaaatcggaattttatacacattggcgacaacgatgttccagcttgttttcatatatttaccatttttttacttattttactagattttattttcatacagacaacctaaaacaacataaaaataattttaattttgtaaaaaaaaagttatgctaaacttcttaaaatttttgggaatctatgaaataatttctattttttttaatttattgaggtttttttttctttatatataagtcttttaaatatttatttttcttttttactattgtttactgtatctctctcaaatcgaaaaatctaaatgttccaatcaagaaaacattttaccatctacagaatatattgttagtttccctccaaactaacttgttactatctagggtaaccaataagaaaacttataatttgagtaactaaaatataataaatgaaagtttattagagttaatattttaatatagtagcgtgttgtattgctctgaaaaattctactcgaattctgagatatatatatttcgataaacggattctgaaatacatgtgctaccaattttaaatataaaaaatttatgtcatttttttattctatattgtataagatgtcaagtcaactgaacataaaaatgttgtgaactccaaattatcctcattgattgttatcaaattatacaatttagatattgatgagtgcaagagtattactagtctttgcaacaatggagaatgtcgaaatttacccgggacttggaaatgtgaatgtccaaaagggtttctgcttaatgctactgggacgggttgcgacaaagatttcaaacaatctcacaacaagagggctctcattctatacgctgcacttggtatgtataaatattactcatctgttactttctttttttgtcttgttttttttttttttgaaaggaattcattaaacaaaccaaacattaattacaaaggaatagacttgcccatctcaaagagattactagcaacagaggttaaacccccattcaaccaagaagaagctttaacatctaataaagatatcttagctaagcaatgagcaactatagaaacttacaatgctgcacaggaagaattaattaagataaacatatatacaacactctgactaaatgtccacaagcaaaatatacaaataaataatgtccaaactgtattacagtagaacctctatccaagaatacacttgggaccaagtaaattatattctaattgagaggttataactaaatagagttacactagaa

SEQ ID NO: 377986 - DNA, 8198 bp, Cannabis indica
taaagcgttagatagatcgaagaattagacctcacggccattacaaataatagtttttggtatcaaggatatctccacgaaacttgaaaaattttaggacaaggcccatttagccacattatgggcagcgaagttacaacctctaggaataaaagaaaaattacaagataaaaaaacacttaaagagttgattacaaacagagacataattatcaatattttaaaaatagtaagatcctttcagcgcttcgatattattttttttagcataactatatatactattaaaaaaaaataaactgaaaaaataaataaaaaaattcattgagatcccaaaacaaataaaggcttatcgaaacatggctcacacttatcatatacatgattcttgaatgttctagataatcttgtttgtttgtaacttgaaaaaccaactactaattttcatacatgatacgtggccacatatttggtgtccacgtgtatcctcaataataagctaaaacagttgagcaattttcatgtaccaaacgatatttcttgtctgtttttcagttgaggggttcgaaagtgacatcttatgatgttgtcttgtacaaatgtacaaacccaattggccaacattgagatataagacactgctttttttatcatgagtcatgtctaataactattattattattattattaattattagttttggatttgtcactacaaaatatcggtgagatatttttgttgagtttagtggtcctagatttttgacaaatatcttcctcgttgctttggagactttaaataaagagaattgttaaaatatagtattggtatttaatgttattagtgtatttaagtaatcataaattgcatataatttaagaaagagaattaacattattagtgttaatattctcttctcacaattatacaatttaattaagtatcaggtctcatataacttaaaaaataatttttaaaaaatattattaattgtacagtgtcactggtacccaataataatatttttttcagaaaatggaaataaatttttaaaaaatatcgctaatcaatgtaagatttacaaaaggtaaatgatacccattaatacccaataacaatactcttaaattagttaattgtgattcaacttttattaccatttttggttgagtaatttattagtttaaaatgagacttatttttaagacatagagagacacttcccccctctttggtggtcccatttttaaattgcaacaaaataaaaagaccaatcttccaatcattttattcattcaatcaaaactcttctcattccaaaatcaattattgtgtgttgccttactatatatattttcctctcaattttttacccaaaccaaaaaaaaaacacacttggctataaccttcaaactacaagaaagaaaaaaaaagtctttttgttcattctttgtttctcatagtccattcttggtaagctatcaattttttttttaagtttattatcttttatatactcatgcattttctttttcataatctttttgtaaataataactaaagataagccaattttatcttataaatcttactacaatgatcattgtttcattttaaggtaatttaaacctaaatatgcctatatataactacattacatttcataacataaccatcaattaatttttgttttaaattcatatatattaagaaaaaattaaattagccaaataaaaatccaatctttaataaccctaaaaaataaagattaaatttttattttctttttctttctttttaatgtcaaaagaatgatctttttcgtcactatcatcaccggagtcgacaatgtcgtccgccgccgccactgaaatttccgatcaattcgaaaccccaattctcgacgcagaatcttcagtccttctccacacaatttccgagcacggcggctatgctttcgtccgcatggcttctcaagccgaagccggcgactttcgggccgccgaggcggctcgcgagatggcttgggagcagcttcactcgggtccatggcactctgttcagccggcttggcgcgacgcttactccatggcttgcctccgagtcgccaagcttcatttcgctagcggcgaatttaaggaagcccttagggttttggatatgggtctaattatgggtggaactcttttgaggaaagatttggattctgctgttcataaagtttcctccaaagctagggtttctgaagctcaaggtgtcagtaatggctcttcttcttcgaaatcggagtgtgaattggttcacgacggcctcaacaaggcggaggtgaggttcgtcttccctaatttttgtttattaggttttcaaagattgcattttgaataaatactaattgtcctctccaattacaaaaatcattactttagttacattacagtctaacgatgaattatgaaaatatacaatgactttcttagatttcgagtaaattaatgttgttatatagaaaatgattattcggaaagaatttttgtgtttacattcttcgagttaatgtttataattttaatgctaataaattggattttggatagttcatagttgttaaatatatcttacaacgtaactaatgtttatatgtttatatgtttaatttcaataaattagattttctgtaggctaaagttgttaaatagactctcttcgaacgtaaaggagcatatttagtttaaaatcctatgaggatcataatttaggatgaaaaaaatcatatttattcttgcatttttattgatatataatgagatagatatgtaataattggtttggttgtattatcacattattgtagattcttcaaatgttgcctgagaaatcattgtctggtaagacagtggtgaaaaggtctggtctttctatggagggatttcttcgtgaatatctgttgaatggattaccagtggttataaacgatgccatgactcattggccagcaatgacaaagtggaaagacttggattacttaaagactattgctggggatcgaactgtacctgttgaggtgattaatctttcctcagttttttcataactttgatgaattttgattattcatgcaattcagtattgaatgtttgattgattttgtttttatgtgatttgcaggttgggaagaattatctatgctctgaatggaagcaagagctcataacgttttcgcagtttcttgagaggattcgagctattagctcttcttcttcctcgtcttctgctgccccgacatatcttgctcagcatccattattcgatcaggtaaataaattgtaatgaactgatgtgaactcatactgttgtttatgtaatgaacaagtagtaattgattttacttttaaagaacagataaacgagctacgaaatgacatatgtgttccagactactgttttgctggcgggggcgagataagatctctaaatgcttggttcggtccggctggtacagtgacaccattacaccatgatccacaccataatttacttgctcaggtctcccctttggcatactttgttttgcacatttgctgaaaccatagtgagttaataataataataataagatgttatgtatttgaaactgtttaaccatatgcaatgtgttgtgcatcatagttaatttgttatctcgtagagttttttaatagctttgtgtttataggattcgattcgtgagcaattcaaatacatggttgttgtgtaatttttttcggttgttttcaggtggttggaaaaaagtatgtgagattgtaccattcttccatttcggatgagcttcatccatacaccgaaactatgcttttcaattcgagcaaggtaactaactacgttcaaacttgcattattggcatgaattcccatgagttttttgctctgttcaaagctctgaacatttcatattgatgtaatttattttggttggtcttggtaggttgatctagacaacatagacgagaaagtatttccaaaggtgcgcgatttagaattcgtagactgcattttagaggaaggcgaaatgctttacatcccaccgaaatggtggcactatgtgcgatctctaacaacgagtttttcggttagcttttggtggaatgacactgaaaattccacagattcttgagttttcattgcttccatggcgggttttgttccctttctttttcgttgtggttaattagaagtttaggtggttatggtgagtgtagaaaccagagcgttttgctatcttggatctcaaataggtttattcttgtgtatatagcatttttcaacgctcaggctgctagacttttacatatttttattgattaaaaatggaaatgtgtgaacttcttaaagaagtatgtctttgctttaataatatcaaatttcagtgatttgtattatctttttttagcttgctcaatttgcatttagtaaaacatatttaatatgttcattattatattgaatgaaaacgttaaaatgattagaccttctaaaatataaggtaccaagtgagtattattaaaagggtaaacagtgccataagtactcaaagttttgagtttgtaagcgccataaattcaataatcttttttagtggcataagtacccaatgtttataaaactgtaattttctttcagttttatcagtacagactctgttattgtcttaaacatgacacatataagacccaaattttagattatttgatgaaaatatatagtatgagttacttttaaatcttttttaaataaatataaaacggagtctgtactgacgaaaatagaaaaaaattacagttttataaatattgggtacttaagccaacaaaaaaatcattgggtttatgacacttacaaacttaaaactttgagtacttatgtcgctattacccttattaaaataacatattactaaatttgtgtttagataaaacatagaataccaaataaatacacaccctaataataataataatacaagtacaacattgggatttagaacataaacaaacaatttaagcactatcccaagttgttttgatttttatcttaaacaagattttgatattattaacaaaggtctatcatgatattattggaaccttttcaccattcttatgcattggagttcttagcagccattgcagcactaaaaaactcatccaatgcttgagaagaagaccctttaagaccattaatctcatttctcatagcattctcaatcatctctttaacctcgaaacttttccttctcatttcattccctttctccgaatcgaaattcatcaccaactcaatcttctctgctaaatcttcacacctaacctcacacttcttccctctagccacttcaacacaaaccccaatctccttctcaagcaacacagcattgaaaaactgctcagccgccataggccaaccgagcattggcacgccattgctaagagcctccaacaccgagttccaaccacaatgagtcaaaaacaccgaaaccgctttgtgtgaaagaatctccacttgtggtgcccatgtttgtaccaacaatcctctactcgaaaccctttcttcaaaccctttaggcaaccattcttgagctctgaattcagagtttatgtcaaaaccaataggaggtctaactacccaaatgaaatctttaccacttttctctaaagccatagctaattgcatcatctgtgaagctgagattgtgttcatagatccaaatgacacaaatagaactgaatttaaagcctttgaattgagccaatctctacaaagctttgatgtaaactcattctgttttgctctactttccgatggcaaaagaaccggtccgattggccaaaccggtttactgagttttctcttaaaataaagtaatcccaattgatcaaactctccaatggtgttaaacaaaaccccatttgaatcaacccaagataagagatttcccaattggaatttcgaccaaggatcattcccatcagcttcaaaaatattcaaaggcaattgggaaacatgaaagatggaagcttcctcaaaatccggcaacgaaaactcatcggaatcaactttccggtgaggaagattcaaccaaagtgagtaataacaagccaaaccaaacccactacagccactaaagaaagcgtggaaaatacccatttccttagctacggcggccgtccacccgaaaaagatatcggcgatgaaacaaaggggtttccggctagggttttctctgatgagatcttttaggattttctcaacagaaggtctgagtgaaattgaggaatgaagaagacggaagacattggtgtaggagagaacatcggtgttttcggtgttgggagggaggccgtgatcggaactggtgaaagggatttcgaggaggcgaatggtggaatcaggtgggagtgaagatcggagctttttgatgtttaatggagtgtttaggaaaattacgttgaaccctttttggcgttcgatgtggagagctaaggctaagaaggggattatatggccttgagccatgaatgggaatatgattactttttctttggtttccgccattgttgtcttctccagttcgaaaccttaattttattaaaaagaagaaagaaattaaggaaatttggtggaaatatagtttgactttgacctctgtcggctttagaaatttatttattaattaagtgacaaatctatgtccaaatgtctccttccaatggtagaatgacaagtgtaacataagtagttgtggactttctaggaagtaggtagttgaagttgaaggattccacctttattttcagagaattgcttaggtacttgagcatcggttaaattttggaagaatgatggctaaggctaacaattattggtgcctaatatttttcttactgtcatactcttattagtgtaattaaatatcgagtttcatataacttacaattagtctcatataactaatcataagacgtcacctatagaaggtactggtcaccagtaatacctaatagcaaagctcagaaataaaaatcttaattatgcattcttgatccattaccaaattctaatttgtggaaaaattacaattaatatgcagaatcaaatcaactaaaattgaatcacaaaacaattagtaatgacaaaatcaacaaatcatgaactaacaatcagagataaaatagagacgaacaaagtaattaaaactagaaacgattaaaacaataaaacaataaaatcaataccaagatatatactgattcaagtcctataaattaatgtgatctatgactctactccagttctagaacaccaccgaaacatctttattgattgagcaagagtaaaagtacaattagtcgagaacaattctctatttgcattctctcaaagtgtttctctctcgtagtttacctaagaatcttattcatctacaaaagattcttcatacaaatctcaaaactcaatctctctcttttctctgcgttctcaattttcaacctctaagtaataaggatcccaaagttggtgactgctactaagttgttaagtcagttatgatttaacaaactcctcgtaacaatatctccacgttagctcaagataaaactcttccgaatgagaggcatgcttctagacaatggaccgaaacatacgttgaaaggacttcacgtataggagtagcgacagctgaagtcgactacccgaaactctcttccaggagagaacaactagccattcagaactcatttatggaggaagactaactttccttaaatattcttttcggatggacaagttagacttctgagaacgccctttgagatgaaatacgaacaacttttgagattttttatttagaggaactataccacaatcacttttgatgaataagttaaaatagcttattctttagaaaaagttacaaaattaagctttcataaagtaagctaaaatttagctattttacatttttttatctaaataattagtaatgaactaaatgccaaggtaactatttagtcaactaaatatattttattattatatttatcttttctatatatatgtaatattattgtattatattttatgaaatgaataaaataaaatttaaggtaaaataaaaataaaattttggtgatttatttt

SEQ ID NO: 377987 - DNA, 2141 bp, Cannabis indica
atatacatttgataaaaacaattatagtatttttaaattatattttatcatgaaaaagaaactcaaatatataagaaattctaagttcatatagaatgttaatattaaatatataaaatataaaatattttttaagataaaataaaagaaaataagatatttaaatattatttatttttttataatttatttatttaaatattttttaatatataataaataagcaaatacatttttaatacaaatagatttattatagagtcttttaatcaatttttctttttttttttttaagttgagttataacaaatttagcttttaattgtaaccttttattaaattcttcatatttttatagagtttaccaaataattttttatcactaactttttttaaaaataccttttaacaaaagctgtggtagaggggtctatagtctaccaagattttgttactataaacacacatatttactatgttatactaattatttaacaaatattcaattttgtagtaagtaattaatgtaaaacattatggaaactgaaataattatttattaactccaattgtgtagataagatagcatagcatctgaataggacatcctaatcataggagcagatttggcaaggcaaggctttgatacactaaaaactgctaaatgcaatctatattaagccaaggccgataccaacctttgacacactctcagtcacttattttattttcctatcccaaaccatgcactatattcataacttcacatgcacttaacaagatcctcaagggtgtccacccccaccaccaccacctccgccgccgccgccacccccaccaccatagtgtcctcccccaccgccttttccaaagcccccaccacctccaccaccctttccaaagccaccaccgcctccgccgccctttccgaagccaccaccctttccaaaaccaccacctcctcctccaccctttccgaagcccccaccctttccacctcctccaccctttccaaagccaccaccgccacctccaccctttccgaatcctccaccacctcctccacccttaccaaagcctccacctcctcccttaccaaagcctccaccgccaccacctccctttccgaagccaccacctccaccacctccctttccaaagccaccacctccaccacctcccttaccgaagcctccaccgcctccacctccctttccaaatcctccaccaccaccaccgccctttccgaagccacccccaccacccttgccaaagccgcccccaccaccctttccaaatcctcctccggcacctccaccaaatccaccaccacctcctacgccaccaccgaagcctcctccctttccatgacctaccaaagtcttctcctcctcctcctcatcattcttctcactactagctacattccttgcaaccacattcaccacgaaaacattaaaaaacaaaagacatagaaatgctattttccaagctccactagccatgttttactactgtttctgtatcttattttgatacttagatatgaaagagcgtgtagaacgagggtatttatagaagagtttaaaattatatttttctttggcattaaatgtggactcaaccactaacagttcgccacattcattatctaaatttagctcacaaatatcggacgcgtgttaagaatagtacaattatctatcaacattgacaaagggctcagcttgttccatgtaagagagggacaacttaataatacaatacatttaggtcaatactagtaagaaaatacgcgcaatgcacgatttggtaaggtgctccacgtaccacacagttattgtgtatattgagatgaatttataaagaagtgactacaccaaaaacattaacggtgcgtttggaagtaactgtctaattactaagcagtgtaattactagggtggtaattacacagtgtagtaattacactatattttaaaatgcaaggtgtgtttggatatgagttgataattacatatgaattcttaatatcttgtttggcaaaatagttagtaattacatgggaaaataatatttttttagtagctaatgtttaatatggaaagtttttagtaattacacagtgtaattacattcaa

SEQ ID NO: 377988 - DNA, 4047 bp, Cannabis indica
ttgttttgaaatacagggtaaggacaagacaactgaagagagacggattgccatatgcatttttgatgatgttgcagagcagtgtcgtgaagcagctctaaagtaaactcgtctaacttgaaaatcttttccttaagtagtatcatactcgtatagtcatatgatgtttactcaattaatctggttttattttgatgtggtcagatattatgataccttcctcccatttgtattggaggcttgcaatgatgaaaattcggatgttagacaggtttgattttctgaccattgctttgttgatatttgttatagagcttttcatttaatttatttgatgtctttttcaggctgctgtatatgggcttggtgtgtgtgcagagtttggtgcatctgcattcaaacctttggttggaggtattattttttttgctgtctaatcaaaagtattttgttttatattgttatctcggaataacatttttaggtgatttgtacagaggcactttcaagattgaatgttgttctccagcatcctaatgctcttcaagctgaaaatctgatggcatatgacaatgctgtctcggctttgggaaaaattcttgcttttcatcgtgagagtattgatgcagctcaggtacttcaacacttgcgtatatttgttcaaaaaggattagagtattcgattcctccgaagatatttgcattttgcttatcatgtcattattgtgactccatgttattttatggattcatctgttaatgttattacgagttatcttccaaacataccttactgctcatgtttgtgataagcttcttgtggtcgtggtaactgaatgatatgttgttggcaggttgttccagcttggttgaattgcttacctataaaaggtgacttaattgaagctaaagttgttcacgaccagctatgttcaatggttgagaggtaagttcatcaagtcgattctttgtaaacgtttatgctcaattttgtttcatcttgccttattttttttactaagatttacgaatactatgcagttttatcaaacaattgttcttcttacccatttacaggtcagatcaggaagttttgggtcccaacaaccaatatcttccaaaaatagttgcaatttttgccgaggttagtggtttttaacaatttcataaatgcacggttttatcacaaagtatgctgtcttcaatgaagtttacacacacacacacacacacttcttcctttgaatattcaggaatatccaatgcccagattccaactgattattcttcatattgtagtaataaacaatatttgacttgtaacatgatgttgttataaaagtaaatgccatgaatatatcaaatttggttaaagtttagcactaattcagagaaattttttgcaaagcccaagtcaaattgcatagattgaaccttttctcatttgtgattgcacaaccaaatatttggtaggagtttcgcttaaaccaatttttttaagggggttatgattactctttgtaggtcttgtgtgcgggtaaagagctagcgaccgagcaaaccacaggcagaatgatcaatttactaaggcagctccagcagactttaccgccatcgaccttggcctcaacttggtcctctttacaaccacagcaacaacttgcactacaatccattctctcctcataatatcttctatctgcagtggtggcattttttttagctgttggcttattcatccctttggctcttgttattgtgtgtcaaaattattttgtcaccgtttcgtttcgataaggtggttcccaacattcgttattgcataatgttcttttgttattacagcaagcaagcaagcaagccggcgtcacgtcattgcttggaagtcatcgatgcgattggaaatgatcttttttgtagaatgtgtatactacaagtgttcattttatagtgcggttttgagtacaaaaaagaaaaaacaaaagttgggttagttcatggtggtttgcagagtggttttaatttttggtcggtcagtccatcgtcgttccccccgtccgttcggtctcggttggttggtgcttgagttgtgagggttgtcactacatgtcaatgcgaggcaatgatttgtagcagttttgttttcattgttgttttcagctatacaacattaaattatgggaatttgttgactatattatttatggtgattctctctcattattagattttctcaaaattttgattctcataagcaataataataataaaaagaccatatatttatttctttgttgtgtaactcttcttttggattacatttcaaatattcaaaatttttcattttatcaatgttggaactttaagttaccattatgttatttcttttttggtactaaattcaacatgttgatttcttttatttattgtctccaattttaggtggaatatatgttgttaggttttgggtgtgacaaagagagataacaacacttaacacaaagcatagagaaaaagattcccattagaaccctaattaatattcttagattcccattggaaccctaacaaatttgcttagatcatttgtttttttccctaatttttgtaaggatttaacattgtttattgctcttaacttccaaggttggaagtacaaatgtcacactttcatgctctcaacattatataaataattgtttcgttgaccaaaaatttaaggtgaggacaactacttagttctaccaaaaaccacttataaaatatgattaaactaaatggttcccatgtcttagaattgacatgtcaaaaggatttggtcataatcataacattgtaaagtcagaacaacttcaaaatttacaaaaaaagaaaaaaagatgatgaaaacgagcttcccactaaagaggacaatcttcttcttcttgtctatctttatataaacaagacctttttctctcattctattcattcaaacacttttttagttgttgttgctaaaaatgttatctaaacaagccaaacaaaagggtgtctcaaccaacaaacaaagcaagttcaaagaaagagtaacaacaacaaccactaacaaagtaatgaagaacaaatttgttggggtgagacaaaggccatcaggaaaatgggtagcggaaatcaaagacacaacaaagaagattaggatgtggttaggaacctttgacacagccgaagaagctgctcgagcctacgatgaggctgcgtgtcttcttcgtggttcaaacactcgaaccaacttcgctaatcgtggtccaacgaattctcaactctctttgaagattagaaaccttcttaatcaaaaaaagagcttgaaacaaagcaaccccaccatcatcaccaccccaattagtcctactagtgttgttagtgttagttcaaatactattaaggattgttttcatcacaataaccaaaattctaactcaactactctatatggtagtaatctagtgtttgatggtgcatataaacctgatatgagcaattgcattgtggaacctcatcagagtatcatgactcatttcgattacacgtggccgtttcctattgggtttgatcatcaaattccattaacacatcaaggaatggagttgacaaatgggattgattccatatcttcatcaccaacaacatcacaatcatcaacagaagtggagtttagtgatgaatttggaagaatgaaattagaaaggcaaatttcagcttcattgtatgcaatgaatggagtgaatgaacatattgactatgcatatgatccaactagtgatgctcattgggatctttctgctttttatcaattgttttgtcaaagttaagtaatgtattatctctttctctttatgttatatgttttcatcaaatatttttggatgagtaaagtgaagatatacaagagattaccaataattgaacattgagcatggttgtcatttgttggaatttatgactatgatttaaattgattgattacattgaaatatgaaaatagctaacaacattaaccttagaaga

SEQ ID NO: 377989 - DNA, 3962 bp, Cannabis indica
ctaacccaatcactaagttttgatttgatttttaactcaacataacaacagtttaatatagaaaaaatcttaataaatcattattaaattttatatacttgtacaactacaaactatactttaactaaattatttacctaaaatttaattaatcaataccttagtcatttatatatattttattaaagaagctaaataattatttttattttaattatatatctgtgttagtttttcaataatataattggtaataattaattaattaattaattaaaaagagtgagaatggtgtgcaattaatgatatgtgttattatcctatatatttctttttaattatttataaatgaatattttacgaaaaaatattgtattagaaagttgttttagttattacctgcccgatattccctctctatttgtaggctactaataaaatgtctcaattcgtaagctacacactatgaaaaaataattattacaatagaaagacatatataattgtcaacatgcatatatttttatctttataaaattaattataaagaaagtactaatggggtcagcaatatttaaattaaatttccatgcatagaagaaccaaatatgatgccctggattccaatacatatatatacaataacattagcctctctaattactcaacactagcatgatggcacgtttgccccaatcatacaactaacccataatggttttttaatgtatattattaatatgagctgactgacccaatttcaaatttcaatacaataaaattgctctattaaatatttgttggacaatatatataaaagagattatagtcaaaattacaaattaattgaatcatgagttgtaattgttggttgctggtcaattaatgaataccatcaaacatattaatcaactaatcatgaattatataggccaattatatatatgggtctctaattaaccatatataataaaaagtgttgaatatatttgaggttctataatatttaccaaaccccaagtacataaaacagagtaataattacttaattcaacttttcggtatatttttgctatttattacttaccatgcatataatgtgtgtactattttattaacaaaaacacaaaacagagtaataatttgatcaatcaaagattcaaaagtgataaaacaaaccaaattttaaaattattgtaaaaaaacacacacacactcatcaagaaatttttggtaatttcttttcccacccagaaacatcttcagattattagatcaagtagctagatatatataaagaagagaactatatatgcataattaatataattataattatatttttaacaacttataattacatattaattaattaggcttaaatatatgaatgaaggacaaccgttatttcttttctctctctcttttccttcttgctccggcatatgcattttctcaagaacttattttaaatcgatctcatgaccgaaacaacaaacacagaaaattttaaactgatcataataacaaatttgagagtaaaaataaaaatatatatatttatccacaaaaccgtaaacaacctcacaaacattaaaacgaagtgagaaaaaaaaaaaaagtaaccggccccattgcatgattgatccttttggtcatactcatcaccggtaaaaaaaaaagtcaacattccggcgccggcaaaaaaaagaaatagtaaaaagaaagtaaatcaatcttcggagatactttcaagatgaggtcgccatactccgatttgggagctacttcttcgatgatgccggcgtgaagattcttctcggagataatactcgacaagtaccgatcacagtcgacggagtcgacgaaaccggtggcggcggcggcagcggttgtagtagcagtagtagtggtggttgactttattttgatctttattttttgtgggtattttcttgagagcgttgccgaggattttttctgtcggccggtaagagaagatgggatcaagaatatatgctgccccttttgagctctgtgtccggagaaagtatcaaaatccggcgaacaactccctgagagcatggtttgctaataacatgattagggttggccttgagaatctcgccggcggtgaccggacgtgtaatttcctcgacgtagccatttaaatggactatacgaattaaatctaaggcaccacatggaagaacacaagccaaacaacaccttaagctgtttcccattttgtaataataataataataattagatcaaatatattgatttctctctcactctcactgtatatgtcgccggagaaatattagctaatcttctttctctctctttttctgatcttgtgaacttagttggaaggaatatacataaatatataattggtccaatgggatagagaaactgagaatgtgtttgtatatatagatgagaattataagtataatttaccgtacgtacactacacatacgatgaggattcttattattaatataattaatttatgattgtgtatggtatacgtggatattatatgcattattattttgtattgtgaaatgactaaaatgtcctcgcttggagttttcatgcatagtactcctgtcctgggtatttttggtttttcgattcttattaattattccttcagtaggataatgacttaagccgcccagtcatacactaatgacagtaaacattattattgctttgataattaacttcttctgattagtcttttctaacaagttgattaagtctttggtctaaactgcgtacggatgcaaataatttatcagtgccttaaatctcaattttatcaaattaataacattttcatttcttcaaatgcaatgaattaggaaaatagactgaaattttatcaattttggtatgaaaataaagttttttctgactaaattctttcaactatcattctatttgtacttaattctctaaagtataattttgatgttaaaatccttcaacttgtaaatttaaagtgttcatctatttttcacatgattgtcaatatcgattgcttatgtgtacactttgtacatgtgttaaatttatattggtacacctaatattattatttagaatataaaaattatttcaaaatttataatatatattttaaatattttctttaattttaaaattaactttgaaaatagttttcaaataatagtattaggtgtaccaatataaacgtgttatgtgtacaagcaagtacataagcagcccattgtagcaattaattggatgacaccttaaagttgctactagtttagtaacttggagggtttcaccgctaaaatttgagcttagatggttaaatacaattagcaaaacgacaataaaaatggtttaaacgccaaaaacttatgaaaatattattacctaacactaataacaaaaaacttttatatctgagagtactaatgagagacacacatgtataccccaattacaaaaaatatatacataaaaatatattattttatttgataaataaatatttaaatagtaataaaaatttcacaaatatattttatagtaattaataaaccatatgaaattaaataaatttacaaaaagcgattataattttatatatataattataataacataatatttatctaattataatttttacttaatattgacacaaatacttattttattataagtagactctacgtagtaaaaattcggggtcattagttgtagaagcttgacagtagcaagattagaaagatatggtaaaaatcagagaaagcaagatagttagaaccaaaaaaagcaagaggaaaaagagagaaagatttaatagaaaaacttaatctctcattaatgagagattctttatttataagcacaaagtggacaaagtaaggagctaaatatagtctaccaaaaccaaaaaaaaaaaaaa

SEQ ID NO: 377990 - DNA, 7128 bp, Cannabis indica
accatgaaccaacgttttcaggagtagtgttacaagcatacaaaaaaatttaaatagaatacacgatacagcaacttcaaggaattacaactaatacaacaataataagagatattgttttacttgtcatgcaagtgcagcattcccatgtaatgtaattagatagtctggaagaaggaaaaaaattcatgatacaactttataattgctggactctcctctaactaataatcttactagtactaggtgatagtcagatttgctgctcaaaacaaaacaaggcgcacatattatattcaacagatgggggtggtggcaaaagctaccattttattctcgttagtcttgcagttcttttttggggaaaacaaaaaatggcaaaaagaaaaaagcaagtcatttctcaagaagaaaataaactgaattgaagacaatgaagtttacacaatttaaaatgctttctactttccgccatgataagaaggaactaacctgataatgagcaaggagatcaatatatctacgaatgggagatgtaaactgaacataaccaggaatccctaaaactccatggcggataggattcctgaaatccatttcagctgcacgcattattttaaccaaagctgaacttctaacaggtccttctggaagatgtgcaaatgcagacatgtcaatatctgattgtggctgccctctgtatggtaagggaatgctattgcgggaaccataagtagctatagcttctccacagagtatcatcatttctgaaacaagtcgcatcgtagggtctgcctggttttcgacatagagattgattaaaggttctggatcttctgggttagccactttgatacgtgtttctaaattggctgcatcaatagcaccctgcacgtgcaaatataatcagcttcagaaaacttattcccacaaaaaattgacacaagctattgcaatcaatccacatcagctgcatacaatacattgtatgaagttcagtccacagagctcatgtctcacattttattttattacggaatcgctgaccaatggaaattacaagctataaagcatatatcacaagaattaaccaatggaagtagtaatctgtcagaagatgaagaaaaaaataactataaagaataaaaatgatttctaataatcttcctccagggagagataaggatgtggtaatcaacacacttatactgacacaaatttatccaagaggcacttttgattcaagcaatcaccaagcatgtagtagcaatatgaccatgtacatgcaacttttcaaagcagatgttttaaagttttttttgttttttttgtttgttttttgttggcagatgttttaagtttcactaaacctttttttaatactaagaaattttccaaactcagcagatccagttcgaaattagagttctttgccaaaccctacaatatttgagaagcaggaaactatagcaattgcaatacaggtgctcagaaaggactccaatcttaagactctgtaggagcagtcaataaaataggtaatttctctatattatttctcatacaaaaccatgtatttaatatgtacaaggataccttaaaagggaaaaaatcaaataacaatgacagaataaaactcttaactataccctaaaaatatggaatcaataaattacaatagttgacatacagctacacaagaataatactaaaaatagagtgattttcctacatgagcaaacacatgcacgtttgagcagccactcttaataacacaactaccctcactaatactaagggtagttgattttaacaatgtacattttgttgtctatttccacttcttgtgaacaacactcaacacgaaatgtacataaaaaacttaccttttttttgttattttatatatatatatatttatattaaaaaaaaacccttcctccacaaaatgttcaacattttttcttcagttacttcatgtttttatgatattttaagattccacccaatgtttttctagattacatttttactgaacaacagcagcttataagtcataggtatacaaccatgagaaatatgatagatcatttttaaactgaagatttttagtcaataaaggttttagaaaagtataaccgcgaaaagcaaaacaaatccagcaaactattagtagtttagctataaaaatttatttagttcactaaaatcaacctgctggcaacgccattgcaatcgtagagtagcagcctcagacaaaagctttagttcaacctcttctgccagatccaaatgaagcagctcagatgcgctctcatgtgtcagcatgtaagttggtttaatgactgaattctccactgacacttctgcaacactatagagccacagagagagattttgaggaagattttattataaaaacaaattaggctgacaaatataaagaaatactcatcacccttcactagtgtacaggaatatgatatactccagtaaggatcttcaaatcaatagtaaggatagtaggcaaaaacaaagaaagattgaaagtagaaaaacatggaaaataggaaaatctgaaaatagatattaaattgaacaaattgataagaaaaaactgaacggttgaggaatttgaaagacctaaactctcccaagagccaaaattgcaattctaattctctctactgttgtaataatactactctgttccatctcattcactacacatgtcacatacccttttattatctctgttctagagataattgcggctaaagtctccctatatagtattatttattgcagttaactacctacataaaaaaattggttacaaaagtatctaagtagtagattttgttgcagttaattacaaatgtaaaaaaaaaatggtagcaaagtaccgaagtaatataattttttgcaattaactacctatggaaaacaatttaaatctaaaaattaaaaataatttaaatctgaaatttaattcaaaatctaatactatgagtactttctagatttaaattgcttttggataggtagttaattacaacaaaatctacaacttaagtatttttctcatcaaagtttttacatagatagttaattataataaatgacactaaatagagagttttccatcaattattttacatagatagttaattacaataaataaaactatataagaagtttagccgcaatcatccctatattctattattcacccactttgttgtaattcactacaagaaataaaactaattagagaattttgcctccaaaaaatttaaataggtagttaactacaataaatgaaaccatataagaagtttagcagaaatcatctctaaattctattattccaagaggtgtctaagaatactacatgtatatctaatatgtttctaattccctatatccagttggtaaacattgtatgtagatgtcatgtggtgataaaaattaaattccaacaaccacattgtatcccgaaaagaaaaggtaacatatcataaatggaagcaatataacaggagactttgtaaattaaagaagattaattcaacaaatatctatgtctcacataactctcctttttaacataaggtaacttacctcaaagaccatgacatatctaggtatagctcgaatctctaacatatcaaagtaaaagtaataccttgaaattctaataatgtgtacaattctaaagctacataattgcattttaaacagaattaaaaagaaaattaactttctacctgccatcaaaatgcaacacaacagacactgtaacagcattacaattctctccctgcttcagactcattccttccatggcaagtatctctggaaacatgggataagtaatagtgggcagaaaaactgaagttcctcttttcattgcagccctaaaccacatagattaccaataagtaaaattaaaatatagttttacgtctcttagtgttctaaaagtttacctatcaactatgttccctggatcaagaaatctagtaggatctgcaacatggatcaaaatttttatacgtccatcttgcaaccttgttgcgcttagggcatcatcaagctgaaaaattatgtatcagtacatatttaaattgagaaactcccactttttctatggcagagtttaaaatagagagaaaaaacagatcaagttacctcatcagcctcatcaacatcaatggcataaaccttcaggtgagtaagatcatttctattatgctaaaacaaagaaaacaaaataagcatcaggcaaagaataactttagaagcaatagcattcatcatgcatcttcatttccttctagttgtagaaaaaagcaagtgtgaagatcttgataaacagttttagctctccaattcagagagaaccatcttaaagatcataggagtggcaatactgatattagcaaaaaactttgcatgctaaaataataattattaatatttcagataatgaagagaatctcaagtcacaatttttaatttgcatattttaactttttaaaacctcacatttccaatattataactgaacagtatcttgctacataaaaacccttttgtagtctcatttgtatagaaggctgacctcatcaggatcagatgactcttccagaagactttttgcagcttctgttactacttcagaatgatcagtatggatccctaacttcaacagttcaagattgacatgaacaggaaaataaccaatatctatgaggagatatactgctgatgatgctgtttttgctaaccccattgttttaagaatctaacaagataggaaaatctatgttatatatgataaaggtgcctcacaaagagcaatatcctagtaatatgtctaactgaagtgttacaaattcacagcaaaataaacaagtcgagacagatataccaatccagcagttttcttttggtcatcacttttgcaggcatcaatagcatataattcaagagattcaatttttcgcctaattttctcttcacccagccaagttgatttgggaggtttagcatccataggcattgatttagcagatttcaataactgaacaaattcttgcaactctttctcagaagcctctttcatgagcttcctatgaagaagctcctccacctatttttaaaacagatgagctatcactgtaacaatataatgcacacacacaaaaacaaggccagaaattccggtctataagtggcgtataacattcagctactgccaacaaaccaatacacgcagaattttacatatacagtacctgattagtaggtcgagctccgtacatagaacaagaaccttttgcctctatcactgtgaaatatatttcatctttcgaaagcaaaagatgggtacaataactctctagaggcattgcgctaccaaaaatcatctgtagaacaactaaagtcactgaaggagaaaacgatatatccatgaaactaggatagtattgtacctcagctaattcttctgtagtcaccaacttatttttttcaagaagctcaacccaagcaaattctagcaatgcaggatcctgtaccaaacaaaatatgcactgaaatttacataactgccttctctaggattctttacaagttacaacatttttaaaagaaaacaaacgatttatgtttctgccaaacgaaccaaattattctgagctttctgaataaagtccccaatatctgcatgatcaaacttttcaatgccaggaataatatatgtaacttgttgaggtttaatggacgacactacaccattctgtcaaggaaaacaaatacccaaaaagaattattacaaccaacatcaatttttttaagatttcaaagaagaagcaatgaaatccaacacctagcaacctattcaacatgccgcaatagttgtttctactagaacctgatcagagaccatccagttctttttgccatctggtttctgagcaacagcaagcaatactctatcagaatccttcttgaactctaatagcaaccctttctgtatagtgcgttttccgagtctatcctctaaagaatctccttttgctggtatttctattctgaaaagagtcactaaataatcatattatatacatgttcaaaaagtaacagacggaaaaaagaaattgtaaaatatggccaagaattccacattagttgagtatagagtaagaatacacctacttggaggttgcgcaaattatcctccatcttcgcgaggttcgaagctcatccatgacgctatcgaacaaactatgagcagagaagctccgtacacctccctgatcaataaaactcctttgagagtataacaggggtaatgaaaatcctagtttagaagtggagtaagcgcgaaagtaagaggtcttgaaatggaaagggaggcatcggacggtgcagaaaggaggagatgaagcggagcggagtatggagcaggtgttgacggctcgaaccgccattgaagagtgctgaagcagataggcctagggtttcatagcaaggtaagaaaatggtgcaatggtgagtggagtggagatgaaggaattgaggatttgggttttggattacgagggacgtttattcacgatagagtagaaagaaacaattcgacgataaccggagaaaaggggtattttcgtaaacatactagcatctgcttgtgtggcaaactgtctttctctttaggatttttttttttttttaaacttttattaacaacaataagagagtttaatacattaactaaaaaaagaacaaaatcttcaattcaagccaattcaccatccaccctaagtgcatgtacagctaattcatgagcaatcttattggttgtacgtcgaacatgaactaagaatgcctcatgaaaactgaaaagcaaactagcaatatcattcaataaggaacttagttcattacaaagggaaaaatattttgggagagccaaaaccaagactaagcaatttgactccaccatatgaagaggaagaccaagagttagtgaccaatttaacgcaaccactaatgcaacaacttctgctaatatgactgaaaaattccctacaataatcaacaaacagaggataagtt

SEQ ID NO: 377991 - DNA, 1410 bp, Cannabis indica
ttttctaggaaataaaccaacaaatacatacatgtaatgctaacatgtgattttactgtgaaagcatctcataattctccaaattcaaagcatcatctctgtaaaattatctatgtcatctattctaattaactgtgttcaagggttttcaatgttactaattataaattgaaactatatgaatgtcaagtgtcaacatgaatacaatacaactatttgaatgccaacggaatatcgagagtaaaacatactttttccagtgaccatagcacgtaagtctccaaaggggtctttcatgctgaaaatcctcaacagctacgcgtctgcaagattcgcgatctgtacaccttggagacacagaaattcatagctgattaatagtgtgacttgatgcaagggaataaatgaaataagtaacattaacatagttgcagagaaaaagttacttatgattggtagtctggctctgactttcagatgtattattggcattgggcgtggaagaagaacgagtccacgagttttggaatggctaatcaagttttataagagcaaaatatcagattattaattgaatgacaaaaggaactttcaaatcattaattaaaaatgaaaaaacaaagaacaaaaccttatgttggttgggcttggaaccaaaatctcctgccccttttggttgaggattgttttgaacaccaaaaccatagggattgctgggcttctgctgttgctgctgctgttgatatgagaaaacattattgggtctctgttgttgttgtgatgaagtcacatgaagaaatttacaccgttgcccatattgacagctgaaagagacaaccacaccaaactttatatataaattatatatatgtaaatattgcaaaataaaagttcatgtattggagataaagctttatacccacctgccgcgctgaaaattccggcaaacatccttcttgaccggcatttggttgtcttgaattgagtcagtgaaaaaagaaacctttaaaccttaaattctagagtgactagccaagctgtaagggaatcaaattctaaagaaaatcaatttagagtaatctaattctcgtcaaatacaaagcagtgtaatgtaagtaagtaagaccaaattcggtcacgtctaatattactgatgaattggaatgtaatagtattagggcagccattaatgaatggtgagttaagcttgaagaaaatgtagcggagagtgtaagtgaaaaataccgaaggaggagagtactgtaagagaaagaagcatgaatcagaagctaatttggagtgattctccgggtccggtggttcgccggcgccgcccaatttggacagaaaagtgaacgatgatcgtggagagagagagagagagagagagaggagggaggggggaggggg

SEQ ID NO: 377992 - DNA, 4157 bp, Cannabis indica
tttgaacataattttcgactatgttaaatttttttaaaagttttcttaaaaattttgactaggatgtcttaaacaactataacgtacatgactatgagaaaaatttgactaaaaatatttcggatgctaaaacagataggagtgcatcaatatatctattttaagaatgtgcattgtagaattttccaaaaagataataagatgttagttgttagattagtatatatataatcaacaataatcaacctaaaattattaattaatataattattaataataaaatgataaaaaatataagaaaataaataaatatttataaacttaataaaaaattaaaaaaaaaaagaaaaagaaagaattaaagataaaagataagattaaggagataaaagataaagttatttgaagtaatattagaatgacacgtcaccctcgtacttctatatatattcgaaaggatctgatacgatgcgacatcttttttccagttcttcatcttcatcttcgaataatgttttttttcttttggaagaaatcttcgaataatgttggttgagcaaaaatagggaaatttaatcaaagactcaacatttgtggaccaatttacgtttctaaaacagaatcaaatctcttctctttcattccttccttctgctcctttctccagaacccatccactggctggtctactacaatttcagatctagctctcctctgccacctaccaaatcaggtaattaactctaaatccggtttatatatatatatgtatgattctgtggtgtaaatttatttatatgtaagtttatatttgatgggatatgccaaatagtttattgggcttcgaaaaagtgttcaatttgtaaagttggggatcatgtcttttgtgtttatgatattgatttgaattctaagcttcatgatgatgatgatgatgctaaatccaacataacaaccatataaatagtagattccatgtatagtataatactaacatattctaattctaaaccttctttgaaaaccagatcttcatcatcaatggcttccaacctatataccaatggagatttggcatctgtgcctaatcttgagaaaaatctccacctgctttctcctcaccaagttgagattgccaagacattgttggagttgggacagagtcatttgttcgagcattgggctgaaccaggggttgatgacgatgaaaaaagagctttattgatcaggttactctgctcaatgaaaactaccctggtggtttggaatcatacattaaaactgctagagaactcttagcagattcaaaagctgggaaaaacccatttgatggattcacaccttcagttccagaaggtgatatcttgacttttggtgatgataacttcatcaaatttgaggaaatgggtattagagaagttgggagagctgcatttgtccttgtagctggtggacttggggaacgtttaggctataatggaattaaggtggctcttcctagagagactactacaggagtttgctttctacaacattatattgaatctgttcttgcattacaagaagctagctatgcctataatctctctcaaggtcagatacatactatatagtggtttaaatttggagtattaaactcaattattgttatcaaattctgtttaatgctcatattgagtaatgatgtagttttttaatcatctttaggagatcaaggtgaaaaaaagattattccatttgtaataatgacctctgatgacactcatgctcgtacgctgcaacttttggagtcgaattcttattttgggatggagcctaagcaagtaaagcttttgaagcaggtataaacattcaattattgatgccttactactgttactgatgaaagaacactcctaaatacttgatgaatttttaactacaggaaaaagttgcttgtttagacgataatgaagcaaggcttgcactggatccccaaaacaagtacagaattcagactaaacctcatggccatggtgatgtgcattcccttctgttctctagtggcttactcaatgtttggcatgatgctggtttgagatgggtactatttttccaagacacaaatgggcttcttttcaatgcaattccagcagcaataggtgtaagtgccactagacaataccttgtaaactctttagctgttcctagaaaagcaaaagaagcaattggtgggattactaaacttactcacattaatgatgggagaacaatggtgataaatgttgagtataaccagcttgatcctctgcttagagcttcttctgaatatcctgatggagatgtgaactcatctgaaaccggctattctcctttcccgggaaatataaatcaacttatattagaactcggcccttatattgaagagctcacaaaaaccaaaggtgggataaaggagtttgttaatccaaagtacaaagatgcaagcaaaacttcctttaaatcttcaacaaggctggaatgtatgatgcaggattacccaaaaacactgcctccaacagctagagtgggatttaccgtaatggatgcatggtttgcatatgcacccgtgaaaaataaccctgaggatgctgctaaggtaccaaagggtaatccgtatcatagtgccacttctggagaaatggccatctaccgtgctaatagtcacattcttagaaaggctggtgtttatgtagctgatcctgtactagaggtcttcaatggacaggaggttgaagtgtggcctcgtatcacatggaagcctaaatggggtctcacctttaatgatatcaaaaagaaagttagtggtagttgctcaatatctcaaaggtccactatggttgttaagggtcgcaatgtttttctggaaaatctatccttggatggggctcttgtcattgatgatgatggagttgaagaagatgcaaaagtaagagttggtggttcggtacataataagggttggaacatcgaaaaggttgattataaagatacttcagtagctgaggagttaagaattagaggttttagaatcatcaaaattgagcagctggaaaagaatggaaaagaatgatagtgaccctgaattgccatcctaaaatctcttcttttttatttttgaacaaatcattctcttctttttcattttggcttaattaatctttttctattatataatttttgttaataataagtagagagaatgatttttgtaataatacgcagtgtgcttcatgcgtgaattttgtctctgaaaattacaaataatttcaaactcgaaattttgtctcaaaatgactgtactcaacatatcacttcattcacaatttcatatataatagctatgtatatatagtagtaatccccaagtctatggaccaatcaaataaccccatttacagaaaaaaagaaaaaaaaaatcccctttacatatcatttatgtaataactatgtattatagtatatttaaaactaatcaaccgcaaataacagaagaaaccgataaaggaaaaagcctagtagtggaatacttgaaattgataagagaaccattgagcaaaggtttcccatcattaacgagacaatcatcaaatttaagacgtttgaagattttggggttgatgagatttaccgagctaaaccagccacatttgaggtgaatgcctgagatgttacagccagtaaaacagttatttagaatttcaactgagaaggttggtataccatgtggcatagaggacgtgggactttggctcactattatatcagagttcgaacagttatcaccacctctaattcggtccaattctattcttccagattcttttcctgtaaatcaaattaaataattaaataaacaaaatagcccctccacaatgaacatgagagcaataaattgtaacagtgaaaaaggctatatgtattgcattaattacattaatgatgttccactttacaactaacttaattaaacacgtaagagtgaatatgagaatataatgtatatacaatacattaattcatataaaaagaccaacaatagggaagaggtggtctacagacaaaacatacttttaggacgtgattcttgatatctctatacgactaatcagacaaaaaaaaaaatgagaaaaagtgt

SEQ ID NO: 377993 - DNA, 2579 bp, Cannabis indica
tttaacaataaaatgcataagttagttaggtaacagagtgaagaatattaactacaaccccaacatcataccattgcttgtaatatagtcaaacgattcaagggcctctgaagtatttcggtatatgttaggtgataacatatgcaccaagtgattgtcaacccacctgcatatcaaaattcagcaactgatgtgtcagtcaggttcaattcaatgtatactagagcctacataatattattagtaaaagtgcatagcaactccaagtagaggtaaggtctttaacagtaagaaacacagaattatccaactagttttagttagatcctaaaacttgtccctaaaaaatttcagttgcttttttatttaacaagatcatataaatagctatttctaggggtcatttcggttaccctttttaacaagctaaaagctgaaattgaaccgtgcacaatggaaaaacagaaactgctctgagcaaacttcagattttagctatggcttaattttttggcccacaaatggctctgtaagtactcctagcttgttatatacttaaacaaatttgccctacatacctccataacactaacttggaaaattccccaaatattatagccatctcaatagaaaaattcctgaagacctaatggattatattttaagagttccaatcaaagactctgaataatataatctaataagacactaaaataatcaacagtcagtggagttaagctgtgaacatataaatagtcccatttcatttcattttcagatttatgcaacaaacaagtaccaacataaactacgcaatagcaaggaagaggaaagaaacatactggcgccacttcgtctcttcatcatccccagaaggagctactttgtttggaagaattttgccacccaatttatcaataataactgaaaacaccagcatgtttgctttaacatgagatataaacaaattcaaagaagcctaaaacacatacttcgacacttttaatattattcggaaaaaaaaaaacttcaaacctgatgagtcgaccagggcttcaccatcaaccatcaaaataggaactttcttataatcagaccatttaatctctttcttgctaattgggttgacttctacaactttgtatggtatatcatagtagtccaagaatgctgagacaaaaataaacccgataaggtaacagaaatttgttaacaacccaagttgtaaaatagatgcaagaagaaatattgcatctatgaagttctccaataacttctatacttcaagttcaaacaatcaaattctatatataatttattaaaaaagacatatgtaaatagtattgatgattgaaaggactctaatagatcagtgtcactgccatctccttgtacccagtcaaaatgctcacatttgttaaaataagacatcaatatatacacatctacatgcatatatatatgaaacacttctaatagataataataactagaaatattaattttaaaaatattttaccattagattttgaaccaacaatcaataatagaaaaaaaatgtgttttcatgattaatttagctacttaattaaaaaaaaaatacactctttttacactatatcgaaaatacatttttatcaaacatatttaactcttactcaatttttttatgcctcccaaccgatagaacaacctcagccatataatagcccctctaatgtaacaatgagatatattttttgaattagattgcaaaattaagaataaaaactcatacttttcttataacattaactaagaatgcaccatatatctattgaatttcttactatgatctaagacagttaagtataaacaaattccattctaattgaagaactatgattcatcaatgaattcagaaccaaaaaatcataaatttttctctaataattctacaaaaacaacaagattatacctttaactttattgcagaaagggcaagcttcatactgataaagaacaacatctttagggaccaattccttcgaaggaggttccttagcgtaaacctcctgagaaagagacaccgcagcagcaccagacaccataacaccggcgatgccagttgaaatcatggctctagacgagccagaggagaaagattcaacaatgggagagaaccaccgggtactagtacgagggcgagaactggtagtggtggcgaacaaagctacttggatgagacggtggttggagagggctccgccgccatctacggtggagagagatctggataggagagaagatgtggcgagagctgaagcccttctcatggtgatggttgttgattcgatcggagattttctggttgttgggagagagttcggagaagaaaggtttacgtaggcttattgtgaatcaagagattttaggggcttaaggggttttgatttggggtttttttgaaaagttaatataaaatttgggcaaaagtgaaatttttattaattgtggtatttttgaaaaagtagtttaccaaaatttgtaatcaaaacaacatattttaatttggggtttttttaaaaaaaatattggat

SEQ ID NO: 377994 - DNA, 4683 bp, Cannabis indica
attgttaatattaaatttattaatctttgattttcgacggctttttttttttttttttccttttcttaatgatgaaaatgaacgtgaaagagagatgaagcaaaggattttagatgcttttttcactgaaggtatgtatggaccaacaatcaacattgcagcatcataagaacaaaacaccaaatccacgcacatttctggggttcttttttttttttttttctttttttccctctcattttcttatttattcattgaattacttgcttaaagagaaggagaagaaacaaactgtctgggtaagctaaaaagatcttccccttcaaatggcgatgtccagtctcgagaacctgtggctgatgtttcagaacttgcaactccaccatcctgccgtcctgccatggaaacaccattcacattagaggaagccggtctcatcgcaggctgagaagctgccaacccagaagcattcggctcatagatgttgccattgctcatgtatgaggcaattgataacccattcggcctagttgagggcatatttcgatccagtgtccaatctatgttggtgtagtctaactgcagcattgagctactagtactccagtctactggagaagatgctcccgaagagccagctgaaccccacccagaaaaaagtccaagggaagaagccgcagctagagttggggaagtacctgatctgctactccacaaaccattccctctgctagttccaggagaatcccctggaccactgcctgtaacaagttgttgtagttgttgttgctggtgttgaaattgttgctgttgttgctgttgctgttgttgttgttgttgatactgatattggtacatctgacttgagctaagtatgttctggctgagacttccagtgctagtaggaatttgtggcaaaaatccactgggcctcgtaacttctacattactagtaggataccaactagcagctgtaccaggaagtgaagaactcatactagcttgaacttgcttcatattaagggactgaggacgctgcatcataattacaggttccctgactgcccctgtatgtaggttttttacatcatttccaacagttgcataacgggtttcagcttttgctggtaaagaagacacctgcaaggtgatgctatgtatatgatacagaaggatttgatgctgcatttggccaccttttatcagctggtaatgctggctgttgagattttgcccaatccaacttaggattgactctttttagaggttgcaaatgtttacccactggctctgacactgtaactgtttgcttggtgtagttaaaatctttttcatcttttctttgttgtaatgtttgtggaggaatagattttgcttgaagtcttaaattctgactaagtgcatgtgaaagcttgccattaatgatggttggaggatcaccagtttcttcaggcttaggtggtgcagaaggtgggtcttgctttgatactcttaagctctctgcagccttctcaagatcaccttcacaagcaacaatagctctttcaacctcctgtttggagcacttgtacctcgtctccatatctgcaatccgagcaagctcatctgatatgtcaattttcaaattactcccaccaaggttttgacccctgaacttgtcagcttcttcgccaccttcaaaaagccagttaactgattcttctactctaccttcattcagcattaaagccattgttgcgcgttcttgtgaaaatcccattgccacaagttgttgagccagtgcttcaagctttcttgacataagatagccactgcatcgctcatgcaattccagagctctcctctccttttgacgctgatgctttttctcattcttctgacgtattttttctcgtttgtcattgtcggctcctggtattatatcctgccgaccagaaagattagatgccttatctttgtgatcttctgattcaccagaccagctgccattgttggagacagaatcatactcaaatccagctacaacagagctgcctgaatgatcatctgactcatctatgtttcggaaacgaccatttgtctggagagatgtcacaggagatgttggtaacacctcaagggtgtgaaatgttcccaaaatcggattgtatgcacttgctgggatactactaccagaactagtaggtaccgaaggctttgtggaagccttctgagattccttgctggcctttttgtcttttgctttagatcttgatgccggagacatcttgaaaaacaatatgttcctgcagttaaaaacacggttttttattaaattagatcactatcaaatagaaattagaccaggggatgtactttattaaatcaacaacataccacctaatgcaaagttgaatatcattatcatgaaagaacaaaactacgtgtactagcatgaaaatggcttattaaaaaaagcaagggttaaacaagtaacttctgggtaggcataataaaataaaggacctattcttccaaataataaggaagaatgaaacaaaaaccaaataggattataacataaattatttgaagtaatagattatgcaatattgcagaagaaagcctcccctatatcaaggaaaaagaaaatggctgccccttgtacaaatataaatgcagacaaaaatccataggcacacggaatgcgttgagatcattcaaatatatttaggccagagtatgttctcatccttgaacccatataaaagcacttaaaatccttgtttgcgttctactaaccaaaataatgccaatgtatccgttaagtattgtaacagttatatgatgataccgacttagacctagatatgaacctcaacaacacaataagaactaacatcctggtttgtgttttaacaaggtacgcaagtgtgagcaagtaaaacaaggcaaagagtgcaatcagtaagaatactaaataaaaatttaaagaatgaatagaagggcattaaaagggatacaccaaaaaaaaaactggatccaaacagtaacaacaatcctggagcaataggacattgaccagtctcctactacccctgctcctccaactacaaagaaaaggtcacagaataccatttctgcgatctaaatggcaaataaaatacataacaaatagcaaaactcatacgtagcaataaaacccagctcaaaaatccatgtattcttctggctatgatgacattgacctagactagctataaaatttgtaaataagaatctttccaacaatatttttcagtctcaacaaagtacagcacaggttcacaggaaaattcagcttgctaacaacctttgattttgtacatgtatcagctcttccatttcaaagttgattcagcatataagatactggcatttgctccacaaagcaaaataaaacgaaaaaataacaaaagataataaatttgaaaccagcgttcaaagaccttcaagtaacttttccataaatagtggaaaacttgaagataaaaatgaaaatcaacacccaatcaaaaccttgaggccaaaaacacaacccatatgctatcagtctaaggttttcatgtccttaaatgaagagcgagacaagcacccattgcatacacaaccaactgcttattcgaaacagagatcaagctcttcccataaatacaactatagaactacagaacgtttccttttcacagaatcacgatttcgcagctttcttctatcaaatagactaatactgccaaagttcatttccagtgaaataatctgtcacattctcacagtccattccaatactgccacgaacaagctaaccactagtcatgcatcacatccaatttcgaaaacctcaaatccccacattcacagcgaatccttcaacaatcatctaacaaaacccacatcgtcgaaaagcgaagaactatgacagaagagctgcggatcacaggtcgaacactcagctcgaagatccaagaatcccattttcacagccacgaaagaccaattccccaaatgattcaattcaaatacaccgaacctatcccccaacccacccatttaaaaaaaaaaaacgcaaaccggccgaagcaattcgagttcgaatttgaaccctcaattgacggaagaacaagtaagattgacaatttcaccatatgacaaagccaccatgcaaatgtaagatatagagcaattcatccaaacataaaacgattttggcgatcagaaaaagagaggaagagagaaaccaacctgtaaatgcagaggtagagcagtgattagaggaagaatcgcagtgaaatgtgaatcgttggaagaaaggagagagaaagatgtatgttcgaggctgaaacggaatcggaacgatagaattagggttttgagaaagagaagaggagagagaaagacacataaaaaccaaaaattgtattaacggaaggttagtagattgcctcgtagacttgtttctcttttcttacactattattttcttaattttatattattatatgaattttgtccaaatttttttaaccgttacactttttcttttttcacctccttactacactattaccgaagttttagtcttattgtcataataatttaaaaggctacttattttacacccaaaataatataatttcaccctattttatttttaaaatatttatt

SEQ ID NO: 377995 - DNA, 2239 bp, Cannabis indica
aaaaaatgtacggtgtttgttgttattgttgaactgggtgccctttttaatagtctcgttttccacgtgccataataaaagtgggaaataatttaggaaagagagtagtagtagtggattatatttagccacttgccattgttgtttctagattttttccctcctaaatatattgccatcggtgataattcctctagtctttttgtgtcgtgtttggattcgtatttgtttacttatcatatacgcatacgaatgcgacttaaatgaattttgtatcgtgacaaattcgtaaaattttgtgtcgtgttggtaagttataagttaaattattatttttaatattattatgttgtgttcatgtcatgtagaatttttaaatttattttagatgattgacaagaatacaactcgttgtacaaaaaatttataaaatatgaacatagtttgcataatttttgtatcgtgtcgaatccatagaatctcgaatcctatttgtatcaaatttatgtgttatgacttgaattacaacccttaccttcacccttaccttcacgtattattattatgaataaatatgatatcactaataattaaccaataaaactcattagtttctaatcttagctaatggtaaagacgattagtttctcaactaagttaatgttgttacttttgccttgtatttagtttctctacaaataaataagctcatttttgtgagctaaattttttggttaattttctcagcattttctcttcgagttttcttcttcgatttcttagtctttactaattttaagttagttagttaaacttttacatggtatcaatcacctccaatagagttatagtaattctcacatttgatctttactcaaatgggaaaagcacctactacagactcgtctacgcaatcatctgactttacttcttttatatggaacccattctcaatcttcctattcccccctcacgatcaagttggattgtgttaatttcgttttttggaagtctcaagttgttccaacgataattggccatggtcttgatgaaatcttattcaatggtattcttccaactcaaagcttgattgatggtaccaacaattctgcacataagcaatggaagaaacgtgtgattagctccttcctagcttcaatcctccacgattgaagtagttcttgcctcgattactaatcatcacacttactttgttgtttggcatactttggaatagaagttctcaagtcaatctctggcaagattacttcaattgaaggccaattctcccatgatcaaaaagacaatttgtccgtctctgattatgtggataaagtccaatctcttgtcgattctctagccattggtggttttgctataagtaatcaaaatcttgttctttaactattaaatggcgtaggtggtgagtttgattctgtagtctttggcatcacattctgaagtaatttttttatctcttaagaaagttcaagctctactcatgtctcatgaaaatagattggaacatcataatgctatgaaagatgtatctctaaatttacaagccaatcttgcatttggcaacacctgctcgagtaaagaacactgattcatcttcaattcgttaagaaagaacactgaacctccactgacttatcgtcagtcatctgaaatttgaggtagcaactgacaacgtacttcttagttccagcctcctcaatgtcatatttttttttgaagtgcaagcgtctcagatttccttagcagttttggcagaattatattagtcatacaaattatcagataaaccgatgagaataaaatttttgcacaaaaattcattctcgacctagcttgctaaatcaacagtttgcttatgcttttcatcatccttagcagtatcacaaacaacaggtttatcattcgtcaaaacaaaaacaatcttttttcgtagtgaggtaaaaagacattttctgtctccatctttcaaaatgatttttctcaaaacaaaaaaaaattcatttatgtcaacaacactaaaatttttatcggtagtcatggaagaaatacaacgtcttaaaattgttgtaaatagttgctgtaaaaaaaaaaaagaaacgagtttaccgaattaaagtttgggttgagtcgagaattgtgttgctctctttaagacattcacgacattgttcaaaagtgtacaagcagattattaccctagagaatcgtcgaaatacca

SEQ ID NO: 377996 - DNA, 6358 bp, Cannabis indica
aaaaataaaaaatattataagagatgctctaaaaaagtaatttaataataacaccaaaaaactattttgagctagtttgatgaaggactccccttaattttgttgaggtcgaaatatagattgtaaaacaccatatcttatcatatcatggaccaaatcaaaccatcaatttctaaggaaaacaatggataagatcaaacttatattcatctatgcctatacacttgtatactaattaaaattaaatatagtctaaaaggaaggttatgattttgtgtctccaaatacaagcacataaaattataactacgaaataattatgttgaattgtgctatggctctaaatgggataattaatatagagtaattggaatgcatgatataaaaaaagtgcattaaatgcatgatactattaatggtttcaatagtagttggcctagaaaattatatgttgcagattgtaaaattttagcttctcaataattgggatgttcttttgtttggacctctagagattataatcatgtagcccattgtattgctaattaaatgggctctcaaatctaatgctacgggtattctgaagatagactctataccttccactagttttaataatcaatatacactttatttttatgtatgactaggcaattaagccactaaaactagtttagtggtgagggagagatgtgaaaaagagaaggatcatagttagaatccaaaatctttaagctattaagctattatttgactgtaaatactattacgctgaactcaaaaaaaaaaaaaactagacaattattatagtaattataataatttactaataagaaatgacaattaatagaaaggtaaaataattattttatttaaatttgtttatttagtttattaaaatggaagaacttattaaataagaaatgaaatactttcccctgtcaattttttaaggaatgctattaaagataataacttttatttattttttatttcattttttaatattaaatgtatactgtcaattttttaaggaatgctattaaagataataacttttatttattttttatttcattttttaatattaaatgtataatgataattttgttatgtgtttacaaaataattattagatactttagtttaactcaaaaggcaatttaattaatttagattactttttttttaataaagtaaacaagatagatcattattctatttctaaataattttagtaaacaacctactataaatattaattttaaataaattttatttattctattattttttcaattaatttattttaattttcagtattgtttagtaaacatgctactaatattttatagtagttataataatacacaaaaaaaaaaaaagaaaaaagaaaggcaatcaaaattgaaaagttattactgcctctctaatcgtatctttttattttcaaatcatataaaactctaatgtattattttttcaaaaaaactaatgtattgatgtaataatttcaattattattataacatatagtaaatgtaaacgtaagcacctttatcatatactcaattacttaaattttcaattattattattgtaattaaatataattaaaaaaaaattggttattatgataaaaaaaatataattaaaaaaaaaaagaaaaagaaaagaaagaagagtaaaacgacggcgtatgaatagaggtaaatataattaggaaagaagcaaggaaaaaggagtgagtctctggttttgggtttggtgcatggccatgattttggggcgaaactgctgattagctttagattagattggattggattagggttttcaaaattgaaatcgagagttccgttttcagatttcctgctaatcaattatcacagacaccatcaccattcaccaccaaaccaagatgtaatctcaaggaacgatcttgttttgttttgctttctagggtttcatttcaacacaatatcatgaagatgaagggactgttggatcgaaccaaagtggtccttcgccacttgcctccttccatttccaagaccgctctcctcgaccaagtcgactctgtctttgctggtcgctacaattggctctctttccgtccttccaacaacaggtcaatctccatattcatcttccaaatgtccttattgcttccatatccatatacattttagggtttctttttgacagcttaactattattctttttctctacgctcgtatcgttgatttcatcatttttttatcggatatttttgaagaaattaatccataaaagggaatctttagacaatgatttcttctgaaatgctgtatcattattattgatatgctgtattgtactcaatttctcaacactatttattgattgattgatttgacttttgcagccagaagcattcattttctagagcgtacattgacttcaaaaggccagaagatgttattgaatttgccgaattttttgagggacatgtgtttgttaatgagaagggtatttgcttatctgatagcttttgtttttgttctccatgcatagtttctgtgaagagattgagttctttttcatggtattacttttagttttatattaaggatgagggatcagtcaagccgccataagtaattttccttgttcttcttcaggattacagtttaaaactattgttgagtatgcaccttcacaacgtgttcccaaactatggtcgagaaaggatggacgtgaaggaactataaacgaaggtattgatttttttcttcttcattttattggttcttttaagtcaacttcagcttgtgaacttatatatttatatatgtgatcgttttctatttgtaagttgtattttctttatgaccatctagatcctgaatatctggactttcttgaacttcttgcaaagccttccgagaatcttcccagtgcggaaatacagttggagagaagagaagcggaaagagctggttagttattaagatatctaatattgaatcgagacatgctaatatgcttattgatttttggatcaggattgaattcatagcaaatctattaaatgtttgtatatatttttttcctttaccagttttaggtgttggaaaagacattcctataataacgccgctgatggactttgttcgtcaaaaaagagctgcaaagggtggatctcgggtattttattattgataaaaatgaagataaatgacgagagatttaatttctttctgtattacacatgcctgtgttttgaaatttgaatctatttatcacacagtgtgcgtattgatattagattattgaatggtcatatgttaataatgcaagttgaagtactcttatgtgtcatgacagaggccactgcctaatggaaaattaagccgaaaaaataccggatcatcagccagaagttctaattcagcattatcaaagcgaggatctgatagaagaaggaatgcaactactatggtatgtgtgcctttttttataatacaatcattgaatcatatagttaaacactagttaatgacgatcacgatgatgtgtgtaaaatagtcgtgtaatgtgggttatacattgttattcttttcataatctttcagagtgtattggcgcttctacttttaatgcatgaacgattcttttgtattactatctgcattggactttgttaaaactttgctttcttatatattttattttgagaggacagtatgttttgagagattctgcgaaaaatacaactatgaaagacaagtcaaaatatgttcttgcggctaagcgggagaatcagctgctctctgacaagtccactttgtcttctactgttggagctgaagtgtcagaggaaagtggtacgtcctagatgacattttgtattatctttttatggttaaccattgctgtgtttagcttcgtttctagaaataaagtcggtggacatttactgtaagatacgtatgatttatgatgagtcttgatatagacgactttctgttatgttataaataatgtggcgattagatgatttgtacaataatttaaatgatctatagtatgcattctttattttttcttagtgttcttttttctcttttgtttgattaatttctggagttaatgttgcagggaaaaagaaagttcttcttgtgaatggaaaagaaagggggatatctcatgtaatttctttttgttgcaccttatcgtctcattcttaagttaattagctgccttctgcacatctgcctgtgatttatgtaaatagtattatagaattacttttattcttagtactttttggtggtgaaggaggattgtcatcaatttcctgtacaatgcagattacttgttccctagttagttggttctcactttttggtggccatgtcaaagagatagcttcttagcgccctgtgttcctaattctgcaatattgaacctacacacctattaaattgttaaaataacttgaatttagcttcaactaaatcattattgattgtgcatttctcatgcagaaccagcgtcatgaaagcaatggaggaagggttatcaaaagcatacttcaaaacaagaatgcccttccaaatcgttcttctggagctcactgtgagctgcaaatgcaggctctaaatgtggaggacagacgccattctcgacctcaacaaggtcaattggttttgaaggatgctaatggtgcttcagactgtaagtttgttgggagtgacgtgcaaggcttttgtggtgaaaaacatgagaaacgaacaaggaataaggatagacctgatcgtggtgtatgggctcctcgtaataattctgaaggagcttctctaaatgctcagtccttgtcatcagcacaacctccacgggccttagattctatagaaggtattattaaattatctggtttcatttgcataccagattttataacccactttggtctatctagtgattaagaagatagtatgttttatcatgaatttaaatgtattcaccaacagtaatgaaacgaagcatatcattttgcaatagttgtgtagaccggagagtgccatagatagcttggtaacaagttaaacagattttcataagattatagatagcttggtctaaggaattcgcttttcattgttttttaggaggtcatgggaatatgaaagtggaaacaaccaatgtaaggagcaaagacatcaaaatccttcggagtggaagtggcagccattcggctttagataatggtaaagtttttgggtctcagtttctgattcttaagttttgtgtgttttgcctatggttgtctgtatgtagttgatgacatgtggagatgtaattagcttagcagttgtgaattaattatgtaggctttcacaaacatgttggccgtcgtggatcaacaaatagtgtaaaggacgattcaaagagagttggttcctctggttatggttcgcaggaggtgcataattagattactgtcaaaaatacaaatgttattatgtctgtacattttctctttgtactaatcaatggaatctctgtggtcaatgaaattgcagaaacaagtatgggttcagaagtctagtttgggttcttagtgtttttgacttggtaagtttttctccttttaagagcttccaaatatagagagtaccgcgtaagttacttacctgttttattaattttggtagtcagatgatgaggagttgtaaacaagtgagtttgaacatatgttaatctcaaatggagaggacaggagaatccaatccaatctgaattgattcagagttcagatgcgggggtttggtgtaattaaaagaatgcatggatgcagcgagcaagttgaggtggtatcggtgttaattggtgaaggacaaagaaaagaagtatagagaaagaaagaagaggcgggcaggcaagaaacaagactgcttgctggttttggataattcataagtatagtagtagtatttggagtagtagtagttgaggtgttttaaatgatgaatgttgttgctctacttttatatatacaaacaagaaagaaggggttggagttgggtgggtgtaaaggtgtaaatatataaaaaggaaagagcagtagaagactgacgaaatgcctccatccaatccatatttgcttggccacttttgggaatttctatagttagcaatatatctaatctatctatctgtctgtccttttttcttttccatatagtcgatgggtggtggagtggagtgaattttttgtatttgtattttggtgaaaggacattagtttgactttgtgctgtaacacctttgacctttatatatatatatatatatatatatgctagttag

SEQ ID NO: 377997 - DNA, 3097 bp, Cannabis indica
cttcaatactttcattgtcacacgggaacttcatgcacaagtgcctgatggaagtaattgctctgaaatcaactaggatagggtgccctaggatagcattgtaaacagttggacagtctactaccatgaacgtacaatgcttgaatgcagaggcgttagaacttctagctgcacttgcattcagagtgattgagagttggatatccccatcaaaagtagggaatctccattaaagccttgtagttgtattgggcatagcattacatcagctttggttaacccagtcgcttggaaagcaaatttgaatagtatgttgacggaactgccattttccaccaagactttgtataatcttttgtttgcaatatgggcctttataaccaatgggtcattgtgtggaaagtgcacatgcttggtatcctcatttgtaaaggtaatagaaaggttcatcattcgtggatgcttagctggagactaaactagggaacatactgctctcttatgatccaactcattgaaagatcttttatgtgcattttgggtgcttccaacgatgtttggctcactggagatagttgccacataaccatccacaggtcgcaagccattcctggcagatatgggttccctggccctggtgctagagcaactatgatagtatgtgcaggtggagaaggtaaagttggaggtcatattatgatagcttgaaggagatctaccccatgggaagatttatggttccctattgttcgagaatgacaagctattcgtgcactataccaatatcaccatggtactcacatttcttactcacgccccttcttcggtttcctctcagaacatcaagggggatttctatagtggaccatgttgcatgtggcctaatgaacattttcttgagtatcaaccaaactagtgtactcagtatacttggccttcatattggttcctttctttattttggagcttttgctttggttctggctcttctcacctctcttgctctaggaatgactcacatttgatttcagtattttcatttgttgcctagacaattcgagagcgatgctacatccaatttgtgtcgctctaaactcaaaaaaattcatctacataagcacattcccggaggcagtgggtccgtagacactaggtgttgtgtactaggttccaaaaagtatggttgttgggactgcaacttgtagagtataggttggtgttgtaaccagtggggtcaaaactagagtgcctctgaaagcttacacataagcatctttaagattgatgattccttgggctctggacatgaactcgaacattgtcttgaccctctttctttgcatttctctccacaagaaggagcctacagttagttcggattggagggccacaagcttcatatcatcgctgaaattagttttggctgcttcttccatcatccatgggatgaagttctttaagctttctcttggtcgttgcttaaggttggttaaggctctgacctccatgtcatagtctatggcagcaataagctatttccagaagatagactgtaactccttacaatcgtgatttgattcaggagataatcacttccatcaattcttagtagatttagataacgtcagcaagaaacaaaggcatttggaatcatcacttactctagccacttacatttaacgatcatacttggacaaatgggctctagggtccgtcctgccttaatatatttccatctatggtatcttcaagtattcaggtagtggatcttcaatgatccacctcacacatggtttcggatcttcatcttttgagtcagaaattgctccactctatgttcgtaccaattttatcaaagtagctatctattcttctagacattttatgtcactgtatggaagctcacatccatagatcttatcattgatttggttccataggtcatttccttgaggccacgctttttctcccttggatttttcacttttggaatctaggcatctatggaggtcaacagtggaccagttctctttaggagagatttttttcacctcgtcatcctgattaacataaccactagggcagtttttcaatcccctaatggtaggcctttgcacctgggcgacaggcctatcattttgcacaactctacctcacagagcagaagagcgtccaagctcggaggcatcggtggccttctttctgtgtagaggttggtcagtggtgttaatgttgtttctaggaggaactggggaaatttttcattgggctcatccaccttccccttttctttgtccttttcatgagtagaagttctagcgtcaacggggttcgccctttactccttttggacaggctcttctggaaaattgtcttcagaatcctcctttgtatctccgtgcttggcttgcagctgtgcaaatgttttctacatttacagtgaaaatgcctcttacactaccaacttttgttgggtttcagcaatatctatctttgtagtatccatccttgatttcaccactatcctcttctatttctccatcatctttgaggtcttcctcaagatgttattcatgatgttgggtattatcaccctgctagccgccaacctcagatgcttccctatcccctatagccctcggctaggcatgcccttgagggggtgggttagtgttgtccatgatgatgtactggcctggaggagtaggcttagcgatgacgattttcttggtagccaccatttttgcaagcacaagatagcttcaaatgtttattcagctctcattgaaagcatcaaatattaattgagatttttaaaaatgatttaaataagaggttaagaaattaaataagtaaatatagagtggagatgaggacttttacatggtttgggtatttattaaccctagtccacgagtcaatatattgtgtcgaatgactttgatatattacaatggaatattaccagttcaagaatcctagcatcttgctatattttctcacttaggttttaatagcttagagaagaagaaaacctaaaaagatgtgaagtgaatcgtctatccccctcgcatgaaggtataaagggatatttata

SEQ ID NO: 377998 - DNA, 4458 bp, Cannabis indica
gggtttgggttagacgagtccactgggttggaaatttttttagtccaaacgttcagacttatttgtaagcctatgaatgttacccttagtctaagagaaatttacatggtatactaacttttgctatttttttttacaatttttttacaaaaatactgacagacggtatttttttacttttttattatatttttttataagtttcatactgcagtatactgtgttaagttttcactagtgttctactagtgttttactagtgttctactactgttttgagttataatgctttgtgttttactggtgttttataaaaacacagtatttttaaaaaaattccgtgtgacagtatttttgtaaaagttaaccaaaattccagtatttttgtaagtttccctagtctaattccatgccactcaaatattttaaaataaaattattattagagaatctagactaaattaaaatacacggtctaaatatggtagaccataatgtatgatgtggtagaggagagaggagaaagaggtaaagaaaagatttcaaaaatagcatcggtgtcctctttatttttaattaaaaaatgaaaaattttaattggctaaaaaattaaaagtgtgttaagtgaggctaattggacacctatttttgttaaccccattagagatgccctaatagttttagttaggggtgtgcataaatccatctaatctaatgaaaatcgaatgatctaattacaattgatcactaaatattggatgtccaataatgattggatcagattggatattatctttgaatatctaattggatcagatcggacattggttgtgtggtttaaaatccaatacatctaacatcaaatcgaacatattaatatattcatttagtttggatgagtaattatattttatgttgttacatgtaatagaatatatgaatattaacattaacattaacattaacatattaaattttactttttattttttgaatggatagatccaatctaatccaatatataccggaccttaaatattgattggatctgattcgatctaaaaaatattaagtctaaaatattggataaattaaaacaatagatataaatgaaatacatccagtgaaaaaaccgatccaatctaacatccaatggatgttggatcaattagataactgaaattaattcgatcagatcagatggtaaaatttaaaaatccaatatataattgaaacaaatctggatagacctacaaatattagatgtggtctaataaatacccttagtcttagtgtgtggttttttcttaaagagcgttgctataatggtagctttctttaaatttacataaaatcttcacatcatctaaaaatataatattttagtctatttctcttccacattagttttagcaaactcacttctaaaagtaatctcataattaacactctacaaatttactatcatgtttcacacttattatttaatatattatttattttgactttattaaaagaaaaggaaaacatgagtatgacatcattgccaagttttagcatcaatattactttttagtttgatatccaaacatctctaatgattagctttttttttttttgaaaaatgaaatgaaacaaacacactataaggaggccttatttgcttgaaaaacagaataggcacctggaggtaaataatctccatcccataaaagagaagccttaatctttaaggcatacttagctaaataatgggctaacttattacaatttctaaaaacataaaatagccccaaacacctactcgactcgaaccctttttttaatatccatcatgagaaattccatatcactactataagaagaacttgagttgatacccttgactgcattgaggcaattcgaatggatgaaattttttttgagctgaagcaggttagttgagtgaatggcttcctcaattgccctaagttcggccaccaacgggttcatgggaaaagaccattggcgagtaaaagacgagatacaccttccctgatggtcacgaatgacccctccaatgatgctctattttttcttgacctctatcgtcgcatcaacgttgatgactatcctacctatttcaatgggaagccagtgggtagttgcttggtgattctccccttttgctctatcttgccattgcctatgataatcctcaagaatatttgtaacaatgtcaataacatctccacactttggggaaaagttattatggtgcgaaaaatttctgttgtacggaagttgccaagatatcatcacaaaaagatcaaaatttgaggcagaaacattatgttttaaattccaaaggaagctaggcagaccacaattcatccatttctttatatatttgtaaagaccacttctcttccaaatctctttgaatgtcttgcactcctaaagggcgtggctaattgtctcatccctctcttggttcttatagcgctcgcatcttttatcaatgttcacacctctaaaaaagaatattgttagttgggagccaagaatggctcactttccgtaaaaaatgtttgactttgggaggaattttcattttccatagatagctccaccaactttccgtgctttccgtattaaattttctacatagattctctcattaagcgccgaggtgtacccactgtgaacactatactcccccagtgttgttgtagtgccagataagtttatcttcctcttcaagagaaccattgaggatccctagaataatagtactgaattctcctccacaaaaacaacacgaataaaggtctcgtcccactcccattcctttgtataaggtcgaccactttaatatccaagggaatttcagtttcaagaggggtttgaaacgcactagtctaggtaaccagcgatcatgcacagcatctatattctccaccgaccctacacgccatctagagcccagttccacaacttattttccccaaagcagccccatccacacagttgaagttgaagaacctttttttagcttttaggatagttgaattcgggaactagctttttttaagaactttactaccaatgagtttggatttcttagaaccctcgacacttgtatactaagaagagctttgttgaagaactctaaatctctgaaacccaaaccccctttattttttggattacacagcttaggccaagctccccagtggattttatttttcttatttgaagaatcccacgaaaatctcgatagcatcccgtgaagctcatggactatctttttaggtaggcgaaaaccccccatcatgttataagggatggcttgaatcactgattttagcaaaatttctttacccgcaacagagaataggcttcttttccacactctaagtctgttccacacccttttcttgatggtcttgaaaagctcagttgttttccttcccacaaaaatgggtaaacctaagtatttttcgtaatactcaacacccttgaccccgaacatatccacacactctttttttgttgcttccccacttgtctccccaaaacacatttttgatttgacaaaattaatcgtttgcctagaagccctttcataatcagtgagaatttgtttgatccgactgcattcttctttattagcttctaccaaaatcaaactgtcatttgcaaaaaaaaagtgagaaacagagatacgatcccgaccaaaatttagaccgtgtatcaactccttctcttcagcatcaatgatcatactggacagcgcctcaacacaaaatagaaaaaagaaaaggggagagcaaatctccttgacgcagccccctttgcggccgaaaacttctagtagggaccccattaataagcactgagaaggacaccaaagacacacagttatggatcttcagaacctgattcccatcaaatcccatctttattataaccgcctctacaaacttctattccacacgatcgtaggcctttgacatatctagcttgaaagctactttggaactatttatgaatctgttgcgcttcatacaatggataccctcaaaccccacaattgcgttatcctgaatcaaacgatcctcaacaaaggtgctttggaactctaaaataacttcattaagacatgtttttaagtggttggccaagcattttgaaatcaccttatacaccacattgcaaaggttaatcgaacgaaactattggaaaatcgttgtgctccaatagaaatatcaaaccaacaagatttcaactcaatgacaaataatacaaaggacaaaaatatagattaaataatgttacacatgaatcacaatatatatatattatatataaaagagatgtgagagtaatctcaacaccacatacaccacaagtgtataataggggaatcacaaaacttgaacaagatcttacacctttgtccaaaagcttatttcc

SEQ ID NO: 377999 - DNA, 5288 bp, Cannabis indica
agagagagagagagaaagaaagaaagatatgttaactgattggagtacaaatagtacaaatgaaagtacagtaaatatgcaatttgatttccatcaagatctatggaaagaatatacaatagtaccaaaaatcaataataagtttctaagaaatatgcactaagttagacctcaccagagtagaggatattctattctaataggaaaaatacaaaacattgaagttaagatcaaggtaccaggtaatatagcttagatttggatagttcacctcagatcattagaggcttcagtaaggcttttggttaaactttcaacttctttaaggagaccgctatctcgcacctcagctagtaaaggttgaatatcttcagccatggcttggatctgaaatatcactacatcaaagccaaatatatgtacatgagagcgtgcacacatggtacaacagaaatgcctagaaaaagtcctctgtcaccaactagattcgacttgattaaatgttcatcttgataactacttccacttctccatttcaacaaataataaaatttaatgaggcaatcaattacttcttctcacaaacacagacatatgaaggcaagcatgtttgcacatacaagaagtattcgtttgtttaatgttaaaagtttgtgtagtaaattgagcaaaaggaaatgctttaagtgtgttagtgtagctaattactaaacatgagaagggcattcaaactgcagtagtttccgtaaagacctatgaagaaaagaaaaaaaagttgggggttggggggtggcaagcatttcaaaatttgtctcattttctatcattttaaaactaattatgaagtgctcactaacaatttacatttaagaacatgcacaaccaagaagaaacagataaataacaattatacagaataacatcagaagagcacatcacacctctgtaagcagaggccttgcttcttcaataacagaagaaactcgttgagccagtgaataagtgttggcaataccaatttcctccacatcacgtccaagccgtgtaaatatccctaccaaagcatccaaacttactccttgttgccccttcaccttttccttatcacacacaattagaccttctttggcacagtctggatcaagaggtccaactaacgcatttggaattggatctcgaggtgttatgtcaattattgtttccataagtagacctgactggtttacctcaatcagtgaatttcgaggtatgattatcttatcatctttaacctacaaaaagcaatgttgatcacaattttattactttattttcaacttagaagaaccacaaaacaaaattagactttaaataataggaaaaaaaacatgattaatataaaacacacctcaacaaccgcctcaatacttctcaaagaaggattgactccaacaacattaccaacagtcacccctctaatccttacaggtgttccattcgatataccacaagcttgactaaattcaaacacagccatgtacttcctgaatctataccgcatttgaaaacccctcaaccaagctatactgagagcaagaataacagcaccagaaaccaaaaacaaccccaccccaccttcccaaatgctcctatgaccgaaaccaaaatcacttagtggccgtagagtccgcttccaaatagcctgtggaacattcaatacggctgcaagcgggttctttttctcggaagatggtacttggtcatgtccagtttcagaggaagtagcactaatctgagtcatttttcttttggatctaaacggaaggtaaggcaaatgatttgaagagcgatatgagacggatcccaacgacgaaaataacacagtagggcatgtagatgcctgagccattggatttccaaccattttcttaaactacccaaatcagcaagagattaaaaataatcctcaggcagctgcacagattcaaatgtccttccaaacaagtttagcattaggcttcagcagcagtatgagcatcaagcaatccaattcatcattaatccctaaataccaaaataaatattaacaatatatatacacacacataacaacttgatttctacagcatggcaagattttataggtgaacttatacaataacataaataaaaatgaaacgattgacgagggtttctggttccacaacccatgttcgcaatggaaagaattgtggtgttgaagtaaaactcttatacgctaagaatcaatccaacgagttagaaaaggaaaaaataagtcttagcaaggtatacctgcaaggtttcgaagaaagacgagaattttatggttgtaagtgagaaatgcaaggcgaagagataaccaatttgatgataatactgaaacaaggtcagccttcgacccagatggagttcacaacttcacactgaacagtggagagagaaaatgaaagagggaggaatgaaaggtaaaggcaaaggtcatggggccaatacagaccgcattgggccttctgcaagtttaggccattactttgcgacaatgctcattattttagacaatgaaaatgtaacgacaacttttgcaagaatattataagaaaatcacaatttacataaaatgatttattaccaattcttgtaggagaaaaatgccctctaatcatcaatagatcttgtcagcatcctcattttcagcccaaatcaactcaaaggtgtcatttggttggatataataatttctttctatttatttgcattttaaaatattaaaatatcgttttaatatataatgactttttcactatttaagtggaataatttaataatttatttgtacattttaaattttattctattcctatccttattctaataactattttcattgatattcatatgtttttattcttcctaatcaaaagcaacataaatgttgtccatatttctttacgatggttaaataccttattgtatcattttagaccccaaaaattgattatcgatgcatataataaatcacatagggctcgtttggaatgccgtattaggtcgtattgtattgtattgtattatattgaattggattatacattatatttttatataatactatgtcaaactttaagttatactaaaatattatatatttaggtgcccataaaagttaataccacatatagttttacataaaaatattgcataaaatacaatttaatataatacgacctgatacggcgttccaaacaagcccataatttcaattagtgaatatggtaagtatttgcaccatatgtctatatgggacagaaaagtgatcatctactgtttttctcttatgcccaaaccttttcatttttttacccccttccttatccattctttccgctctaaacctttgcttctgtgctctctaccctgccttatcctttcctactatctcccttgttttccttgtcttcttctagtcctttcctttgtgtcttcctttgttcagccttctatcctcccttatcccttcattttgtctctatatttcttcacgtgatatcgtgccctttatcatgttctttatcgagttattgttgatcaagttgttaatggaggtggtaggaatggcaatttgggccattttcacgggccgagttgggcccccagcccgacggggcgactttggcactattatctcgagtttttatcgagctctaggcctggcccggcccgacacatattacttcgggttgggctcaacccgacccgatttcagatattaaaaagaaaaaacctaaatccctaaaaaattcattcccgatttcttcagtttgaaacttcgactcctttatgtttactcccgttttctctctcactctgacgacggctgactccgatctctgacggcgactgacttccatctctaacgacggctgacagacacgacgacgtcctctgacttacttacccatgtaacaactataacaatgactttctggattttttcatatgttgtgttttgatattttgccatgtatgttccttgtaggatttcttagtcgtaggaatcttatttttgttccaactgtctaaatattcagaaaattatgaaataccccaaaataaagtatagaaaccttcatctctttgatacacctataaaataaaatcacacacctcaaattagctcaaaaataaatgcactatttgcaaggaatttataaatggatatgtaataaattgtgtttagatatttccaaaactgaccacctcaaaatagaacagatatataaatatgaatttcaatgatcttgggtcagggtgtgtaagatggtcaaacacctaaaatcctatcatcttctaagttatattttagttcattactatatagccagtatcataattaaacgacaccctagtagagatagattatggtacattctttcattaatcatttttttatgtatttatttacagtcttgctttttcactccaattacagaaaaatataaatcatggatcacaagtcatggctttggcttcctaaaagggactaactttctcaaacttaagtaaccttcctacaatttcttggtaagtacttgttatgataaaatcagttgagttcattaagatcatatcagttatgaactgacatgaaaaatggtacttgaaattcaatatttataggctttggcactttgcaagtgtttgaaaagaatcgaagttaagtgggaatttcaatctcgattcctcagaggtatattattctataattgttatattatccataccgaaataggttttgagactttgcatgttgtggtgataatggaaggttgataacttgcctattttagtgaagtaagatctgtgaaatttgtgtgctgcggtgatataaggatgaaaacttgtgctatatgattgtttgcagttgaaattgacagatggttaggttaataacatagggaaaatgttgtctgatttttcgtagatatgtttatcatattttctaagcaatcgcatgcattaattgatatatatatatatcagaatatgatgttaatgtaggctaaaatagaatgtctggtcaaatcgattctaattttgaggatgatgttgattttgtgccatcaactgcaactgaagtacaatctattagtaatgcaatagatgaaaatcagactatagggacacggaaaaaaaagaacctctcgtgcatgggatcattttacacgataaaatattgatggaaaaattaaagcagtttgcaattactgcgagcgtaagctggtgggaga

SEQ ID NO: 378000 - DNA, 2044 bp, Cannabis indica
tatatttatcatccttaatagtcaagtgaagttccattatttactttttttttttttaaaaaaagtccaattattatttgttttaaattgattaaaaatagatacagacaagagaagtttttttttttttttaaaaaaaagaagaaaaaaaagaatcatccttaaccacaattacaatgctaaaaaccaaacaaaagtaccactctactatctcagcaagcctcctctctccaccatggactactacgcatacgccccttccacatcctttccgggtaccaacaccatcataatcggaccgccgccgcccttcccggcgccaccgcgctccgtcgatctctcagccctcgaattcatcttaggcattcttgccgtgatctccatcccagccttgatctacaccttcttttttgccatcaaatgccctcaggacccctttcgtccacgtcgtcagatctcgagtggcagaacgagtagcgccgccgcgagcgacacgacggaggcggagaaaccatcagactcggacgtggtgaagtacaagaaagtaagagacgggaagcagatgggcgaggagtgccccgtttgtttgatgggtttcggcgaaggagaagatgtgaaggcgttgagcgagtgcaagcacgcgtttcacagtgactgtataaatccatggctggaatctaactccaattgtcctgtttgtcgagccgtcataaccgtcgtgaagagctcttcagatggtaacaatagtagtagtaatagtaatagtaatagtaatagcaatagcagagtggttaggtcttctggtagagatgatgatagacatcaaggtttgcctgatgcttccaatttggtttgatagtattttggtagggatatacacacacaaactttactattttattttcccttataatattatcatctcattatggtggctgtttatttttcttttttttttccggagggttttagaatagaggttgaatatgcattattagacgtttataactttttttattatttaattttggggtaataatagaatgatatgtcgagcatttttaaaattggtggaagagagaatggggacgtttggcatttaattaattgcatatattcatttattacctataaataatgtatatacaagtttatggtcattataataacttaataaagaatagagaattcaaaattcaagtttgaagactttggaaaacaaaacatatataggaggaacaataagggaatagattagcatgtagatgatgtttaacaactttctcaccaaacacagcctacctatagtcaatatatgtgaagttgaattatatggatagatgtttccgggaaattactggggtgtatgtgtgtagggcactttctgagcaagtacaatactactcgcgatcggcgatccaacaacttccaaagaagaaaaagaaagataaaaattattatgcttatataagaagcatcattgtggccaccaaagtacctagcacctatgagatattatttttatcatttttttataatttttattaaaagaaataaatgagatcgaatattcaattacactaataaccatactacccctttacaaaaatactagataagatatcataagcatcgtttagcatatttaagcgatggacagaccccatatcatataaatgcatacatattcagtacttgtctttttcttattaatattgtttgtttacgcggttataactgtacgtactgtctcaatcatgaatatgggtccatcttcaactcatacacatatacagctaacttaattataattccatggccaacctagatcataaggatcggtatatatagtatagtagttgctacaaccaaaccacattaggtgctttgtgctggttctaatgagccaacattcattagatttctacaatatgcttcctatgtttacgagaagactcaaatggttatgggtggttttgtgacttaaaataatgtggaaacacattttatatattttgaatttaataaaagtatacagggtgga

SEQ ID NO: 378001 - DNA, 6696 bp, Cannabis indica
tataaacgaggcacaagaatgacttgaaaaataatacataagccaaaatatgaatataagacctaactatttatatgatcaatcaaaaaatatacaaaatagttcttgaagtgaattattcaaagtatttttaagtttactctaaaaaaaatatataatgatgttatatacagtagattaaaactattcatacaatgtttgatagattataaattacacgtggataacaaggcagactaaaactactcgtataaaataaagtagatgaatacagctccagaatcagaactacacgcagattataactgttcgtgcacatacatagtagactaataactacttaagcacattcaaggtaaaaaatagaaacaatggaaatatttccaagagtatcaataagttgaataagatataaatgtttaaaatggtgaaacaagatgcaatgaacagatatattaaattcaaaaataagatacgaggcattaaaagtaaagataaatgcataacaagcatagttggccatgtaacaatgcaaaattctttacaaggaataatgccactaggggcaattattgtctcggccaaagggccacttttaaataaataaaaaaaaacataataaaaagactaagcctacatagtaggagacttagttggctcttcttcttcttctccttcttcttctttttctacatctttagcctcctcttttttggtcttcacgcagtatgctagcatgtcttctacccctttgcccagaaagttgaaatccatctttggattggctaaccaagcttgatagatagacaaccaggaaatcttcctgacattatttttggtgtcaactttagcctcttcaagctttctttcagctttagcttggatagtctttttttcctcctcgagttcttggatcttcttgaggcaccttcaaaattgatcttaacagtccttttgttgctcttcagcttcctttttaacccgagagagctcatactgcgagtcattccattgcttagccatggcttcgcaatgctccgttgtaacaccctaattattaggaacgctacccaagatgattaagaaacctaatcccctagacgggattactaataaaataagcacagaaattaaactttaaatgcaaatggaatgaaagtaaactcttaacaattttaacgttacaaacaaacaaaagttacatgtctcgggatcccaaaaacaatttacaaaatattacaagtttgattccaatagccgacctaagcagcaaaatagagtttcaaaaatcatcactggtagaccccaactcgcttggtctagtgtggcccgaacatgtacatacaccgtccagctcccatactcatggttgatcagaaacttatttacactttcctgcacagtagagaacccgtgagccaagcccagcaagacaatataatatatcaataattataattaactcatcacaagtaataacgccttttcatatttgtctgtatgacacagacctgcgtattacgctcacacacttatttatgtctatgtggaatagactcacgtgttagctcacacgtctaattacaataaggccttagaatggttcatctcggttcaagttatcgagtccaacctggttatgccgtgaacacataaccctaaatcttaacctactcacataattaacatggcgtagcatatacacatcatatatcactagggtaataatcataggttgttaaaccgctcatgctagggtaataaccctaatcccagttactaattgctcacatatatcaattccagtacaagcaccactgcgcatactctacgttctaactactgtcttacatgatgtctcacaaacgtagagattccaaatccctgggtgctcctgaccaagtgccggtaatcctagtcacaaattctgaaatttacacatatagggttaatccctgattccacatttataaaatatatacttggcattcaaaatacaaatattcacaaaaagctcaaaacaagctttccaacagtatgtagaactcccaaatcgaagtctagatcacaaagttaggactattcgaagtatgcattcgaatctgccgagaaacaaaagggcaggccgcgacgcccaaaaagctgggccgcggcccctgggttccaaacccagaaaaacgagctacaacttcgaatttcagccccaaaatcacatccaaatcaacccaaatcttaaccaaaacttaaaaccatcaaatagatttttaaccattctatagacagtttgaaacaccatttcaagcattaaaaatccaacaataatgacccccaaaattcagattacaacaataattactcaaacacaatttcatgctccattctttaacattacccaacaaaaactcacattcaagaactagaactctcaagatagcttcaaacataactttccagcaattaaacattaagtaactcgcaaatttattcatggaaaccaccctaaaatcatatctagagctcaacaaacacaaccaaatacaaagccaaacaatttacacccaacctctttaagatcaactgaagctctaaccacatgcatcaagaacaactcaacactttcttcatgcttcaataaacaataaatacagcaacaatttcaaataaagtgagcaagagaactaccttaaacaaagcaagagtcaagcttcaattcctcacaattcacaagcaattcttcacacacaatcaagaattgaaatatatgagtttgagagagagggggggtttggatttgaggggaaagaaagtagaaaatacaatcttattttccttaaagttcttttcttttattgaagataattcaaaggtcaaaataaccaagttgcccctagggccaaaaagcttacacatacacaatcaagggaatgaaaatcattccatacacaaacaaactcaaataatttttagattcatcacacataataaaattccaatcatttatcccagaattgtttttcagccccaaacccggttctactcgaaatacccagttgtgactataccgcgccaacctgtcagaacacgcttgaaatatgacacaacatgtataccataaaataatatagttctaaagcacgtaaataaattaaattcatggttttacacatctcgggtcaaaattactaaaatgcccctggctcactaacggggtcttaacaagtcacatctcatattaattcacatatgttaaattgtacaataatataatttgtaacaccctaactaattaggcatgttagcgtcatttttaaacgtactgtgcagctcgttgctaatcaatgaaattaacgaaaaatgtgattaatttaaattttgcttatttagattttccctatttttttctctctagcagttgaagctggcgccatggccaaaactaggtcgaaacaacaaggaaaatcgaaggcttctgtgtcaaaaccaaggaagaaggaccctaattctgtatcagatgtgattcgcactaagaagatgtatgctgtattaggaattgctcccctggagctttctgaagaagacgaggaacgagaggaagtgatggctgactccaagcgttcgaatgagcttcaggatttgttccaatctcctttatctcctactgcatcactgaatgagatcaagagagcggaggaggctcgagcagattttctacagttcgtgcacgcaaataaccaatgtaacggcaacttggttcagcataagtcctcgatcccccctgtgcttagatctggaattattgttaataatctagaacattcatttaatcgatctgagaggcctaatagggtcaaaatcaattttaaagatattgaagaagagattagcttttggagtccttccattgtgtgttatgtcttagggtctaatccccctttgcacattttggagggatttgcaaagagaatatgggcagataaggttgataaggttaaaattcttgcttatggtattttccttattcggtttaattctatggagattagggaccaagtgttgaatggaggttgtatcttctttaacaaacgcccaatgatcatgaaaccgtggtatcctaacacaaatttcaagaaagaggatgttaaataggtacctatttgggtgcaacttgaagaccttgagctcaaatactggggccagaaatcccttttcaagattgttggtcaagttggtaatccgattatggtagatagtgtgacaaaggagaggaaaagactgaactatccaagggttctaatcgaagttcagatgaatcaagagctcccgaatatgctggaatttgaggatgagtttggattgaattgtcaggtagggattcattatgaatggaaacctattacttgtttcaattgctagggattaggccataaaaccgaggattgcaggaaggttaataaaggaaaataggaatgggtcattaaagaagatcataggaaaaatcaacctgttatagatgctgattgtttttcaggcagtgagcaaaggaaaaagagttcaagatcatgtacagaccttgactacaaaggttgagaatggattccaggcattggctgagaatgatgacttggaaaatgcagaatttgagcttgatgcaacaggttttgaggctaatgcagcaggttatgtaaaggacaacacaagaggggaggagttccctctcttggtcatcgatagaatcatattatggaatgttcgaggagccaataattagcagaaacaacagttaatcaagcaatttattaactgtcaaaatgctggttttgttggtcttctcgaaactagggtcaaggttcataagcttggagccttgtacctaaatgtgtttaagggttggtgtttctcatcgaatatatcttggcaccaagggcgtaagatagtgattgcgtggaatcctaccaaatttgttgttgatattctcaaatgcactagtcaactaatgcatgtgaggctttctgtagctgatggtagtttcaagagctatttgacagtggtttatggggctaatgataatgagggaagaaagctcttatgggctaatctttgtagtttggtaactaaagaaaattggcttgtaatgggtgattttaatgccattttagccaaagaagaaagagtgggacatagagtttgctatcaacctgatacagactttatacaatgtgttcaacaatgccaacttgaagatgttaaagcaacaggttgctactttacatggtctaataaacagcaaggaagagacagaatatgctcaaagattgatcgaattttagccaatcaaggatggctggaccaatacccaaatgctgaggcaatgttcctaaatgaagggaactttgatcacactccagtcattctatctttacatcccaggtggagaagtgggaaaaaaccttttaaatattttaggatttggtcttctcatcctaattattttaataaggtttcgaaggtttggcacaaggaaaagagagggaccatgatgtaccaattgataagcaagttaaaggagttaaaggctacatttaaagagatcaacagagaagggttctccgatgttcaggcctcgtttgaacaagcaaaagctggtctcaatgaattgcaagataagctccaacatgaccctttgaatgttgatttacatgaaccagagttaaatgctcgagagacgtataatgctgcttttaagaattacttctcttttctccagcagaaagccaaggcggcttggattcaaaaaggggacaacaactcaactctctttcatgcaagcatcaagcagaggcagaggcaaaaccaaatcttatctattgttagagaagatggggtgtgtgttactgagcctaatcaaatcactgaggttttcatcacctattacaagtctttacttgggtctcaaatgactaataggacaagaatttctaagagggtgatccttgaaggaccagtgctagattccacacaagcagctttactagtcaacaagttaactaaggaagaagtcaagaaggcattatttgagatacctggtgataaagctcctgggtcagacggctattctagtttctttttccaagacaactgggaccttgtgggagatgatgtttacaaagcagttacttctttccttgaatcagggaagatcctcaaggagatcaattctactatactgacaatggtacctaaagtcaaatgcccttcttctgctaaggattttaggccaattgcttgttgcaatgtaatttacaatgttgcaacaaagcttttgtgctctagaatgaaacttattcttcctagtttgatttctcaaaaccaaggagggttcatccaagggaaattcattggccacaacataataatttgtcaggatttggtgaagcagtattgtaggaagactaaaaaggctaattgcttgatcaagctggatttaaaaaaagcctatgataccataaagtgggattttgtggaagagatgttgaaggcactaaaatttccacagtctttcattaatttgattatgaattgtgtgagaaccccaagattttccatagtgttcaatggctcagtacatggcttcttcgaatcgtagaggggcttgaggcaaggtgatcccatgtctcctctcctctttgtcattggaat

SEQ ID NO: 378002 - DNA, 3679 bp, Cannabis indica
tttcatctttcaaaattttctttttttgtctaatatattcttttcacattttctcttacataaactggtccgggattgggatctgggtctaagtttgagttcagtgcttgagttcgtagtccgaggtttggggctggggtttgggtttgggtccaggttcgagggctagggttggggtttggaatcgggtttagggtctaggtctgtgtttgggtctaggtccaggtttgggtctaggtccaggtttggtcgaggcccaagattgggaccaaggtcgaggtttggggtccaaatttggttgggtccagggttcgagggtcaaggtcgaggttggatttggatctggggctaggtccgaggtttgaggtttggggttcaggtccaaggttcggggctaggtttggagtggtcgaggtctgaggtgagtctagggtctggggtttggggtgcagggtttgggtctggctccaagcccaacttctggagtctgtgtcaaggttagggtagggttggattcatatcgaggtctgaaatattgagttcttttttttagtaaaaagatttaaggatatttttagaaaatatttaccaaacacgttttgcatttgaaaactacaaaaattattttatattctcattttggaaaacagaaaataaagccaaacatccctaaattcttttctctttctttatttgtattgcatttacctaggtcaggtctccttttataatcaaaaccaaactagtgttttccaacctactgccttcccactaacgccagtgttgatgttttatgccttaaatctaacatattatatgtaacattataatttatcaatcaaagaaatcgaaagctttcttgacttagtcaaatacttggttcaaatttttgttttatgtttaatacttaaattctattaaattcagaagttatagttatttataattatagtgtcgtcatcatagtagaaaataattataattatatgtttcaaatattttaagttctatgactttatcagtgcagtggatttatactaacgtgataatcaataataaaatgtgttcacacttttggtaagcagtatatcttttccaagatattaagaaaaataaacctgtaattggatgtatagggttacatcgcgataggattgatattgaaaaatttaacatttctcataatcttaccgttacaactattctaagaaaaaatcacttagtttatcatagatcaattaaatttgaatcctgagatgattaagatttaagctaattatgatattttgtgttgtttgatttgttcgttacaagattaccttacgaactagccaatacttacattttggaaacttggtaatacaattgagtgagagtgttagtcatagatataaaaatctattgcttctatttttgtagaaataaaatgataattttatttgagcttattaatggataaatgataaagagttcatttcaataattataattagtttactaaaatatcatcatttatatatattttttttttttttatccaaaaaatatcatttatatatattaagggttctaaggataaaacatattgaaaggataaagcaataattttagttcttgctcagtgtaaaccatctatagatgatcattaattattttgatagaaacaatgtataacttataacgtatctatactatatatatagagcgtttcatgaaattatgagtgcaattttgagtctatagtagaatcatgagaaattaataagttagaaaatttatttataaaattttagatatatcttatttggagtctaaattttatgagctcatggttcccgcagtaatcaagataaatacaaagtagtaagcctcaataattaattcattattaatcaattgggatttacattattgagtttttcaattttgagaatttttacacttatgaaaataaagatgaagaagaagagaaataaataataaggtatttattagtcatgaaattttttgtcaagataatgaaaatatttaaattatgttttatttaataatttagtgattattaaattaaaactagtatttaaatgcaagagataaattagttatcttaaaaataaaaataaaacactttaagtccaatgaactttgaacaagtgaatagcaaaatccacatgtgaatttcggctatggtgtgcttggagatcaagcaactgtctattttattttttaagttatttatttaattaattgcgaggaatcaaacttactttcttattattgtattacactttggctgtaaaagagcttttccaaccctagcctccactctccttctcttcttcactttagaaatttttgaattgtgtattgagggaataacccatactataaaaaaaaatttgtgtttgttataaattgaagattcgaatttagtatttggtgatactctactacataaaagaattaatggttaaagtactgaatagaagaagacataatttcgcagcaataattctaaaagtattctagatctctgtttgttgttttgcatgttataagaaataatcatttacgttaaatatttgttacatagaaaatataagatcgtggtttattaattctaatagccacactaaggtttcatgaaggtcaagtttaacgtcatctccattaaagatgagacaatttatggcgtttcgctacgctatttttagtggagtgcctgaagcagttaattgggacaagatttctaatttcagttaaatgatctttgaactgcgtatctaaattttctccacccctatcagatcgtaagatttttaacgttttatctaactggttttgagtcattgctaaaaattcctataactttgaaaaatttctaatttcccatgcattaggtaaagacatgaatatctagagtaatcatcaatgaaagtgagaatgtactcaaaactacccaggctttaacattaaagggtccacaaatatttgaatgtaccattttcaatggttctttcgccttttctcccttagcggagaatggtcgcttggtcaatttgccttctagacaagattgacagacaggtagctcaccaagagtgagttcccttaagggtccatccttagcaagtctattaattctatcgaagcctatataacttaatcttaaatgccatagatatgtcatgttgttatgatgaaccttttgatgtttctcggttataggtttaacttccttgaataattcgttattggatggaaataattcatttgatcactaaacctataccctattttccatacatgttatatataattgtaatctatttaatgaatatatattaaaacttgtaaaagttaatacatattgtttcaattacagcaaagatgcaaaaattaaatttctactaaaatttaaaatttaaaatacattctctataaaaatttattattctcaaaataaaagcggacttttccaattgctttaactagaataaactcttcatttccaatttttagctttaatttttcatcttcaatgtcctcccaacatttaagatgttgtaaagaagtatatacatggttggtagatctataatagggtcggcccaaatattgggcagattgggccattacacaagacacctatttttttaaggccaattttttttttttt

SEQ ID NO: 378003 - DNA, 2205 bp, Cannabis indica
catgatcccgaatatgggattgccatgcacgaactatccaagggttcccaattccttggacattccaacttaggagtttcattgtgctcggcggccttgcgtagcaaggctcgctgcttcaatttcagtatcatgagataagaaatcagttaccttagaaatactcacctctatcgtagccatattcttttcgtgtgccgcagtgttgttctccgtagctgctccaaaaataaacggtccttcctgggaacagccagcagccgaagaacccacttctcgccccaccaattgctccattgacatattacccattcccacattctgtctattaacatttcgtgcccgagtcttgatagagattttcttcctatggccatgaagaactcccttctttcctttcttatcgtctaaaggaacagaactcacaataaaaacctctttctcaatcggtgagcttagttggcaaccaagaattcccttacctttattcttcttcccattctccacatcatcagcactcaccacaaacccaactgccccttttcgttttttctgacctccctcaccctcatcctcgacaataatgtccctgccccttttcctattcgtattttgaaaattcccaattcccacttcagccccagctatgtgtccttgactttgtatccctctattactaatatgctcattatcattaaagtcgtgggcctcctcatccctatactccatatgtgtaaagtcttttgggcttacaaaagtgtctggcccattgggcttcttactagtattgacattctccatttccttccctccaaattcggaaataactaccccactaactttcaaagaatcatgctcctgatctctaggaaccaccaccgcaccactggaactcccaatctccgattgatcggcgtacactgctgccttctctgtcaatccatcgtccgacccacttgttttgtcagtgccgtgtatctcctggctaatatattgttgatgagcaactatacaattaggagtgggatgctcatcttttaaccaatacccatatttcaacactttcagtccattcccaatgtcctccattgccggctcttccttgcaatcaatttgttcatgtccccacaaaccacacttgaagcataacatgggcatacgttcaaatttaaattggacccaactccttgttccccctgctggcacaaatcttcccacaaatatatttttattcagaggaaaaccaatcttaactctaaatatccattcataaaagcctgttgtggattactccatttaatctttaatacatcacccgcaagttgtgccaatcgtctgacattattcagagtaaaggatttaagctcaaaccccttcaatttcacccagcagctaacccggtctagcctcgcatcctgccatcagtcagtcaatggccattcttccaataataatagtcccccattaaagagccagggctgtttctccagaatcactcgtgcattttctttagtatcaaatgaaattcggacgtaggttgatgcatcaactacctctaacactttaaccttccagtccctaatgtttttccacattcttgagaagatcgaatggaataactttccattcattgacttttttgagatcaccttgccaataactgtcttctccgcaaactcctttgcctcctcttcattcacctcccattcatcctcagtttccaccgccagttgacttgccatattcacaatttcctctacagcatcatccgtagtaccactcaccatcagcatcaataaaagaatcatatcatacatgatcacagggtcctaacgaccatacagaactcagagtctcagagagaattttatgccaatactattattagtattattgtattataatttgaaccttattttctatgtgtgttaaatttttttcaaatttagttagtaatatattagttagtaatatatttttacatgtacttttttaaatgtcattattttttattatgttatccattatgtaaaatgtcaattaaaaaaaattaaaatttaaaattagtaggtcattcataaatctcaaaatgtaaatatattttatcaaataaaatactctccaccaaatattagcttagaattaattactatattgaatcaacaaataagttaataataactacatacgaaaataatattaaaa

SEQ ID NO: 378004 - DNA, 3147 bp, Cannabis indica
attttaactatacaattaaaaataatataatcccaacttaaaaataaaaataaaattaaaaataaataatatttatcacacatcatcatgtctaatataggttttacacaaaactcttaaaatgatttttttttttatatatttttacagattatgttttattttttttatacagatttttttaattattttttttacagggtctcgtcaaaataacatgaaaataacatacaaacaacataatttaaaaataattaaaaaaataacaaaaatatttaaatctataaaaaatatttaaaaatctaaaaaatttcatatttttataacttttttgggggtcattttttagtatttatgaaaatatatacctatataatataacaccaaatggaaaaagaaatagagtcattttctatgttttggatttatttatatgtatatgtcatgaaacaaaaaccaaacaaaagaagaaaaaaaaccttttaacctaatatattgtcatcacatgacaaccttccccacttgcaacccatttgtttagaagaagaaaaattaagttaaattattaattttttatatatttataataaaaaaattaaaaaaaaaaaacagatatgacctcaaaatttcttgtctcaatttttggcttgttttgtattttgtcacaaatgtgttatggatccaactatgagaaaaaagttggcccaacaaattatctttaatccacaccacacatttatttaggttattattattattagtattaattataatttttattttaaaatgaattctattacttgtaatttgtaataatataaattaagtgatgtttaatactagagattatttcataaatatataaaaatggtaaaaagatttacattttcacggatttactgtttttttacaaaaaaaaatacggagtgttatttttgtgttgttttagtaaaattattgttttgacattgttgttatgggagagcaacatatttttttatatataaaacaatacgaaatgttgtttttgtgttgtttcagaacaatattattttgatgtttctgttatggaaaaacaatataaaagtaatatttttcttggaaaaaaaacaagtgaaaatcttttttaaaatatccgtaaaattgtaaataataataataaaaaattcctaaaaatataaaaaatatatatttaggtatattgtgtaaaattcttttaatactactatatgacccccttataacaatactctcttaaattttggtttttgttttttgataggtaaatgagaatattcattaatagataaatcaggtaatgttcgttatataaaactattgctcatgaaacagaatcaataaaaatagacaaaccaagcacaaactcgaaatccaaaaatctgaacttgaacaaaatcgaaactcaaaaatccaaacttttttttttaaaaaggaaaaatccgaacttctacaaactcaaaatttcaactttatacgaattataatattaaaaaatttaaccaatcacaaaataccacaaatattattataacacactacgtaaatatattattaacaacacaaataaatatcttaaagaattatttcaagaagatacgtaactcgaaatgcctcgtcgtaactcatttcaacattatttttattaatgaaaagaacattactaaaacaaaaggctccccaaaaacacactattgtccacttgaattgaaattgagaaactgaaaaggtttttttttttagtttattatgaataattctaaaacaaaactcataaaacaaaaattaaaaaacaaaatgaaaaaatagggccgacaagacaaccccggcagtggtagtacaacgtcacgacggagactctttggaaaattgtttttgtgttaaggaaacttatatatatatatataaatatatatatatttatatgtatgtatatatacatatataaacatttgatcttcttttggattaagacacatgacacttgtgtagtgttgttttttttgattgtcttcttctaaatatttttgatgtcttttgtttagaatttatatttgtttagactctctatcaaaaataggtttttattatttttatctttcgaactttgacatgtactaaatcgtatcgtgtcgtgtcagtgtcagatcgttaaaagttttctccaaattattaagattgttggatttaagattttcgtttaattttgacgtggatgaaagtccagggaacacaacatgccaaaattcgaggtgcacgatttggtacatatggaattttggagaatacgatttgatacacagataatgttcatgttcgtaaaattgaacaggatttggactaaagtctttgaatctaacaatctcaacaatttgagagaaattttaacgacctgtaaaattcagtgggtacgatttagtacatataaaaatttaggaggaaaaattctaattatcttttgtattaaaagaaaatatttttagaataatttgatgcataaatatctaagtttaactcccaattatagataaatacctaaatttactttttgacggtaataatacctaagttatatttttgaaagttccgtaagtatctgactgttaagtgtcaagtcaataaccacgtaacaatccctaattaattcaggtcattaaatttttatttttattgaaaaattaatttaaataaacctataaaataatgacacgatcaattacagaaattttaaaaatataacttagatattattattactaaaaattaaacttattaatttataccaaaacttactctaatattataatacaaaacacaaatggatttatattggagagggactcaatatacttgggtccatttggttaccaattattgaaacactttatttatttattttattttattcattacaaatcttgttattttatttatttatttatttgagacaaaatcttgttatgttaatttaaaataaagaaataaatgcttgcttgcttgtaatttgtaatgtaatttacaaaggagcaaaaagctttctcaattcccagcctgtcttataacacttttattcttttactaggtgattgttacgtgcttagtgttagttttatttaatattttagtttt

SEQ ID NO: 378005 - DNA, 3562 bp, Cannabis indica
tttggagtcccatataagattatcacctataattgaactcaatttggagacttattgggagcttactgcgatgaaaggggaatacgctaacgatttttggatgtcgtgcacctttttaggccaacggccaagtggaggccaccaataaggtaatcaagaaaaaactcaagaccaagatggagaagctcaaaggggcatgggttgagaagctccccaatgtgttgtgggcttataggaccaccccatactaccaccagagaaaccccattctccttggcttacgggtgcgaggctgtactctccatcgagatgcagataaactcccactgggtcctaaaattcgaagaagcaaggaatgatgaggcattggcagagaacttagacctgcttgaggtaaagagggaagaagcacaaaagacagtggttgtgtatcaacaaagagcgaccaggtattacaactccagggtgcgagtacacgccttccgggtcggggatttagtgttgaggaaggtcctcccaaatacaagggatctgacagcgggcgtactgggggcaaactagaaaagtccttaccatgtagcgcaaatcattcctcatggaatgtataagcttgcccacacaatgacactgtggtaccgcgagcgtggaatgctaagcacttgaagaagtattaccagtaaggttgtgataaccattgttagagactgagtaaggagtttgttttctttaagtaatttatttctaatcaaggaatacatttgaaatgtctcacattcccatgtaatttgagtataatgtaacactaaattttgctataatgcatggtatgacaagttttagtgagataattgtgcagaacaccaaaacaaaaagcaacatacctcgagcgtctattagcaccagtgctagcataagcctgggggagataaaatatatataaaaaaagagagaactctcaagattatggggattagctacccccatcaatctaaggaaagagaggacccggtaagggcatacaaaaaaatacatgtactcctcagagtactcaaatcttaaaaaaggggaacaaacaatgaacacgtgcaaaaggtcaattcggctcacggaaccatcatctcccttaaaataacaagagattaaggacaaaaagcacatcacaaagttcttaaatgctcccttatcaaagatcacacaacaaaagaagcataattagcaaaattcgataataagagtaataagcatggtgggagtagctagaaaaaaaggtacattaacactcccttaaaattcaccaccgctaagtttaaaaaagacagggaagcaataaaataagcaagtctagtacattcatccaacatcataaaataaagacacccgctctaacatgcctgaagggtgccaaattaataaaaccgatagaaaaaatcaacactcgcctcctccaaattgattaaaataggatttccatttggctgctcgctaaacagctttgggaccgaaggagctaaagtcagtattagggttcgcacgccacatgttgtaaagggcttgatccacaattttgctgtcatgcacagctaacccttggcagatctccttcaattcttcttttagctcccagatgcaagattaaagctcgccgacttggctctcaagtttcctcttgctcttgtgagcactcttaagtcgatgcatcgctttctccctctccttgacagccttagctagctgcgttagtgcatcatcccactcccctataacctattaagcatcaaggataattccacctcataatcaccatgagcagtgagagcctcagccgcttgtttttaagcttcccttgccgtgctaaggtcactttccagctgcgaaatgtgagtctcatgggaggccaccaaagcagacaatcggtccctctctgctttagtggactccaaatcaccatagagcattttttaattagaagagaaatcgaaagctccaccttgtgagagcacttcctgagatgttgctgccatttttaaaagggtgtccaaacaagggaagaggttagggtcaaaaagtatataataacatcaacataatgacatagtcaaaaaaagagaataaaggggaggagactcacccagatagaggagcggagtagctactcgcacaggccaagtagggaacacctcgaatgccctcttaatcttctcttgactgttgggacatggattgctatactgtgccggcataatgagacccataggactactcctaagatatatttcttggcacaaacgagggcgctgagcctgaaccaccttagccaaaagtgaaagtctcgttcgaacaaaagcactgagtgtgggtgcctgatggtgggtaggaagccaaaggcaccagatgacccggccaaaagacaggaggatcgtaatatccctgctgctcatgtattagtgggtagcctaagtgatgtgagtaatccctctagggatcctactccatggggtgaccgctccctacttcagtaaaagtagatgaaggggcatccttaagttgattgggcacacttgactcaacctgggcaatttgaagagaagaaactcgacgcttcgaccgcctaggacgttccctccccttcttttaacaccgaggcctacgcactggctgcttgatcaagatgggggatgtcggggaattcgaccccctaaataagttgggtgcgctagtgatctagagtgagtggggggacaaagtcaaagcagtggcaatgggtgtagaaccatgactagcacccaattgcgacaggttgggaggagaaccaaagggcatggagttccaaagtccaaagctaaccctttcttctccccgagaagggccctatgaggaagagctagccgagggccgtcctctaacgtttttcttaaaaaaaaaaattagtcttggccagcaaacctttaggcgaaggctttgggtgagtggcctcattgtgatgggtcattggcacggctagcttctcactcgaggaatgaccccccgaggattcacccacaacatgggcttaccaatgactcacaacaatgttacccaccgtgtcttcagccgaaccttctgcatagtaccctccttcagtgcctcgggagaagcttggtctaacctgacatcagccccgccgcctctttagcctccaaagcagtctccttgaacatcatagcaagtggtataaaatagaatcaatcagcctttaacttttctcccatcaaaatcaacccgctcttgatgacgttaagcaaagtcaagagatgatggtagagctttctgtcacaatcaactctgaacagcttcaacaaaccagaagagtactcctccttggtgttgggaatattttaccaagatctagatttactaacaagttgtttggaatattttaccaggatctagatttactaacaagtatgttgattaacatcccaaatatgaattctctaaaacaattaaataaacagataagggtttaagaaaaccttacattgattgcagcaaaatataatgactccttccgttcaagatctct

SEQ ID NO: 378006 - DNA, 2972 bp, Cannabis indica
taaaggtagtaaacataaggaccttgcaaccaatctcccgctgttaatgaattaatcggtcagtaatcagaattttaacattcttttttcttaaatataaaaccatagttaaaagtaaaacaagaattttccttgtaaacaacatccagaaaggttcaaacaaattcatcaagaaatttcttaaactttgtacattagaaatcaaatatatatgcccttagaataaaaaagattatcgaaaaagctaagaatctaattaagctgaataaacaattaatttaacataaagcaaataacatgcctaccaaccctagtagtgataaagaacgtaaccattaatttaaactaatttgagagaaagcaaagataaacacacagcaccagatcaatatataatcacataatttcaaagctgaaatgaacgaacaacaatatatacctctctcacataaacactcacaaacttctaagcttaaacacaaacacacacaatatataaacaacatgtctaaatattgctataatcgatcaaagaaacgacaataataagtttcaacacagatctgaagaatgtgtcatcacaattgctttaaattactcagatcagatcgaatttcaagaaattgaaacataaaaaagcaacacattcacgaaaatcaaacgagatctagcgtaaatcagatctaagaagaaaaagtgagatgttatatattattacccatcatgagcgagtatacgagaagataattgttcttgaaggaattgaaagccggtgatgtagtgattcgatctttgttgttcttgctcaactccattgcggccacaacaaggccaaagaatccgaaaaccaggtagtaaaatatctccattttcgaagctcaaaccaagaaaaatatcagagaaagaaagagaaatgaaattaagctcagttgcagaaatgtgtgacgtatatttatactgagagcagagtaggaagaagatgagtgggtttttattctctgttacgcaacctcacctacactctctttcttactcccattaagcatggtctttgtctttgacttttgtgtcttgaccactacgtgtcggaatttcgagagtattatagattaggatgaactcgatcgcagaggatagaatcccgtaggacgcggctttaaaatgggaccgtttttgtttaatcgaagggggctgatctgacacgtggcgagttttcgagcgtcgattttgtaagaggtgttttgagggtgtcggtggtttagatctcctgcagtggaataaggtgggtgtgtgggtcccacttaacggaatttgtcccatgccgtccgatccatttatatatatgattattactattaatgaaatatttcttaatttgtgtagaaattaattctagtgtaataaagttaataattttttagcaaaaaaaatatatgtagttgttattttagtaataatttaattggacactattttgaattttgtctaaataatataaaaaacaaaaataaataaaaatagtagatgatttgtatgtatggagtgtgatattccacttaccgacataatttcatggttttattgattttttatttgacttaaaaatgcctattttgagatttatttgtcaaagatccaaatcaagtgaagttattataaaaagaataattaatttaatgcgaaccaatgggaataataaaaagcttaaaaaaaaaaaagtgaagtgggttgtattgtagggtcttagatggactttgtgtattagaacattaggctagtagaacttctttggactaaaaggttaatctctttgtttagaattaatgtaatttttattataaatctacaatgttttgatttattgaaagatcaattatgtagtgcattggtaaggaaaggatctttcctaagcatattctttttagagtgttaaaaaaaattcactttaaatctatatttcaagtaagaattaaaaaaaatatacttgttactaatatattattagaggttactggaacaatttctatcaaacttttatactatctacttttttttttttgaaacaaacgtttaaatatagggagtgtaattcgaaccactaccctccttgtgcttagtatcaaaggaatgccttcttgtccttaaattcagaacaagtttatttttgagcatccagagcacctgatgctcgggtaaccagcacccaagttgactatttattaatttgggcgccttccaagtatcagatcgacgatccgacttttatatcttctttgtctttatcaaaagctaggaaataggtactttcggggaagaaacaacactttctaggtgccagaagcaaggcccagcgcccaggtgaacattttgacagtgtaggcggattccgataatatttttcgagaactcttccgagcatcttctccgtttttaaaaaaaaattaagattcaactattttcgaggaccaaacgaaactttcgaagggccataactgggactcagtgcccaggttgacagctggcacggggcccagcacctaagttgatatattatcaacctgagctgtttctagtcaagttctcgaaaaagtgttctgaacatttttttggtcattagaaataatgtaaattcaagcaaaatcgagaagaaaaccaaaaactcgagccccaagaaatgggatccaacgcccaggttgacaatcaacatgcgatgctaccttcaattgctcaaatgtcaaatttaatctaaccaatgaatctgaaatagttaaaaaccgggtaggaaacatcgtcctcaagttcaagaaccttgaaagtatcaaaacgagatcatgggagctcgggaatagggtacccaatgcccaagttgacaaatggcctagtgcgttgggttttgcttatctgattctgattctgtttcgatcgtccgtatagtttttcacaataactaagatcctttaagtcagagaagt

SEQ ID NO: 378007 - DNA, 2290 bp, Cannabis indica
gatgggctaccgaaaaaacagatcgctacctgttgatatagggtagtaccaatcaatctatttaagccctcttcaactgttcgagtcccatacctacacagtctcagaatcatccccacttgaccttccccaggcaatgtgggattgcacagcttacccggtgtttccccttacggatcacgggactactgaactgtcacaaattcacttttagtttacaatactagtttttaaaaacactaaccaaacatgacttgttttaaaaacttctaaaactatttttattctcatttttaaaacaatttttgaaaccaaaaataaaaaacaataccatatgctctaagctatacgtgaagtgagtttttaggatttttttaagaaatttctttaattaagtataacaggttcatcgataattaataaacaacaaataaaaaatatattttttttattatatacaaataaacataatatatttttaatatgtaattatattagattggtcttcaaaaatcgattcaatccagttagaatacaactactcacatgcaatctaatttaactgtaattggatgtctaatatttcgtaattagattgaatttgattgactcgatgatgtaattagattggttcagtgtaattaaatcattaatcgaatatttgattataattaaactttgtgtcatcatactttattttacaaaatacaatatccaaattataatttaattaaagagaacgaccaatcatttttaaaacataaaactaaaatttatatttaaactattatacataaaatgagtatatttaaactaaaatttatatctgattatactagaatttatatatataaaatgagaaaacaagatgtttggcctattttgaaataattttgagtaaatgagttatttttttttttaaaaaagaagaaattaaattccaaaagaagttcctttaagttcaaataagaaaaatggaaaatacaaaacattgtttttttttttttgaaggaaaatacaaaacattgttaaactcatattaaaagtacttatctaaataataaataatcatttaatgtattattaatttatcatcccttggaaacaccataattataggcttattgccttgttttgccacttattatattcaactttatattaatacaatgaagactttaatctttgtaaataattggataagtaggtgattaattagtaatggtacatggaaaaagttaaccattttttgaaccaattaaaacaataattacatcaactataattcaaatagtgtgacataataaattatggtgacaatattatagtgggaatatcttttgttttcatgggcacttttcagtatttttaaaaattatagccaaatattatcatatcaaagtctacattatttttttcgaaaaagttaaattaatttattatactaaaaattacattcaaaatatttaattgcacacatataaagagcaagaacaagttaatttcttctaaaaataaataaagtgtttattataactacaaaaatagatatatactcaccaaaaatgctaatgagtactatatattattattagtgtattttaatatcgaattccacataagtaaagtctcacatattttaatttaataaataatataaatatcactaatcaaagtgagacattccccaataaaagacaaaagctcatattataaaactttacaatatattacaaaataaattaatattttttaataatatggcatgaatcatataagtgacttttttttttttgaaaaacttgagtattttctatttaagcagacaagatatggtgtgtaatatttgataactacaaattcaaagtatcaattaattaagtattaaataattatagatatagtctcgtaactttgtcaacttggttgaactgaccaaatgttctaagaaccaaacaaaaattcaaaaccaccctgcttgcgtacaaattttaaataatatttttaataaataataaactaaaaggtgcttctacatataccgatcgaaaacaggtcgacacgaaataaaaatagatcaaacacaacacgatcccttaacaccaatttgacatgtttaatcacatttatttttaaaatagaataaaataaaaaatcatcaataataactataattatgtaaaaatatattattagtgattcaatatttagttaaaaaattaaaattattttttaaaataaaattgaaaatatttaaaaaaatttaattttgattatatatatataaaaa

SEQ ID NO: 378008 - DNA, 1876 bp, Cannabis indica
atatatatattaatagattgtgtaagcatccgctactagcaaaacagacacgatactaccaattttacaatttagagtcaagaaaattaaatacgtttcaacataagtcttgacacgaaataaaaaaaaagtcaaacacaacaggatgtgcttaatacgaatttaacactattttttttttaataaaaaataaaacattattaataataatataattatgaagaagtatatatggaacctaaattaattatttcttctacaattctaataacaaatgataaaattcggttagttttgttgttaatataaaagaaaaaaaaagtatttatacagcgaattatcatttcaaagacttgttgtagctttcactgtctaaaaaacaaagtacaaagcaagagagattttgctttaactttatctgcaaaacaccatttctccagatctatcttacgttaatggaggtggttttggatcaagaacacgctgctcaatggacttacagaggcgaaggtgccatgaatttagtccttgcttactcccgatcttctcctgcctatgtacgtaagcaatttcaccacaatttcaattcaaacctcttttttttgttccatttcaattcaatagtgtaatgtaattgaatttgaaaccgtttcttgatactgctgtgaagattgggaaagttttgcggatacagaaggttccaagaaacgaatcgaatcctgacaagagccttactgctttaggtttgcatgagcgccttgtgtggaaagagacagaggatattgtgtcctcacctactagagaactcgccggtcacatgtttttggagcacgtaataagccctttactgggttccaaatatgtagatgttggggtatgttttctacaaattactctcttagtgcttgtcctgcatatggtttatgaattgtgatcaaactattgccacattgttgtgtggaagcattggattgggctcttactttatattttgttgagtctgattgtttagggattgtaaatgcattttctaaacactattccttgcttaatgaacttggttctttgttagaggatttagctagtttgatgttcagtttctcagaatatcccatgaattagctcggtatgctattcgggtggataaagaactaatatggtttgatgagatttcttattttggtggggtttcttaatactgtttgtatgacattatcatttctcttttcaataaattattcattgttaccaaaaaaatatagagagagaaaagaagggttatgctagaatttagttttgtcagtgttaagagttttagcaactttgagtactattttgaaattatcaattggatatagatctgacatttttttttttaatttttgtattgaacttgaatatctggcagaagcgtgttaaggtttcaagggaatttcttgagttggttgagaaaaatgtattgtctcagcgtcctgcttggagagttgatgcttccaaagttgatacacgttgtgattccgtgctgatactatctgatcattctatttttccaactggtaattacaataaatactgaaaaggaaatatgatcattttgcttctactggttggaaggaatgaaaatataggaatatgaatgaaaatcaaaatacgattcataatggaatcaaatttagaacgcataaaatgttttttcattccaatacttcaaaatgcaaccaaacaaataaatgaaataaagattgtttcttttttatttcattacttccaaccaaatgctagttatttgctctcattttgtggattacttaagataagattctgttttcttagtttatctgggttctctctatttcaaaaaaatgaaaaaaaaaaa

SEQ ID NO: 378009 - DNA, 10099 bp, Cannabis indica
aatccaactatggtttgtgttaatttgttattttgtgcaaaagataaggcatctcttaaacttgataagattgttcaggtattccatgagggctatctatattgcaaaaggaagcccgttgctgccaccagattttgtatccatgtttgatgacttggcttcttcctcccttgatgttttctttgatccctcccgtgggttgatgaaccttccacgtttcactttaggtatactttctgctctttcattctttaggttcaactgcttttgtttaacagccatgtcaattataatgattacatgtgaaatttcttatcattccctctttttctccattgaagctaatgttttttcccctactgtggaccaggcacgttcaaactcctcagcaaatgtattgggggtaaagggtcctcaggaacaaaacgatactttggagatcttgaaaaatctgtgagttgtatattttttaaagaatgagtaggattaccacagtgctacctcactcacgaactattacaattgcttgcagttgcgaacagcagggtctaatgtgctttttgctgctgtcactgaaatatcagactctattctgaagggagctgaagcaagcggttttaatggcatggtatgattaaccctttcgaacaaaagtaataaatacaattatgtttattagaaaattgagttgacaagatttaatctttaaattcacatttggttgtgcgtctttttttctaggtgactgggtttcatcaaggcatattgaaattggctatggagccatcattactggggagtgctttaatggaaggtggcccagatagaaaaattaaactagaccgaagtgctggggtagatgaggtaacatcggttctgtgtctattttctgataagaattctacgtaatacaatgcttttcattctggcaccttattcactgatattcagtcaatctcgtttgcctgaaagtctgttcccatgagaggggggaagaaaaatctccttaaaatgtactcgagagtacagcctgtcaatccctattgaaaagtttactgtagcctgttagaattgagctaatttccctttcattgcaaatagaccactaaacctcttatgaagaatttgcttgaattattgcagttatacattgaaggataccttcaagctatgttggatacactgtacagacaagaatatcttagagtcagagtcattgataatcaggtaataaatttgtgtgtgtataatctactggtagcaatgttgtttcctttcagaataaaattacatatttgagaaagcttcacatggagatgtagtactgatttaatattttaccttacatctcagccctggaatctatcatataaaatctatattttgtatgggtccggcaatactttttctcttttcttgctacttcagctggaaaattatgtattgaatgacactaatactacctttgttcaggttttcctaaaaaacttacctccaaacaatacacttatagaggagattgtggatcatgtgaagagtttccttgtgagcaaggcattgttaaagggcgatccttccagaacctctcgctccttgcgccatcttcgaggagaaagtgtatgtcctgttattttcatcatcatctagtggagtgtgttattttcaaagctagagtggtgttaatacaccaccctcatcataatcccaactttcttaaattgattcagcatcggtgtttctatctcataattacaaatttcattataaacaggagtggaagattggaccaacattgctgacattatgtgagcacctatttgtgagtttctcaattcgcaagcttaggaggaagctaacaagtttatatcgggcgtgaaactgaagatagatactgacaacgaaaatattaaagcaattactcttgagaacaaccctgaagtacagcagaaggtaaagttcgtatggaaatggggagttggcaagtttgtgttgtcaggtatcgtagcctatatcgatggtcgcctatgtcgtagtattcctaatcctgtggcacggcgcattgtgagtggtttcttgctaacttttcttgataaaaataccgatgtgagtgagtgagtaaacttttttactttcttctttacatgcatgcacgtaaattttctttttactccacagctacaaattataaagcaaaatcaaaatgaagaaataagaagaaaaactacgctgtatagaattatagattaagattgataggcccacccataaagctgtttgtttgtttttttttcatttgcacttgcaattttgcaaagaataagtaataaaagtcttagttgtgttccctttatagacagataatacaggcatttttcaatcgagtcatcagattgaattggagtgaaaaactccagcgaatctgtatatataactgtactcttgtcttgtgttttatgttttcatttctcttcttatttatttaatttcattgttatttatgcaataaaatcattataaaattaaatatataaaactggaaattaaatatgtataacaaaatattaattctttcatagtacaaataaatttaatgcagagtagtgaaataatttagcattttttagaaaaacaagaacactaaatttaagaatttttttgtcagcaactagtaatatctcttcttaaattttaatcactatttgtctataatttaaaaattgacccgttaaataactatagagtaaataaactatcacagaagttttttaagaattgttgatttaattaattttatacaagtcttgatcaaaccgataaataaatctacattcaatttcactgaattgataaaatatttattgaaatatacaatcttcattttatggtgtttttaataaaaatagtagtttatttatatattattattacgatttattgtaataaaatgataatttatgacaaagttaacttccatttgttcaattttatatataggaaattagaaataatgtagtaaattagtatataccagaatatttaagtcatgtttctaaataaaatagaataaatgataaaacataaaaataaaaaattgaaaacaccatatcaaatgcacaacacaagcttggtaagcataagcgttatgctacaaacaacgcacaacacaagtttggtcgtaaatggaatccaaaatgtcacattcagattattttaatggtattcctattatttcttagcaaaaaaaaggaaaaaaaaatcattatccacatcaaccatgattattacatgataatacatttaacttatcaaatgttgataagttgattcaccaataaaaaaaaaagtgattacataacaaacaattgagtgtcaactttatatttgctgaaagagtgtcaacttttattattcgttaaatgatcccaaaggaagggcttctctgggcatatcttcttcaaaagagacttcaaattctctactctcagcttctcttgaaattcaatgccaataaactgaggaaaattaaaacaacaatcaacaatttcaatttaaagaaacccatacaaaggttatgaagaaaatttaataaataaaaacctttatttgttaccttaatcaaccataacatgtatgtagcacaatgcaacgcttgtgcatggtggtcctcaaagctgctttctggaacagttgagcagaagctatgaagtttaaactcattatccacaaacttatcaaagtccttgtaaatgctggtcccggtggtgtcggtgtgatcaattaaaaaaccttttaacagaattggagcaaggaagcggcgatgaagccatagagcctgtttagagtaaatacagatgaaaaataaatgacttgagtgtgcttttgcaataaagtcctagtttctgtttgtaataacaaataaaaagtgcatcagcaagacattatgaagttttacaattagtatccaaatttaagagtagactgttactttccatgtatggtatatagatgcaaaataaagaaactatgctccaaaaatatgatataatgcagttttagaacattatatacctctcttccaacatacagctttatcaacatttcattccattcaagctcctcctgtcatgtacccaaaattagaaagggggtaaacaaatttaagccagtagttttaaaaaagtggacaacaccattttcatataaaaaggttgaaggaaattgaaaagacgaagtcaaatgtacatgtacatataagaagagttctacctcccacaattgatttatatcaacatagttctggacaggcccaattttggagtcctctaaaattctaagcattaaccgctgcacattgaaaacatgaataatgaggaactgagttataacacatcataatttcccaagcatcaaccctgcaacattgaggaaaacaaatgatatatttactcactctgcgataatgaaagcaactattatcagcaacatgcaagcctgcccagcttcgagttttctttagctcatgaagtacctgcaaggacacattcatgctgttaccctcataatcatcacagggatgaggtacattatggttataataaccagtaaaaattatttcagatgggatccactactttaaaatatattatcacgttactaggtgtaatattatagtatatattttgagtgcgcatatcattactaatgtatggactgttaaaattactgcaactgcctttgcctgcactttcacaattcgggaagttcagcaaacccggactttctaagcagataggtttaagcaatgtgaaacacagactaatatctaagcacataggacttggagggaaggaatgaatgataaataaaacaacgaaaaagacaaaataatgcatctaacctgttctcctgacatataagaaaccaaccagtttcgatgattccatgcacggtaattcatttttgatctctgtaaagaagaacagctagtaatatgaaatgaccaactacaagtataagcaatgcaatgaataaaatcatatggtaattccaattttttctgtgaggggaaggaaaaattaaagcaagtaatttgaaacaccactcgtaatcagctatgtaaattagaaattttaagtgcaatcgagaaattgaaggcgtcaattaacacaggcagactatagcattacacattttatgcaacatagtggttagttcaatttaaatgtggctgttaactcagcgcaaaataggcaatgtaaaatagaagggtacgaagtttagacaaagagataaacaaaatgattccatataatattttaaacttatgcaacacagcggttaattcaatttaaatgtgcctgttacagagtgcaaaataggcgatgtaaaatagaagagtacgaaattacgacaaagagacaaacaaaatcatcccatatgctattctacacttccttataaatgtttaagtgaacctttaaattctaaaagtaagcagtttatgaattgaattaaacctcagctattttctcaaccagctcagattctttttccaaaatattttgtagagttgaacatcttccagcaattgatttgatcacccaccgcctattatgattgatatgtagtaagatttctattcaaagccattgcaagagaaatggctacataacaaaattgacctctgactctgaggatcagaatctgtacatagggatccaattagaagagaaaaaagaacaggaacaaaaaaggcctaaactagctcccggtataaaataattcaagcaaaacaagtagacccaataacaccaaatactaaaagtctgaaacgaaagaaggaaaaaaaatcctacaattattagtttctctagccaacatcaattctatggtactgatactgacaataatggcatacctgtgactccaagcatgttcacacttaggtgcatatgatagaacaagtgctgacaactgaagttcatacatcagcatagagagacaatgtttcttcgacacagctagtttcctgaatgaaatgagttgtcaattgtcataaatcataatagcagcaagtaaaccgtaatctgatactattaaagttctttttaagtgggattacaatcaatcaacaaataacaaatgtaaactaggcccaatagttcttggtactccaattatgttaataataacaataacaaactaaaacaagtaaaatatacaagcatttaaagattgtagtggcaccatacaaaccagaactgaattcatgaatcaaaggcaattaacagcccaaaatgaaaacaaggaaaacctggaatgccatgcggtgccaaaatcgcagcttaacagcaaaagagccctgctaagtttcataacttcattttccacattgtcatgagcagatgcagagtaacttgaagaatcctcaatacaagagttgtcaacaagtgccttgtattgtctgattgcagccatgaatgcatgtttggttgtctggtatagtggaaaaaaaacctccgtcgagattcccagcttgtgatctttattccaaaaactagcagcaccaacatgcttagaagcatcatcaatgtctgacaccttagagctcaacgtgtcatctgaggatgggagaagatgacatgcttcttcattcagcatatcaaattgggatggatgaataaaccccacttcatctctgagtttcaaaaaagcaaaacaatatttacataaaaacatattgagaagtaaagagtgctttgaattccaatgaaacccaagaaaacattccctaaaaattgcctcaaacactccaattttatcatacaacattatatataattctgtgtagatgaatcttgtgcttacatcaaaggatcggattccagaataagttccaattcatttaaaagatggagagcttgttggtcattcatgatgtgtgttcttaaagccagcagaaggtaacaatgtccaatgtgctgaaataagtgataaagcaacaaggtaagcaagaaatcttttgtttgagtcagtgttaaattgccaatttaataaaatacaaagcattgatttttaaaaaaaacccagaaatgaaatgccttttataagagaaacctaagttgtcggccattgacaaattcataagagagcctaaacagaaaggagcaccaaaaattagccggccatttgagtggagaatgaagaattctcgggtgcggtgattgggtatgaatcagagtgtgtcagatagaaacactattctcaatttgatgaaaaggcatatgggatgggaacccaaaataaataaagtaaaagactttaccttcccttttcagtctgatccgaactcgcaccggcgtcgaatcgagttccgttgctcgcatcagtaagttatccaattcatcactactcccttacaaatttccaaaatgaccgcaatttacacttacaagttagaatcactttttttttttattttaagctatttctaatctacttagttttggtgcacatttttcattattttggtggaggaatttgaatgattatcatttatcatatcaatatacccctaataaaagttatttgaaaattctataagagcatgtccaattgtaccattatttgaaaatactctacatcttcacatcattcaaaatataatattttattttattttttttctacattatttttggcacctttacttttaaaaacactccaatggtataatactttctaaaaatactataattataatatcacatattattatatatataatttttttttctttattaaactattatatatattgcacttttaattttttattgtataaaaaagacagtatcaatgccattgtgtggcatcaatgcaaatttcaagaatagcattcttttatctctaatggtatagcacctctatattttgccacataagctttccacctcatcaagcattctccaaaatattaccattggagatgctctaatccacttcgttaaagggaatcactatgttgtaaatataggccaagtttttaatatgacacgagcctcaaagatacgagcacgatctcacataaaaaaaaatatgtatttaaaagcgacgtgataacatgaaaatatataaatttaagcacggcacaacataaaaaatatgaacttaagcacgacacaataaaacaagttcgaaaacaacacgtaaatactaataaattaatttgaaaacacaacacattaaaatgtttaataatttaataataataataacaataataataatgataataaatatttatttatcaattaaataataataatatttataataattatttttaccgctaaaaatataacaaaaaatatttttactgttaaaaatacgacttagatatttatatactactcagcataaaatataagtatttatttcgtaaattaaccataatttttttttcttaattataatagcactagtttatctataaaacaaaatggtgatataaatgcatccttaagtatggtaggtgaatatatattcctagttttgcgtccgtacatattagattagatataaatccatatgggtccatacttaggaagaggatacctctttggcagacagccgccaaagcaaagcaaagcacagcacccggtaatgccatggaatggaatggtggcattaatccacactcaatcaacactacttcttgtcatccaatgttttacctcacaaaactctattttcatatttattgaatgaatcccataaattattttttaaactaacaaaataacatctgcatttttataaaagatatttttttggcactcctgagttaaatgggtcctaagctcagacctaatttttctcggcaccagtatgaatcagcatacactctctttgttctctctataaatacttttattagggttaattttacatgtaaaatgtcataagagataacacattattatttacattttaatattgtacttggcatattggctatattaaatactttaaggtacttaataataattctcattgatattatttatacaaaaaaattctctttgatattaattttctagtacatttaatatatgttaatttacaatatgattaaatcttaattttaatactttcctctccacacaattctttcaaacaagagccataagatcgaaaatgaaaaaaatactaagggctggtatgctcaaaccacctttccctttggttgtttaataatgtaagaacaataaatatccttaaaaaaagttttcttttctcctctcatgagcttagcttagctactaaatagatcataattatgaaaatttatataagttttgagcttattattaaccaaatttgaagtggggtatttatcatttttttctaaacaaattataaagaaaaatgttaaaaagtactagtagtgtctaacaccttcctacatgttaatatcattattggtttgactaagtatcaagtctcatatactatcagggagtatcgttagtcaatcgtaaaacgatacattagaaggtgctatacactactaatacccaataacattgttcaattataaaatataagataatatttgtaactattttaaattaatgatcgaaaatgatataaatcttttaattattaaaattattaaattcatgtcacattaagtggtattggtgatgccccatagaaatactatgtttttcaataacaaactatgttctttttctcttacattgggaaggagatttttggaattgtgacttatatacaccttcttgcatttattaatttgttttttattaaaaatgggttaattagaatttttacctccgaattttcatatgtacgaaattatgctccttgaacttttaaggtcattacaaatgccccatgaactattgagatgttggatttaaggacttttatctaattttagtaaaaaaaaatctaacatggatgaaagttcagggggcatgatctaatatatcgaagttcgaggggcatgatttggtaaatattaaagtttggggaacatgatttagtacataaacaatcactgaagtagtaa

SEQ ID NO: 378010 - DNA, 3440 bp, Cannabis indica
agtggtattacagagaggagcaagagctattttctttcctttctatcttatctttcacacacaccagtcacctttttaatatcattattcattagaccaacaacaaagagcatatgaaagcggaaaagagagaaagagagagagagagagagagaaaagcattcaccatgaaaaagcattcaccatgaactgccaattctgtttgttcttcaccattgaaatttgcaaggggaatttcagcaacaaaatctggaatttagtttaggagcttgttaaaagcgcacaaaccaattctgtactactacaaccacaagtgaaaaactccaatttcttcagcatgtggatattatgggcttcagtgaccaaattaaagcttccagggagaccctatttgtagaagagacatttccacaaacgacatatcttcaaaacagtagtgccataccaacttcaaagctcaaacatcaaaaccacccaatttgctcaaccaaatgagcttttgccaatatggcaattaacttcatcttcacgataatgagctgatttcacatatagctccgaaatgttgaaaatcccaaatgtgtttcttgaccaatggaattttcctaaaaaaattaggtaaaaaaaaaagggaaggaaaacctagttcccagctacaatggtgataattgaaacaaacctctccatcttaagaattctaattcttctaaactccttccctcttctcctcaaaaacccctgcaaaatcctaataaacaattggaactcctaaatcctatttgaattcattaatacatggcttaaattccccgaatttcaaccgagccctaaattgtttttcttccccaacaaaagctaatacaactctaaaccctaaattaactgaagcaaagaagaaaaaatctctcaaaccccccgcacacgaaaagcaatataagcatacacatatttatatatacgataaacaccgccgccgccgccattactagagagcttggagactcgaattagcgaggatcgtcttccctacgaccagaatttccttgtccacccgataacgaagctagcaaattcagatgcccaggaaggtaatttcccactctagctgccgaggcctctccgatcgtctgctgctggacaaacaaaggttgctgcgagaccgacggctgcatatcaggtggtgccgccgcaaagctccagacttgtccgaagtgtggggcccagaatcctccgggcgcagtcgtggcagaccccaccatggaccccatggctccgactaccgaaacaccgtcatgaccgtcgtgattatccttaccgacaccgtcgtctgggcgcacgcgttttccgagtatgaacggcgtgggacccagcaagggcttgtgctcaagcgacccagaattgcccgaagacgtagaaagagaggctgagactccgccgagcccgttgccggcgctgccgcgtacggaaacagagacggtggagaagctggcaggggttgtaccagtccctgtagcagcgatgatagagggctcggcctggcggaggagccactcgatggtctgaccgtcggacttatggccaagctcacgggtaagctggaaaacacgagcggcacaaatgatcggcatgcggatgcgccgtccccttccatcaaccttgctatgacggtccttggaaggtggcttcttcacaactaaagctccattagtcgccgttagctgctgtggctgctgctgttgctgctgttgttgctgcctctggttagggtcaatcaaagctccattattgacgccgttagttgctccgacgtctgaattcgacatattataaagaaaaagaaaagaaaaaagctgggaggggaataagtaaagccaattctgtagtgacccctcagccttaccctcttcgtcaattcacaatctttactcagtaatagtagtgggggatggggggtgagcttgattaaggtctgtatggagaaagataggtttttttttggtgttgttgtgtgtgtctctttggggttttgggttagagagagagagagagggaacagagctctaatcattgagcggcaggagctggtggagacagggaggaagggcacagtgggtggtgggacccagtactcacccccacagctcacactctcatataaacattatacacaccccacactttttattcacgcgctcactcttggcgtttacattccacgctctttttttttatatttttatattgatttttcgcctgtgctgtgctgagctggtgttgttgtaggtcccaactaatttctcgcaaagggattttaagtgtcaggcttttgggtcccactatgtttccgtactgttttactattttggacaattggactcgtgtttttctatttctttcttttttcttttttgatcttcaaccttactcacttctttgtgttatccttacttctcaaagagattttattttatgttgatatttgtttaattaatactggaaaagataaaataaaatctgttgcagtttagtgttccttttcttttcgttaggtaattaaaggctattagaaaattgtattcccctttacacacgggaaaagaattgctcagtatatatactgtcatgtgtgtgtgatgagtgtgttacatggaatggaattgtctatattattattagtattattattttctttcttaatatgaaaaaagtatattctttcattaagatgaagcagtaaggaggaacgacatagaagaacttgaaattcagcaaaacatatttatatacataacgacacaaaacattgtcattctcaattagttcatcatctagctctattttcaatttagcaaaaaagtgaactaatttattagtttgttgttcggaattagtggtgtgtatcactttttataggtagcaccttacaatgagttaaggcttaataagttattttcttaaattatataaaatttattatttaattatactaatatcaatataacatcaaaaaaaaaaagtattaaacactaataataccttttaataattctctaaacaaattgattataaaatgaaagaagccaagaaaatatcattatggctaatctttttattacatctaccaaatgtgagaagtagagaaattaacggtaaagccacacagcaacaatatgccccttgttatattatatggtatagtataatatatgtgacatatatatatattagtttaaatattggggaaaaaacaggaaaattccaaaaaggataaaatattacaatattactgtgggccggtccaatcaacatttatacagcccacattgaaaatattacaaaaataccacctgacctataccttcagccgcacgtcacgaacggagacgatgaagaaacctccatcgatccagtctgctacgcaaccagaatgaaaccagatc

SEQ ID NO: 378011 - DNA, 3366 bp, Cannabis indica
aaaacacagagagaagggaaaaggctatggcaaaactgggcctgctttatcatggaatgggagtttcaggtggtgaggagggtgctcgaaatgggccttctatgatgcccggtgggtcctttcaagccttcaagtacattgaagatatccttcttaaggtggctgctcaggttcctgatagtggcccttgtgttacataggccaaggaggatcagacaatttgttaagatggttcacaatgggattgaatatggtgatatgcagctcattgcagaggcctatgatgtgcttaagtcaactggaaaactctctaatgaagaactacaccatgttttctctgaatggaacaaaggtgagcttttaagcttcttggttgaaatcactgctgatatatttgggattaaggatgacaagggagaaggctatctggtggacaaggttcttgacaaaacaggaatgaaggatactagaaaatggacagttcaacaagctgctgaattgtctcaatggtctgaaaaaggaaagagttgaagctgctaaagttttcaaataaagtggtgttggtgacattcttactgagcaagaagtggacaagaaaaaattgattgatgatgtgaggcaagcactttatgtctccaaaatatgtagctatgctcagggaatgaacttgatacgcgcaaagagtgttgaaaaaggttgggacttgaaacttggtgagcttgcaagaatttggaagggtggttgcattatccgggctatttttcttgatcgtattaagaaagcctacgatagaaaccctgaacttgcaaacttacttgtggatccagagttttccaaggaaataattgagcgacagcatgggtggcgaagagtagtttgcctcgccatcaaatcaggcattagcgttctaggcatgtcttctagtcttgcttactttgacacatacaggagggataggttgcctgctaatttggtccaagctcaacgagactactttggagctcatacataggagaggaccgacataccaggatccttccataccgaatggtttaagattgctaagcagtcaaagatttaatttaagcctcctaccctatgagtaagaggtcataaggtgtttttgtgtttttcatatgcttatgaatttatatgtcgaagatgtctattgaactaggtgagttgtttgactaatttcttattatgcttcttgtaattgtacaaagtttgagtgctgtttttcttggtttctttagaagctaaacaatggcaccatcttgcagttaatgaaaaattgctctcagcatttgtcgtttgtgttgtgcatctctctctctctctcatcaaagtatgctatgtttgaaaactagcttctattctatccgtagaactattttactaacttttgaccagttaaaatataaatacacgtgaatcactggaaatcctcactaaatagtactgcaataacatcattactagttactaaaaatatcttcactcagtatcacttgttactgaaagttcctcataatgatcttggaaagaatgggatcagtaatcatcacaagcaactacgttctctgtcatggagttcattctcttcttcttcttcttcgatattaaattattaatccctgcgcctaagaacatattttcatctgggtttgtttgtgttatctatctacaaataatgtaattaataattatcattttgtacttgctagagaaaatatacttatgcaggacctaattatctttactattttgtcattttgacactgttaattataatatacatcacgtcacctcataaagcattttaattaatgtatatttatacattgctataagacaacatgtggtgcaagcaagcataatttatataacagtagtgccttatattagaattttataccatggattcagtttggtaaccaggataatcaaggcaatagcaaataaatttgaaaaactgatttcatgcaaacatgcagtctctcatcccttaatacatataaagaactaagataaagaaaaaagtattcaagttatttttacaagtttggatacacaagagaagacattgtgtcaaaacagagaaaatatgctatttcagaagagaatcagagacgacatcatcaacaacaacaacaagaacaacaacgaaaaagtttaaaagaaaatatttggccactaactagtttggttggtgttttcatgttttacctcaaccttagacttggctagaagcactttcagcttttctaactttctcaacttctttctctcctttagtattccttctactttcaattctcttcttctcttgcttgccaagtttagaacatttgctatgctgaagtacatttactctgtttctaagagcacccgagatttgacttctctccttcactccaagctcactgagagttggaccagaggaggcatctgaagccatggagtcatcactttcaccattgaagtcttcacctttataaggtttgttttcattttcgtgtagacgatcatcgactccatgttggatttgggaaccaatgtacattgtccaaccggattctgtgtcgtaggtaggcttctctgaacttccaaaaagatgggaagaagactccatctctaatcccaccaagacttaaaaactttgataagattgtttttatgtaatctacagtgtgaaagagcatcaaacaccttggttcaccatccatatatatagatatataaactggttactagttgctatttacattttgaaaaactgagatgactcctttacaaggacaaaaaaacaacttaatagatcaacagtgtcattattcaagtggaaggtacataccactacctggcaaccctatccaccataatttacagtgcttagatgactagaagacaaaccaatggtgataaaaagaggatccaatattagaaaataattataataaaaaaattatatagaaaaatcttaagactgtatgtgatattagtgagataagctcacttgggttgttgagtttttcacctggaaaattaccaccttttatttctctgcctatttcataaataaaaagggcagcttttaacttggggatagcagatgagccaaccccctccttccccactttcacaaacatttatgtagctttacacagtctcttgtttatctgttacacttcttgaattctcctgctgttttgtcatcaacaaagggtagccttttttctgtgaatcgaattaaatgcacccctatcaaatcgactttttgtcattttcctataaggtttggatagtttggacaaaaggcagtttgcttctgcttccattatcattattatgattattattatt

SEQ ID NO: 378012 - DNA, 5585 bp, Cannabis indica
gtctttcttttattttttaccctctttttttaaattctattcatttttacctcttttttttaaacattgtaccaattttgcccctgtcacttcaagatactctccattgactctcttatgttagggtattttgggtacaatacatataaaaaaaggtatgtttcaaataaatataaaattagaggtaaatttgattaattgattaataaaagaagtatttttcaacttacctctttacataatatacttaaaaatgaatttctttttagataattttcttatttttttttatatttttacgatctttctttttttatatatttttttttttagaaattttcacatgttttttccaataaaaatattactttcaggctgctttctagtagtggcaatattaaaaatatattattacttaaaaaaaaaaaacactatatatatagttgtaaaaacaaatcaaattacttcttttagcagcaaccttaaaataatattttgttaaaaaacaacacgcaatatttttattaaaaagaaaacaaaataaattcgtaaaaatatatattttaaaaaagcagctgtaaaaatgtaaaatttttagtatttttgtatatttatgaaatccaaaagaaagttggtctaaaaaaagtagtgggctttcttttagaatggaagttggtcaagcttacggccacgtgtaagcgggagatagagttgtagatgaaagaacattattccggctgcaccatataattttagaggaaactaaaaattaacccttttcttctttctgttctcagaacctactcatcgaagtcctgcgtttgattcagtgtcgtttgtggaagaagaaggaagaagaagaagatggtgaaggtagcgacctacttcgctatgtcacttggagctttcgtgttctggcaatccatggaaaaggtccatgtttggatcgctcttcatcaagacgaaaaggttcgtccctttcatttaatttcttttgattttctttttgtatttcttaaattcttttaaatggttaaattatttttcgtttgaatgctgttttgctttacccaaaatttgaaattttcatgttggtatgattcgtgcgtatttttcgttctcagattaaaccctagattgattatgttcctattttattttgctagttttatcatctggcttgttaaaagtttccgattggatctgataactgttacatttaacatttatattcttattggataatggattttgtttggtttgggaattagaaaaatgggtttgccaaatttgtgatgttaaagttttgaactttacaatttaaatttgttgaggaccttataatgcccacatcttaataatgaaatttggttcattccaatcaatttggtttggtgtgaaagtgattttgtaatatagatggtaacctctaattagctggtcaattatggaacttgttaggattttgcttatctgtaattgttattgctacagcaagagagattggagagagaagcagagattaggagagtgagggaagaattgctgcaacaagccagacagaacgatattgcatgaccggcattgcctaaaggcttttcctttaaaacacttcatgttgttttctgtttttattttcacttatgaatttttatgttaagggtcgataggctcttgcaacattcttcacttatataaagtgcatcgttcttgagatgtgcagtaacttcgttttgttgattttttttttttcataacaattatctgttgcttcgattgctatgtcatctagctgaaataataattacatggtcagatattctgtgtttcttggcttttgatgattgtgggaggtctgcttgtttaacttgacttggagagaaaaacatttaagttgcaagtttgtgttgtttgattttagagtattgttatgaagcactatagtacttagcacctcttatgaggtagcatcttataaatagttagcggttctctataattataactaaaataaaataagacttgatattgaattatactagtggcaatgtgatattttataagagtgatatttagcatttctcttgattttaagttgccaaaattatattgtggtgacaacaagtatcttatgtgaacttaggttgtgcttggttggggttaatgaaatggacattaatcattttttttttattttattcaatttgtttggctgcaatttaaagtattagaatgtcattttaatggaacgatttttccattgtttttgtagaatggccaataaattttgaaaagaatcgaagatcatttaaatgtaagatggaaaaaggcaaatgccattttgaagcatgtgttttttttagaaattacaaggtttaattttttatttaacaaaataaagagtttatgttagtaatttttgtaaaataaggatccctacccaaatggtgtttactttaaaaaaaatatatatgtggtacatactttttcatttatattcttgtgttttcaataccttctcaaacaaaaaaaaaggaataaaaattaatcaaacttcattttattttttaatgacttctatttggtagatattttattaaaaatagtggaaaaattattaaaaaattatcaatctttattatgcatattatctcaattcttattcatatttcacttctctccccaaatgtatccttcaggaaactacataatgcagattctaaataagaaacttagcttcaaatgtgtatgatcgtgcttcattgatggtttgtgtgtgtttaatgctcaaaattatttcttcatatgaatatgaaatgttaaacctttatctactgatttaagtgactactactatttatgcaccattttcttgtaatattgatgatgagaacagtcaaatttctcaccttggagaaacttacttcaattctggcctgttttcgccaacataataaagcagtatccttttttcccgttgtcttgtaccattgaatcttgtaatttgtgtgtctcggcataagaaactaactggggtaaaagagcctacataaattgttaaggacgataaattttcattgttaacttacttaccactttactataatctcttcaatttgaaagaatgaaattaattttctattgacaacttgacaagtaatcatatttcacactcattttcgacagatcatcgttgatatgtaataatgtaaagagagcatgttcatattgttctactacaaacagctatataaacagcaataggaaacaaaataaacctcaatgtttggtcaaaaagaaaagtgaattctactttttctaatacacaaccaatgaccaacccaattaagataatacacacgtcactctgttcaggaatttttaaaaggttttctgttctaagcaaaagacaaaaaacttgagcagtttacttagtcttgcaaagaaatcgtgttctctatgcttcaacaactcaatattcgtcagccttgtgatcaagctgaatcaaatcaacgaggttggcatgtaagctgttgggacaaatcaagtttaaacctatcacaaattcatatcaatcatctaataatagatggtgtaacctctaaaatggagcccatattttgaggtaaaaactacaaaaagctaacttaaaccgttcaccatgttataaaagcttgcataattgcattggtagagttaccaaatcaaacaacatcatctctcacatttctccaaggaaaaaaaataagtatggatttggggaagtttttcctgattgctctttcgcttgctgtgcttttcgagctagctcaaagctttgaattccatgaaaaagacttggcttctgaagagagtctatgggatttatacgagaggtggagaagccagcacacagtttcgagggaccttaaagaaaagcatcaacgtttcaatgtgttcaaggcgaatgtaaagcatgtccacaaggtgaaccagatgaacaagccttacaagttgaaactgaacatgtttgcagacatgaccaaccatgagtttgtaagatcctatgctggatcaaagattaaccactataggatgttacacggtgaacgaccaactactaccttcaagcatgaaaacactagtgatcttccaacatctgttgattggaggaagaaaggagcagtcactggagtcaaaaaccaaggcaactgtggtagctgttgggcattctcagctgtagctgcagttgaaggtgtcaaccaaatcgaaacaaaggagctggtatctttgtctgaacaagaattggttgattgcagctcgaaaaaccatggttgtgaaggggggttgatggaacctgcttttgcgttcataaagaagcaaggaggtataactactgaaaagagctatccctacacagccagtgatggttcttgtgaatcatctaaggtaaagtaaaacaatctatttcaatcttgactcaatcctattccaacttttcatgtatctaagcaaagaaaatgagcataattatcatggttttacagttcaaaaactctcctttggtgaccattgatggatacgaaagggtacccgaaaacaatgagaatgctctaatgaaagccgtagcaaaccaacctgtatctgtttccatagatgctggtgatagggattttcagttttactcagaggtaataattcagttttcataaacttttcctataagaaaacaattggaactagctaaaacttgataaaattctgcaatgggattctgtttatgtagggagtctattcaggagaatgtagtatacagctaaatctatggagttgcagtagtggggtatggagcaactcttgatgggacaaaatattggatagtgaagaactcttggggagccgaatggggagagaaaggctatattaggatggaacgaggaattgatgcagaagaagggctgtgtggtatagcaatggatgcttcttacccggttaaatcctcagcaaaccccaaaactggttcttctaaagatgaactgtagtgctaatctaatgcacacaaatcacatatatgaagttttattaaatttcactattagtcttagtttaggcaaggtcaatttcaagcctttactaatacatcaaataaaatctttctggctttcacaagtgagatcatactatagactgtactagttttatgatttgtttttattggaataaaaaggtttttgtagccatacatttacagaacttttttatactttagagtattagtaatgtgaggtgtagctcattcattacttcgaattcgaacaattttttcaatattacatcctttttcaactcttaatctcaaacaaagaattttaaaagcatcaaaagtgtctgacttttctcttaaaaaatttacccaagtaaatcgagagaaatcatcaacacacacaaaaatatatcgcttaccatttagacttttaacttgaattggacccataagatccatgtgaagcaattccaatacttttgaggtattgatatcagacacacgtttgtgagtgatttttaattgtttaccaagttgatatgattcacacttaccaacactt

SEQ ID NO: 378013 - DNA, 4168 bp, Cannabis indica
ctaataattaaaaatgaacaatgagagattacaataaacataataattaagaagagattttattaattatccaaccaaatagcatcatcatcatcataaaagggataataaaacaaaacattttaaccgtccaaaactgaacgacgatagttttattagaaaggtgtgctcaaaatgttttctagtgaatatttagaaaaataaaaaagaagcatataacgtgagtattgaaacctaagctaagatacctagaaaacaacaccctttgtttggacccatatccccactcacgaatgaaatcatttcattttcatcaaacccataatattagataattccaatttatagaagggaaaaaagaaaatattacagtattaaaattcattttattaagaattaagaccaaaataaattatcaaaagtaacatattttaatagcttcatctcccgctaattgcaattgcggggattccacacttgcatttgcagatgccaaacctctctttcttcaacaatggcgtcgtccactctcctagatgatccttcctctccgatgtcacctatggtagctgatagttccgacgctgagcgccgactccgggaagccgaagaccgacttcgcgaggccatcgaggaacttcagcgccgccagcggagggccgccgcttgtggatccccgcaacaaccgccttgtcatcatgccagcgatgagtcttgtgtcgccaacgccattggtaatctttgccagagcttccttctatcctatggtgtacgagttggtattggtattctccttcgcgctttcaagcttcttcgtggccagtcctattcttcgctgcttgatctcaaggtattgatgtcgctttagctgtaatttttgcttgattttggtctatggaactttcttgtttttcgttttggccggtgaatgttgatggtcttgacattggagttagcgatgaggaaacaagatgaaattagggtttagagtttaacagactgaatgattagctacagttgtgttcttctcatttctggatgtgtgctatagtttggtgctcgcattgggagtgttaatgataatgaaggcactgtctataagaagtttgagccataataattggggaagaactttgaatattttgatacagagagaaccgattcaatttgaagaattttttctgattactttcaaattctggtatatgaaataaatttttgggaaaataagtattatttgactgtcttgagaattttgattattttgctacttataatcaactatgttcaagaaaaagaaatcactttgcagtagcaaagacatttaagagttatgctattcatgatatgatgttaaaatgtaaattaaatctagttcagtagtttggatgggttgatagtgattttcccaaatttccatttctgcattaacttattttctttttgtgcagcaacttgtttcagaaaaagatcttatagtaagagaagaggcatgtcgcgttggtttactttttggcggcttcactggatcataccatgctcttagatgcttgttgttaaagttgaggaagaaagaaactccattaaatgtgtaagactacatcctacatcgtgtgagtaatttgtcaaggagtttcgatttaccaccggaatttctttatgcttgctattgtttcatgataaagcatatcccttatttttgacctttttaagggcatgatggagcagagtcatagcaggttcagttgctggtttgtctattttagctttagacgattcaaaccgaaggcgcacactagctctatatctgttggctaggttagctcaggtagtatctgaatgaatccagtctctttattacttcttttaagctatctggtattctaatattactcaaattgttattccttttttttttctttagtctgcttacaattctgcaaagtccaagaacaagtttccaatttggggaagccatttgaggcatggggacacattgcttttttcccttgcatgtgcacaggtaatagaaatcttatttgataggtcaaaagcttttattttgcacttcatttattactaacaaaaagtgtgattctatcaaaatgtgggcaagctatgtcactttattaatatcaaaatggccttcaggttatgtatgcctttgttatgcgtccagaaagccttccaaaatcatatcaagatttcattcagaagacagggccagtttcaaagcctgtgtacaaagctgtgagagattgctgtagaggtttaccagtggacattgcctcactgtcggcctttttgtcggaaagaagtaactccaacattgtaaagttggaaaagttccccgccatcatcccttgctctgttattcatccagacacaagttcttgtttagctcataatgcaaaagcagcatcagctactttcagaaaaacatttcctctttatttttcattgacatttgtaccatttgttgttctgcgcttacagaaggtatattttttacccactcgtattttctctccctcaatttccccttgccaggggcttctgtttccagagaagtaaaataaataagatgctgttgttaatgctgtttacatcttgactggtatgattaagatttgtatgctgcacttaaccaatttttcttatctttattttgctgtttcatagctactaacagtctatatctttttcttttattcgatggggaaaagaaaatagatttcaaaatgggataccaaattgcattatcatataaatatgtagttacatatttttctttttgatcatttacatattaacttgatgtacttttagttcttgagttctcctgctcgtacctgttggcttgctgtcaaaggcgctgttcgttcaacatcatttttatctgcttttgttggaatctttcaggtaatctggttcctgttagtttttagaggtttcattataatctgcataaagtgttaacttttctgtggtgatgctagggggtcatttgcttacataggaaagttgcaacaaaagaccacaagcttgtatattggattgcaggtggaatatctgcgctttcagtactcatagagaaaaaagctagacgtggtgaacttgctctgtatgttcttccacgagctggggattctttatggtatatcttagtgaaccgccacctgctaccaaatatcaagaatgctgaggtacttacctcatattcttactctgttgtttatataagggagtggggaatgtggggttgcattaccgagtccgctaaaaaaatctcatctctgcatatccttagtaacaacttgcaactcttattttttaatcatctaaagaaggatcttcttctggtctctctccttgtttgtgaatctgcttcctaatgaaacaaagataactttttaccatataattcctttccttttggcttctaattagaaactaaaccattctttcaactgtacaggtgttcttgttttgtctgtgcatgggcgggataatgtattacttggagcatgagccggagaccatggctccattcctaaggggcctgattcgccgcttccttgcaagcagaataagcaatcctagccttccaccaaatcgaaatgcttcctacaattatttgcaaactcttgatgttaaaaatatgtcaaactcgaaggagaacgacgaagctgaaactaaagcttcaccttctgcgaaatacaatcttgaatcgataccagggctgtaagtcaaatttggggaaagatcaatagagatggacacagatctaactcttaagatttcttgaaaattttcttaaaattctggggatcttattaaaggaactcaaatactcaataattttgtctctcttctcattcttatgtcattcttgtataaaagtcaaactccggcatttgatgtacttgattgttaatgaaatcaatcagattgaccatgtttgagttcatagcaaaaaaaaaaagtttgaatagtttttcttccttttcaccatcttctagaccctcgcatatatttctttgacatgtatttctgtaatttattaaagaacaatacttgaattggaagtttcatagagatgaattgagggcttgtttggaacattgttgtattttatgcaatatttttatgtaaaactatatgtggt

SEQ ID NO: 378014 - DNA, 2446 bp, Cannabis indica
ttcggtaataattttaaatttcgctgtggtgacgtggcacatcggtgtttgtgcaaataaatttattaaaagtatttttgtaaataaaatcaattttaggtataatattgaaaaaactccacactcagacattacatttcataaaatctgccccaaaagacaggaagaacaaaattaagaagaaaaaaaataacatacctgactgactgactgactgactgacaagaacaaacaaatttgctgaatgttacagcagagaaatatggaaaaaagaagaaagaaataaaacaacttcccttttatgtgtatggatctctctaaccagagacacatgatacaaaaaattctgttctgtgtatactccgcaatctgattatacatcatctcaaacgaaatcccaagagacgaacacctcatatcaaactcaatctcaaatcttcagagaaatcccttaagtaaatttctctctgtaatctctgaaacaggtgaattaattagctctaatcatgttttagtataaaccaagcagttctccacctgcttaccaaagacacttcatctacaacaacttctaatcaatcatttcataaacttcctaggcagcaattcctgaaacaagtaatgacgaaagaaccttgttactacaaagactccattaatcaaatctgattcgtctgaattagggtcaaagaactaaaaataaaatggagcataacatgatacagatatcataaatgttaaaatgaggtgtaatttatagccagcattcaaagactcctaatttataggatgcaattcatgacttcaaaaacagtatacatattctatgtatttatgtgcttgtaaaagattggttttggttacagtacaagttataaatctgcagctaattgtttggtaccgaacaatttaggtagatttcagagcatttgaagtagtccgtagtaataaataatgttaagttgcaataacatgcaacaactaattgaatcaattctccaagcctgttgacttgctttaaggtttaaagtatattatggagtttatagtccatgcacacaggagaatacagttttactgttagtgacattataaatgtcataaacctgagtttaaaactctacttcagtcaagtttctaatgctaataatatgggaatatagcatatataataaaaagctttcacatgaagatgagatttgaattcaaaaatcagcagagaaagaagataatgttacctcttgcagattgtctattggtaacaccataacccccaatataaccagaatttttactcatgacatctgaagatccatttcctagtccaaatccaaacgagccagacccttctagctctgatggtgaggatctccaagtggcatccccataaagtgagccaccatcatatatgtctgcatgagtgccatcataaccaccatttgtggcatatgatgatgctgctgctacatttgcatttcttccaaagcctaaacttccagacccaacaaaaccggcatctctcccaccataactgaggttgctagtactataggttgaaccagcacctccaccttggtttgcattaggtgaggagccccaaagcggtccaatgctgccaaaagaattaactcctgtgttcccaccaccagaacctagaaaagcatttgaatttgagtttgcagcatagttgagattgccattgccccacaaattccgacttgttgtgcttagaatagagctacttccttcattgatcccaccataaccagcggcgctactgtatcggtttggggttccaccatatgaggggctcaatacccgtccatagttgaggttagagccatggtttgcattaattccatagcttggattcaaccctgtctcaagattcattcccattgcataaccattattgaatggtgaaaatccactccgaccaacagtaactggactaaatctaccataccctccaactgagttgagattatacccctgagagtatccattaagcaagctactaactctaccaataccaccctggctaaaaccacctaactggccccgaattggtcctggggataactcctttgggacagctcgcttaacctcaaccatcttgccattaagttcgtggaaggttttgtacaacactttatctactgcatcctctgaatcataagtaatgaaaccaaatcctctaggcctctgtgtgttatggtcatacatcactacaacatctgtaattatcccaaactgatcaaaatacttcttaaagtcactttcagttactgtcgatgctaaacctcctacaaatatcttttttgtacgagtaggtccaggtgacccatgaatgctgctgttacttctgttcaggatgttctgatcatccctaggaactgccttttttgcttcaacctaagattaaaaatctagttaaatgaagttg

SEQ ID NO: 378015 - DNA, 6775 bp, Cannabis indica
gaaaaaaatatgaaaggttaacctgtatagatataagaggagatcaaaatgaaaaataggagatggaattagatttttttttcctggcaaatggcataagtaggtcgatttgagaaaataagttgatcatatttttttgttggttaagagagggaatatataaaataactaggttgtataggtgtattgacatgtacagatgagtgatccaggaaagggaaagtcaatacacaattaaaaataattcaaaaacatatttattaattaaaataattgaatttctttttggtatgtaattctacttaaagtgagcatgagaactagagagagtaattgaaatctcccaattatctctagttacaaaattactatgtaattatgtggtgagataatcacaccaaaccgtgtaattactttcagttacatccaattccaattctcaagtgtgtttccaaacgcgcccttaattaaaaattgaaatcaaatttcatttacctatcataaaacgcacacttcatgttatacttgtataactaatcaatgtttttagtttctaaagaagcaccactcgagtgatatttgtcaactgtccttttttatcgacagaaacttagctatattttaaggaacacaatcatttttttttttgttttgtttttgctatacatagatattcatgtttgaaaaaaaaataaactaaaattatttcaactagatttgtccgtaggccttgaacttattaccaatgaacactaaagccactatttgcatgatcaataacatagagaggtgtgtcgtgtgtgattttatcttttttaatttaagagtgtaatacccatcaatcgcctctcgaatagaggtcaatgctaccaatctgcagccgtgaatttgaatgagagtctctaactgccaggaatctaaacctgcaaaatccacaaattaaaccatcaatgacaagaactttacaaatatttggcagcacctacttcaattcaattcaaaaggagcgaacaatacttcattactttgaatacctgaacgcatttaactgtggacccggagatgcaatcttgtatgtccgatgctggaatcgctcagtgaaaatttgtgaagtttgtttatccaatagatgccaattggaccctccatcatcacttccctcaagaaccctaaacaatatgtacgcttaatatgatcaatcagtcaagaaataatgacattgaacatgaaaaaatgaaatttttgataggaattttctaccaaatagctaagaataacaagaacagttgataaaaataggaaaatagaagaaaatattgtattgatatcggggtattcaagagacccagtactctcccaactccaagagcaatgctctcttacaaattcattcacaccctcaaccctttctaatataccctcctatatataccacatcaataccccaatacaatgacccatttaccctcattatttagtaccctaaggcctaacaatatcagccgctaggggtgttcatcaaactgctcaaactgctcgcactgcaaaaaaaaatgcggtttaaaattttttgcggtgcggtcgcggtttaaatttttcctaaactgcgcggtgcggtttgtgattttgaaatgttaatatgcagttcaaaccgcaccgcacattatacaaatatcaatttttatatttatttaggtctaatatgtaaatgttcaacccaaagccactaattattgtattattgaaacttaattttttttttcatatttattttcaaaccttatggtatatttgataagtgttgctcaagctttgttatatttgtgatagtttaattattggtgatagttcaaaccgcaaaaacaacaccgcaccgcactattttttgcggtacggtttccgcaggtttttagtttcgcagtgcgggtgcggtttgggaaatttaaaaaactgcatgtacagcttagtttgaaaaaatagtcagaaaccgcaccacccgcaccgcgaacactcctaccaactgcctgaaattcaccttgtcctcaaggtgaacagcttgaagtcttcaattgcgcctcttggacattctctgacgaagaaccaagccaacaaatgtatggtgttcaagctaggagagagacaccactcctcaatgagtcgacttcgatcaaaaaaaaccaactgagcaatttaatggttcctccctgtgtgtgcaaaacaagtggaaggacagccaccgctgtggctgcgaagggtgcttcggcgagaagaaaaagctaaaaactgagtctgcaaaaaactaattatgtccaggattcattgtcttaccccagttgaaaacccaaaaacaattagcccctaggaatgaaagagaagaattacacaccaaaaattgatagttgtgcttcaaaaaagcaacttcagtgtataatgcatctagttggtgctttctctcccacccgtcccaccaataagatggaaatgagagaaaaaactcagcaaacattgttaggaggatagaaaactgatcttggattaaaatgttaattaaaccctgttgctattccttagcccttttaaagatgattggcttatttccacacaaatttcccatagcttctctcaaggccaaaagttcacaacagaattgctctgtgtgtggcagcaatcaaattcagtgaagcccaccaaaggtgaagagtttacccatttaatagaatgccctcagaggaaggctggaacactcgttggcagagcacggtggaaagcaccagagacttgttcatctacccatcaccctcatatggctgcctgaaaaagttcagaatgccaagtacatgttgagatgagtacgatgaaacatgcacaataggcaggaccaaatgtgaagtcagaacaggcttggccatctctgctctatgtagtttgcttgtgtaaggtggaagtcgtgtctcctccattcttgaacgtcggagttggagacaacggttgtcagagcaagcttgagttttatgtgggacagagaagtttgaatggactctacctgagtcccattggaccagcccatcacttgcttaagtgggcccccttaaaaatgtgtaataagttgggtttaggccctacttgataggtttttttagctccattaaataaagaaaacattaagggaatccatttatactcttttaggccagatctgaatagcaagaattgggccaaggtagggtttcaaaaaaccaagcccacatgtctccaccatgaacgcagctcccccacaatcaggactaataggatcacacaggagtggcttctcttagttttccttcaatgttctccaaccgaagttctccaacgagacgcatgtcttcttcaacactggtgagctgtccatatcgtggtgtaaggtcggtaatgtactcgaccccaaattgagatcaaaaatcgttgtccattattaacggcatcgacgactcgctggtcatgctttccacaatcaaagagcttgtgagcctccattaacaatagcagaagattgcgttcatgccacatcgcttcccttgtcgagtttgacgaattttaagtggaatacactggctcaccttctcgttgtacaacaccgacatcgtccccaatactggcatcgttaccagcaccgacagtacgatcatctccggcgaggcaagcttcgtcactggaatggatcgatgatggcttgttatattctctacttctttttcaaagagcttctccgattgatagccatgatttgatcccttaatttccccctgtatcgttggagaaacaagaagatcaacaggtcgtttcctatcattctgcaactcttcctcctatgtgctagtttgatattgaaacctcagttgtccttcaatgtaaaacgccttggcgacaacatcggggagcgttctcagcttatattcatgcaccttcttcacctccattggaagagtcccaatatgtatcataaaggaaggtttcggggatatctgacagtgttgctgcaatcgaaatgaaccgaatcaaaaactccagcactgaatttatcatatcggagagccattaattcatcgaaaggatcgtttgcgattttcgggcaccagctgaataacgtgatacgaaattccaaccaattttcgattggatctagttcttccactgcttgaaaccatctccaagcaacaccctccaaacacgcttgagccacaactaccttcttgctttctggggtccaataagcctgaaaatattcttctatgcgaagaacccagccatacgggtcatctccattgaagagcggtagcaccatgacagaggtcacaagatcaagctctgataccatttgataggaattttctaccaaatagctaagaataacaagaacaatagatagaaataggaaaataagagaaaatattgtattgaattgatatctgggtattcgagagacctagtactctcccaactctaagaacaatgctctcttacaaattctacctcaataccccattacaataacctatttaccctcattattagttaaggataacttatcatcgaactagttaaactaattagacctatcgaaataaaagaaataaaacaaggaacgaccaagagaaaagttctctaagtggttagagactacataccaatccattggatccctttctggtgcatcattggctgacattaactcataggccacaagattgtgcattaggttgtctgacaccttatatacaagccaacaacctatatggtcataaataagaaaagttacaaagtaagtattgaaaagaataaatcaatttagaaatcaaagcagcaatggatagatcatactataacctttttactatttcaaatcaatatacttgaataaaggaccacaatttcatttggtctaaaataatacctcgagcaccatttggttcttcccatttagttgttcgcattccatcaaatgcagaagtggcctgaaatttatgaagtaaatttcttaagagggtaaaaattaagataaactataaagatgcaagcacataaacaagcaaaatacaactcacaattccgaagggaagttcttcaccactcgcgagaactgaaccagaatgtattctacttaatttcaacagaggcaatgcgagagaagctttactcaacttttcacaattcttgagattatgtatggtgtaatcgaaagcatccaaggctacaagaagagctagagaggttttaacaggattgtcagctaaacaaatatccacattcccatctgtgtcaaccttttcaagtgagagagcgttaagtaactcattcaaaaatggcagtgcttgacgcacaaatgattggctactattcaaatgtagcgagacattcctagttctaaaaggagatttttggagatctttgataatgtctttaacaaagccaagcagttcaagaactactgactgaggaagttcttccttaacaaaataagaaaagagtggaagaaatgcatcataaactctagtcacatgctcatctacgcatattcgaactggacaacaaaggcaactcaaggaatcagaaccaatttctgatctcaacttccgccattccttatcaccacttagtcttccaggtaatgagattgaggcatcatttgtagaatataaatctctttcaagtgtttgtctttccttctcatcacgatctttaagtgcagagataacttcaaatgaaaaaccacttcgacattctgttgttatcttattgaggacacttgtcaatccagactccgtggtaataattcgtcgagttagaacctacagataatgattcaatttaacagtatgcctctggtaagagttgcttataatcttcttctttttccttttaatctaagcagctatttgaatatataatacttttgtagacactatttacctcatgccacttccttgtgtaacgtttggtgacatcacataaaccgtcttttgcaatggcaattacataatttaatttcttgttccaccttccacaaagaaaaatattgatagttggaaagcagcaatagaaaatgcagcaacaagagaaaaactgatgagataattcataagtttctctttagaaattattaagtttggaaaacatacccattctcatataacaatggtttgtcgtacactccttcacaagggtcaagatgcatccatctgttcaatatagaatcaagaccaaaaattaaatacggaaaatctcacagatatagttccaaaaaaaaaaaaagcatatatcctttaacgagttacctcccaaaaaatggtgaaaagcactctgtccaaacatgatcagtgaaatccaaaatctgtccgaatgatcataaacaaacacaaatcacttgacaataccactatggcattggccatgataacagacatataagtgcttgtgacaggacataaatacaaagtattgtttatcacatattttgtctgttgcatcccatcacataaagggataagagtactaaagcattgatttgtttctcaaaagtttaattgtaatggatgaatttccaatataataactaaccaaacgggattcatatccaaaagctcgacaataaaatgtgaagcaattggcccactccccacaacgtccccttcttgtttctataagctgcattgatcatgaaaaaaaaaaaagaagactgagcttgtgtattacaaaccttaagggcttgtttggaacgccgtattaggtcgtattg

SEQ ID NO: 378016 - DNA, 4106 bp, Cannabis indica
gaattgggggcctatcacgtccttcggtgtaaatgagacaaaagacaaataaaagctttctacgtatcagctcaaagcatagtatcatcactatcaattttttgttattcttgggctagggcatcacatcaatgacacgtacgacgtaccttcttttttgtttgtgaatttaagaacctaacagaaaaaacaagatgactgatatttttcttatggttagtactggataaaagcttcatgaagcagagtattgagctacttggtattgggtcactaggcagtgaagtttctatgcgaacagtaagttgttgttttctaaaattcaatgaacttatgatctgggggttcctttagtagtccctttactgtgaccatcctgagacaagaatgagcattttcactgcaacccaatgctgatgttacattctgtttttatagcagcaatagtgacagtaattataattcatataattcatacgaggaaaacaagtgttatttaccagaatacagccactgaaagtgaaactcagcgaggtcaaaacatttgttgcaatattctcaatgcacaagggtaagcttgaagaagcttcatccacagcagttgttttctttccaatgtttctgcaatcataccaaactaaacaaattgcagaatttatcacaacatcaacgggtaaatccgaatcacgttctacaacttgtgcaccatgtttctctattgcgagaattttttgataggtacttcttctggatactatcatttccttatcaagattttgtgtgttaacaagtatcactgttttgggaagagatgacctgctttcttgagggctcctgtgattagactcttctggaaaggacatagaaggagccagtgaaggcatactgcaagcttctacaatatctgcagcctcttcaaatctgacattacacttttcctgattagatggatagtcaaagagtttctcctggttagagggatggtgaaagaacttctgattgttaacattctcatccctatgtgaaaagttaattgattcccctccttgagatacatctgctactgagttacacactgcaactttgggagatgtagcatctttatcaaatgtcttaactgtcggttcactgttctttccagtagtgactttctgagtttttctgagaaaatcaagatcattagaatgtgacatagacttgaataataatgaagccctctcagcattctttctagccaagcattcttcattcttcggctgtgggaaattatcacctgaaaattttcttggttcggttccaacagggatagagacattagagagaagttcctttgattctccgttttcctccttattaaatgcatatgtaccatcatcagagaagatgaaatcatataccacatttgtatcaccaaaagaatcccaaccaaaatcaatgttgtatgaacccatatcatgcaactctctcttgtagtttatactagtgttagggtcatagttaacttcttcaagaatatgccagtccaagtatattccatctagtgcagataagggctgcggttttagttgagcaagttttcttttaataactgtgtagattgacctcagttttccatgatcagaaagaacaggtacgggcattgatttgaatgtgtcgtctacaagtgctagctcatgactaacaattaatttgttgaaattcttgaagttcatgtcttcattgaacatccagtcacaagtctctgtgtcatacactgtttgtctgttaaagagttcttcaaaaatttgagacgagtcctcatcaaggatttgaaattcctgataaacaaatggtttatctgacacaaaacaatcacaatctgatgtcctttgaattccagagctcatcctaatctgtgaaatttcgacgagacttatcaagtttatttctgggaaattgtccagggatcccacctcatatccacaagagtgaggtgatagactatggtctgatataaaccctgatacatcataatctttagaacccaaaagctctttcttgttaaattccgggccatctgtttgtaaatgttgtagttcagcattttcaataatagaaagaaacttttccttcacagaaaagtctgcaatatgctccagaactatttcatccacttctaaaatttggaaatttacttttttaaagtgaatctggtcctggaaatcttcggggggattatctttttgccctatgggatgctcaagggcaatatcttcgacagtcaaaactgatttgtgaacttcataaggataataagttgcaggtcctggattgagcatatcctgcaataagaaccaactttaattagcaattcaatcagcaataaattaatggaggattgaactttattatcttcattaatatgttacactatttgccaaaagcctagttaaaagtcaaaccagggatagggagaaagcaattaaagaaagaaaaaaaatataagaaaattaatgaaaatgacatccaattgcatagaacttaccaaaacacacacatacacataccacacacactcttccagaaatttgaaaagcctcaggataacttctcatgtatcaacaacataacaggaccgaaaaaaaaaaatcaaagaggaattcaactatatggtataccaaactttcttcaatctctggaacctcggaaagaatgcggatccccttgttttcaacgaatgaagatgcttcctgcaggaaaagcaatcacgcaagttctcttaagctaaagatttttcacgtgcatgagaaccaaactgcatctacatacactaaagtataggaaggaataattgtaccacgaagtcatcaagctctggtgtttcaaattcaattacttcatatcgtcgtggaacgttaacatcaacagtacctgcattactcttctgcaaataaaaccaattaaatcaaacatataatctaactaatcctccacaataaggactaacaatctgataacgccagttccatacattaagaacttccacctcaacaacttcagattgagaagctctgtaactctccacttccttttcctcgttaatagccccaatatcctggagcacgccaatatagagcattgccaaatgaaattttcaaaagcgtcaactaatagacgcaacaaaagatcggtagttcacatttaacaatttttttaaaaaaaatctaatcgatttcgagtagttaacaatctcaatttccatatttgcagttctggagttgatttattaaccaaatgcttaccaaacaatcgaagaacgcctatgaagtttctaataatcgtaaactacatgttgaactaataccgaaatatcgcatagacctaatgcattacctccgataaatgagtctcgtggcttctggaattgaaacttttatgacacgatgacggaacatcatcctcgaattcttcgacagaggtgacgatcttctgaggaataacattggagaagaacttggaaagagcagtttggatgggtaaattttcgattggaagggagagttcggggatggaatcggatcggaggaagatgaggtcggagaaggtggaggtaaggggaggagagggagagacttgagaaagtgggagttggaggaagcttagggtttcgtggagttgaaagggaatggtggggaagtaatcaatgtggggaaaacgagctcgcatttgagctttgaatgttgttctgagagaaactttgaaggagaaagaaagaagaaaactggagcaaaagtaatgcttgctccacaaaagaaaattttggcgctcaaaatggctggttaccgtttatagcaaaacaattttttttaaaaaaaataaaaaataaaataaaataaaaacattttgtgagtcctaaaatcaacttgtgcgtagggttgcacataaacaccacggggacggggacctgcgggactcgcccctaatggggcagggatttcccgacttagcagggattagaggcggggacggaattgattttagataaggcttttttcataaatgtacaacaaaaataaaataattacaaaaaatgtagcaaaaaaattatttgaaaaacttatacattt

SEQ ID NO: 378017 - DNA, 5336 bp, Cannabis indica
gaaaaggaaggagagaaagaggaaactcatgaagtgattgttgaagaaaaagttgaagtagtggatagagatatttctctttggggtgtacctcttttgcctagtaaaggagctgaaggtactgatgtggtccttttgaagttcttgagggctagggagtttaaggtcaatgaagcttttgagatgcttaagaagacccttcaatggaggaaggattctaagatagattcgatcttggatgaggagttgtgtgttgatttaagctctgctgctgatattaatggcgttgatagagaaggacatccggtttgttacaatgtctttggagtatttgagaatgaagagctttatcaaaagacttttggtacagaggaaaagaggagccatttcttgagatggaggtgtcagcttatggagaagagcattcagaagcttgaattgaagcctagtggagtctgttctttgcttcatatcaatgatcttaagaactcgcctggaccctctaagaaggagcttcgaatagcaacaaagcaagttgtggggctattacaggacaattaccctgagttggtggctaagaatgtaagcttactttcagttttttttcttttgatcaacatagcatatgtttgttctgtattgattgttttctgttatgtttgttttggtatttagatattcatcaatgttccattttggtactacgctctcaacacacttttgtcaccttttctcactcaaagaaccaagagcaaaattgttattgctcgccccgcaaaggtcacagaaacactcttgaagtaagtaattcattcttaatattacacttacaaatggaatacattacgttaatgtgaattcaatgactaaataacttgtatggatgaaacaggtatattccagctgaggaaattcctttcaaatatggtggtttcaagagggagaatgactatgaattctatggtgatgataactctgtttctgaactctaccttaaagctggcatgactgaaaccattgagatacctgcaccagaggtaatctatataagaaaatgttctgattttcttttttcaattgagccctttcggatggtcacccgaaaaagattgattttaatatatgttttttgtctttggtaataggctgatgctacattgatctgggatgtgagtgttttgggttgggaagtacactacaaagaggagtttgttcccaatgatgaaggatcttataccattattgttcagaaagggaagaaaattggttcacaagaaggacctcttcgaaacacctttagaagcaatgagcctggaaaggttgtccttacgattgaaaacacttccaacaaaaagaaaagggttatgtatcggttcaagaccaagaagagtccctcttcataagaaactcaaaatatacagatggaaaatagtggagtgggggaatatgctgtgttgttcaatttttcattctttttaacattcttttgaggggtacaacaagaaatgagtgagaggatagtgaaatgtgaaaaattcattcttttgcaggattggaatcatgaaatgtagtacgtggtttgaaattgtttgctgtaatttacatgtgagtgaaataatattggtatatttgttttaatggaaatgtttctattattagtattgttttttcattttattttgaaaaaaaaaacacatgttgaattgcttgcttacaggctatggctcccaatcaagtgatatcctgaatctgccagttgctttttctttttttgaaaagatgtctattaattagaacttaacctcacgatcattacagaataagtttttcgagtaagaaataggtaagcaactaaacctattggtgaaccctacgtagccacagttgcttcctgccaagcaacgacaaactacagcacacaacaatatgatattttcacaaaagatggacttttgcaatgaggattataaactgatatgttttcttagtgaaaagttgcacaaaatcactagattatttaatgatttcctccttccatttcctgcttttaagcgagtatttctcttttttcttttcactgatttaggccaccatccttgtccaacatattcttcaatcacccactcaatttttggatctgaaagcataacatatcccatagaaatcccaaacacaagtcctcctgcatacccaatcagtgcaaatttccaatcaaaaagccttgcagcgtctgtatcgtcttctggtgagaagtccattccaactggtggcggttgtgtgctgtgctctccgcatccctctgacaatggaaatccacagagtcctagattttgaccatacgaatcattttcaaatgtgttgaactgctttccggttggtatggctccaaccaattggtttcgcgaaaggtttaggacttgaagagatgtcatatctgtgaattccactggtatttctcctccaagcttgtttgatgataaatctaaccactcaagattagtcaagttagccattgatgctggaatagaaccattaagcttgttatgtgagaagttgagtcccttgagtgacttgagatttcctatcatctttggaatatgtccctcaaaattatttgatgaaaaatcaatggttgtgaacatggattggattctgaccatctcaacagaaagacctttcaatacaactgtcacagagtcataataatatccggctctctgataatattttcccatgtattccaatgtttctttatgtgaatccatcatagctatcattatttcaaaatattttgtgggcaaatgaccactgaactgattgtgggaaacatcaagaattcgtaaatatcgaaatggtagccatcccaagaactcaggatagccaatgggaccatggaagttattagatcttaggacaagaacagtaaggattggaagtgtttccaaccagtaggggaagctcccattgatcttgttgtttccaatgtctaaaacctccaagatcttgcagttggctaagctttttggcaaaccaccttctaattgattaccattaaggttgagagtccttaaactgccacaatcttcaaatgttgaagggatcatgccatgaaacttattggattgcaaatttaagatctgaatggaacttaaattagtgaggcaaggaggaatcatcccagtgaagctattattggccaaatctagtacactgattgtttctagcttgcaaatcaaagaaggtagctctccactaaattgattgcttgaggctgaaaataggtatgtggattgtgatgggattggaagactcccttgaagcatgttggaacggagatcaagatataccattcttttccatgaagcaagctcaatgtttgtcaaaaaattatgggaaagatttaaaaagtacaatgagcttgtccctacttctccaacccatttgggaacatttgcagcaagttgattatgagaaaggtctaacaactctatatttttcaaggcttttataaagtgtgggaactgatttatattgcatgaagacagacgcaagtttagaagctcaggcaaagtataattaatggaaccagaagaagctgtcgaaaaattgttaaatgaaagatcaagagaccagagtttcttcatctttgagaattggctaaactctatggcaccagacaatttatttgaagaaagatctaaaactgaaagatttaattgctcagaaattgatcttggaattgtgccttctaattgattatgatgtaaatcaagccaaactaaagaccgggtttggaattcttttatgaagccactgaattggttgccatgaagatctaaatggaacaaggaaggagtagcatacaaccatgaaggaagggtcccattgaacatgttatcaaacaagtctagagaagtcaactgcaatggaacaacataagattctggaagctccccttgaaaattgttgcttgaaagatccagagaagtaattcctttgaaattcaaagagtaccatggaacttggccgtgaaaattgtttgctgagaggtctaaggcgataatctgtgtgaaatcaccaagcaatataggatatgatcctataaatttgcattccctgagcagcaaagtgttcaaattccttgaattttttgtaagatgagctaaatctatagagaattgagttgaagaaagatctaatatcttgagcttactagtccagttagaccttggaaaagagccagtaagattgtaattttcactcaaataaagctcttggaggtttggaaagtgaaaaatattttctgggaaaataccatgcaatccaatagattcgagattaaggtatctcacagaggatgacaaatttacaaaagaattagatgataaagaaggtgtataaatattgtcatgcagatcaaggtctataagttgagttaagttttcaacaattcttttcatggttgaagactcaaatttcaatcccaaagaatataaatgaagtgtgttcaatttggacaagtgagaaatctctactgggacatgaccagaaaaatcactactagagaggtcaaggtgagttaaatgagtaaacttactgaattgagatgaaatagtggaatcctcaaaatcattaaaggagagatttagtctccgaagatggctgagggagaaaaggctgttatttgagagcaaactcccttgaagcccggagcagctgacatcaaggttggtcacgtgaccagtcagctcgtcgcacgtgattcccttccacttgcagcaatttgtaccatttttccaagagcttattttagtaacatcacaaaagctagtgtctacaatggaaaatgagttcttgaagttgagcaaagcagaattttcatgaacatgacataatggtgttgcagaggaggtaatgaaaaagttggattgagaacaaaataggagaaggtgaaaacataataggctaaatgataacttcatattaatcttttaaaattgaactgagaagtttgttcacatatgaagctttgggtcacgataagattagtatttatttccaccaagtcgtcgtgagtctttctgtcattcattattatttttgttttcaaagatgaaatgaaaaagcaatcatagctagtctatgaaagcaccattttcacgactttaagttttcaacaaaggaaatattggcttctcttacataaagtacacacaaatttataagtcttaaatgatgaattatacttattaaaattgacttgttaaggtggtgtttggtaacatttttgttttttaattttaaaaacaaaaaaatgaaagtagattttttgcttt

SEQ ID NO: 378018 - DNA, 1657 bp, Cannabis indica
ttctttatgtagttttaaaatgataaaaaatcacaaatatatatttaattttacattttatttagtcaatgattgtaatgactacatgattaaatatgtgaattagtagataattagaaaactattaggaagctaattattattattattattcataattatatgtgtattagtataaaataatacctattatcaaaaataggcatcactgaagtaatttttaaattatggaaattttattgagttctaagtgcgtcatgcatgttatatataaattttattctttttatgattggtgctcagtaacagtggaacttgaccatttggccattagtgtcatgaagatttggtttagcatcttaaattattgggtcatgcttttataggacatttaaaatatcgggtttcttaattagggggaataatttttggccattttacctttaaattatttagattacttaagcaagaagaaagggacaatattataattttttcttaaagtaattttaatggattatagtgtaattcctagaatcctttttatttctgatagtttaattttataaaatggagtaaaacaaattaagtttaaaacaaaccctccacccatatatctttctctctctttcagcctcaccctaaaccaagaaaccccagttcttttttatagagttcagacataattcaagatatttaagctaggattttgaagtttattttcttagaaaattaaaggtaaccatggtcttcctcttcttgcttgaattttatgtttaagcaaggttttattgagtaagtttgtaattttaattttgttggtgtttgttactattaggattgtattttgagggttgatttatattagtttgagttggttttgaactacttggttgtagttgttaatgtttgagctaggtttgactttttaagcttaaacttagctcaacaatagtacatttatttttagaggtttgatgttgtaatttttcgatgaattatgtttattgtggggtaattaggtgttttagaaggtttcattgaatttaggataaaattgaaataaaaaagttgaggttttggttttaaaggaaacagttaaccgtttggtcaagtaggaccccacaaaccggtggactgtttggggatccggtccaccaattggggtgattttgaagggcctcaatttttgtgtttcctcaatatataggatattacaaagttatttatcaatagagaaattttaaattttgagtttaagtcaacgagagtaatttagcaagtcgcttatcaattttacgttattttgacttagggccattaattttcaagcaacaatttccactcaaattgccaacacacttgattttagaattgaggtatgattagtgtaatagatggatatatatatatgtatacatatttggtacgcatgttttagtttctatcataataacatatgaggatattggtgaggtgtatatagagctaaactaaggtattgacaaatttatgttcagaaaaatataaaccatcagattagcaatacagagtattagtgatgtgtaaatagagttatactgacatactgaaaaatatttgttcaaaaaaatataaagccatcagattagcattgttgcctcagattttttccaaa

SEQ ID NO: 378019 - DNA, 1652 bp, Cannabis indica
caagacgtgcttaggcacgttattattatttataaaatataattagattaaaaaatatatatttaatatcaacatataatgaaaaagtacgtaagtttttttttttgttttttttttttttttttttttcttgtaaattatgaatttaattgagcaaagtgtatcaatttgaattgttttaggatttttacacaaaattacttaaaagtattgtacttttttaaatattaattttaattaggttttttttttcaacatttttgtgaacttttttgttaaatgaaaaaataactttccatatattttcgttaaaaaagtcaaaatttgtaaaaatattataagaaaacttataaattcgtatttttgtaaatttttttaattatttttgggtactaataaaaatatctttttattttataaagataatatatcagtattgttatttaataagatacttatagaaattgatcgtgcattttgtgtaaataagtgaaagatttatatttttcatagtttcaataaaattaaattaattatcaatcaacttaatttattaaagagcattactattaggcaccagtggtacataataccttcaagatatgtcgcattgcgtttggttagcgatacttaaaagttattacatttaactatatgagatccgatacttagttacaccaatagcgatattaacacgtaggagggtgctagacatcactggtacctttttgtatttctctttattaaacagtataaattattcctttttatttacttttgttaacttctagaaaataataaatatattagttatatctatatacgaaattattataaattatttttttatgtatatattatttattaaattagaaaataatctgcgttttgcaagtgggtattttaaatatttattttcagtaatgtagatttttttttatcttaatcatttattaattttattttatatttattgagttattattaattattgaaaataatggaattaccataacagaattggaggaggaccataatgatgacaactaatcattgtttgtcaaatagtacacttttctgttatttgattctcttggatatttgtattgtgaatattcctttttattctcttctagaattatcctttctgtactataaatatcagtacacattcttgtaatcgtatccgttgagcaatataggaatatagcagtaaaagctttctctgccattatctttgcttttattctctttttaacttggtatcagagctagctttccatggctgctcctgctgattccactgctaccacaggaggttctgcaacccctgctactccggttccatcagcacaacaacctgctagtgctactccttctgtatccatttttcaaagtcttgctccgttaaccttgaagcttgaccgaagtaactacaccttttggaagtcccaagtgttaccagcactacgtgctcatgacttttataggtcgaactgttttactaggagacaacaaggcttgtacaatacaagggattggctgtgtgatgctgtagatagatgatggatcacaaaagaccattacagaagtaaagtatgtccccaaccttaaaagaaatctcttgtcaattggtacattagcatctaaag

SEQ ID NO: 378020 - DNA, 2198 bp, Cannabis indica
ttttttttttctttttcaatttggttatattatttgaatatctcaatttataaccatatataaatggataagtttataaagaaatatttatgcatgattttaaaaaacatgatttagttgttatctcactaatttgaattatatgactaattaaaactttacaatatttttgtttgcttttctaattagatttgaatgacttatttgtttattatattaaaagagcattcatacacatgatctaaaagtgggtaagaatggggcttgtcccttaatgagccaatgctaggggcttagtggaccaggatcagtatcgtgctaaacataccaagcctagactagcctgcgatatgcctcactgtgcgacagctttagcgtagaccagtgctttgttagggcctgacaaatctagaccaagtcagggccgaatgcgtcaaaggtcctgccagggtcactaggggctaatagaaatttttggcatggctatgggggattacggttacgatagttggcattggcccgtacattttgtcaaagtcctggtttcctttcaacttgggcaaattgtaagcccatatcactggtttactcgagtgcgtttgcttttatttttcatagatgattgattgtggggttggtgcttgcaggttggaacaacagatagcgtgatgggactcccgaaagcactcactgagaaacttttaaaagaggctctctagtttcctcaacttgttgccttgtttcatgtacttggtacctatctaatttgaactccattctctactaattattacgtccctggaagcatattggagagtggaaagggctaattattggctgccctttttaaatacacatattgtgcaacatccagacaagctattatttattgtgatggagcataggaaaggagttttttttttcttttctttttactttgtgccattatatcatatcgtagacaatctgttccaaaataggctcagaacattctgaaaaatgtcgctggtgactcgtgatatatcgtgtttaggtgtaaaagtaagccccaatgggcttagctatgagatgagtttcctcatggttatggactcatggggagcaagatggttacattggcccatactcttgcttctcgttaataaagtcacaaccatggggagtcatgcttatcagatgagatgagtttcctcatagctatgagacgagtttcctcgtagtcatggactcatggggagcaagacatcggcgcgtactcttgcttctcattaatggagtcacaattagatagggatgacgattcctgtttacgaatcatatttgtgtcgtgttgagacttatatataacaggtatatgtctgatccgaatatgacccgtttgataatcgtgttaaaaaataaaaagcaaacacgacccgttttaaacgggttgatacgacatgacacgtgtaacccatttataaacatatataagaatattttgtttagacatgtcaactaataatatattttttaatattgaaacacgtttatgtcttatttataatttgttaaagtactaaaataattttaaataggtcattaacaagtcacttttgtattagtcatgtcaaactgaacacaatttgtttattaaacgggttggacgagtcaaccttagtacgacccgaattcatttaatgcaaaacccaaattcgtcacctcttgtacggttttgagtggtgttattgtgtctgtctttgtcgattctacaatcagattaatacttaagttacccttggtagtcatgaaattagtgaaacgaatatacgaacgtgaaatgaaataaaatttaatgtaactaaaagaaatagatgaaacgtttattaactagaatgatctttctcccggtttctctagaagaaatactccattttactaaaatgtataagaaacgttatctcattgaagtgacatttgatcttttaaattacagccaaataaaagaatgaatcgtaaatgatttttcttttaaggatggtaatttctgccattgtatttaattatggcctggaccatttagtttgttttaaccttctactggtgtgtggaagttgtccgcatctttattaggtagagtttggtttacacgaatgagtgtaggaatagaattattatttttaaagaaagatcattcaagtatttggtttgtttattgt

SEQ ID NO: 378021 - DNA, 1522 bp, Cannabis indica
acacccttttcatgaggatctacttaaaactcttggagaatttccttcttattatctttgataaaatagaagaataacaatcaaaatacaaataaaatattacaaaaggtttttagaaacggttgacaatattttaaccaaataactagtggtttcaacaagtgtctcttttatttatagaattcactttaattttaaaacgaataaccactataaaatctttggcccttattaatgttaaattggacgtatattgatttaaaagttattagagtcgttagaatatagtacaatgtttacaaaacattcaaaaaatgcacgcagatgaacctttaggtagggtatctatataacggtccctaaccttgtatgtccaagatgtagacaggtactatctccaatctttgttcaactcccagatgaacctttcgtacccatctccgccaacttggttgggctaacgatggtgttgtacggtaaactatgaggactctgacgaatcacttgtcacctcccactcatcaaaaacttaaagttaatgagctcttgcttgatgacgatgaagttgaatggagcctgggctggtctttgtgaagtggctaaagtaaatctttatctatccgatgcttacccctaaaaattgcctggatccatctacaatagaaaggagagagagataaggaccggatagatagaatgtcttctctaaagaaaaatcatcactgatgctccgatcagacaaatttaaagatcaaaggaaggaacttctaacctgatgacaaaaattccaaagcaaacaagctcaagaacacaggaagaactcaagaaatttccaaaaatgtcgaacaaatatttttgaatgttttataacaaagaagtttggaattaacaaaaaattaagaatcataggtcgctgcatacattcggacccaatattaagaatcctaatttctaacgtcaaagaatatttcaatttgagcctaggttttacaaaagcgatccaagcaaaaaataaaatgtagaaatttgaaaaaatgcataaaaattataaaacttgctcactgttggaagtttatggatgatgagttgacttggtttctagaaattgcttcagggttttttgaagcttcaaagaagaaaaactgggaaattctgaagagaaaaagaaatttttgctctggtcctcaagtttgaaaatgtgaaaatgaatgggaaggatacctaaacccctttttgtagtttgctaatctcaaatttcaaaagttgggttttcccccaaaaagaaagtacaatcaatacttgttgaaaagtacaattgtgagcaaatggttctcacacaaacttcaggggtaaatgttatctcaatttctacataggataatgtggtgttattatgagtgacacatggaaaaagttctcaaacttggacgggtagtatttctcttattgtattgttcagggtgattcatgtctaagatgttagacaatttatatgtataaactgaaatatatgtatgtgtat

SEQ ID NO: 378022 - DNA, 4516 bp, Cannabis indica
aagaaagtgaaaccacttgaatgggatgaaggaagcactttaacattgtttttgggcattatttagtatacttatctttgcaccgttcatatcatctaatcagaggttgactactcaatataaatgcaccattaatagtggtctccaacacaactgtcagtctatgagacggtattttatgagggagcgtagtaattttttacagtaattattaatttaaaatatttaatattaaattatattaatagtgggatgatactttaggtgatgttgcgcaccccttcattttgttaattacaaaaaaaaaaaaaatagaacgatttccaactatctttttattttccttaaaaaaaaaattgtactatctttatatatatataatatagatatattaaatatttcttaattgtctaaaacatcagactcatgccaggtcttatttgaaacaaaacaaaacgtgagaaatataaaagttgaattaaaacattgaaaagtgttgaattgattggtaaagccttaattacaggaattgatcgactaaataaaattcattaattcattcagctgtaaaaaaaaattaattctttcacaaattgaaatgtacaaaatttattctcaagccataggcatagcattgctaaaaaaatattaatttatgttgaaataaatcctcacatacattaatttattagaatgttaatggatattgcacatacaaaatttgagaagaactaaattgtattaatccttaaagaaaaatcaaacaatatccatttacatcttaataaaatatttagttacttattgtcattgtaaacaattgattaagactaattaaaaaatagaaaaaaaaaactctttaaaaattaatggttgtagcttctaaggtaatttttttgcctctattttcgtccttccaaaagtcccaatcaaaaagctacctttctttttttgaaattagggttttaaaaccctagtgaggctctaaaagcaagcgggttacgacatagccctttcagtatcacggctcaggtacttggtttttgggcaatgagcttctttgtgcgacgactgataatatattagtcataactctttcgatattgctcggaattaaatgatttaagatattttagaaagttgaaagaaagattcagaacttttagtcaaaaacagacttgaaacttcagacttgatttttgatcacaaataaaacgtgtcgagcatctataattttgaaatgttcaccaactatattctagaatgtcaaattccatgataaattcatcagattcatcttatttaacatgtttctttccattttcaattcattttatgaattttaccatttaaacctaaaacaagtataaaataagtgtaattctgcacaaaataaatataatcaattgaaacacacctgtaaaatacttcataaaatgaacttaaaactagtatatcatgggattcatacaaattagtgagaaaataaaacaaaaagttctccctcacttttaaagagtatatttccctttcttaatttattttattttaatttaatttttattaattaacaataaaaagaaaaatatgctcttcaataaaaatctataaataaaaaataattaaatgttctaataattataatttagtcaaattaaaacattctaattaccatttttttatttaaacaaaataaaatgatattgttttcctttccaattaatttagtatacaaaataataaaatatcatttccgattattttatattttaaaccgattcatttttttattaattattccaattcattttttttattgattaagtgtataaaaaatgttaataaatgaaataacattggcactgatcaacaactgctcaaatataaaaaaatatatatttatatatttatatataaaagaatcataacacattcacaaaaaagaatataataaaagtatcaaactggtactataaaattgctacccaacaaatgtgtttgataattcccaattcaatgaattgttcaatgttcttgaaagaagctgagcaatctcatccatgtctggccgagcttccggattcttcttcaagcaaccttcgataattcgtaccacaaacacaacaaattcataaggatatttctcttccaaggagggatccataaaatgcttcaaaccatcttgtttttcttcttcatcatcattaataagtagagcactaaatgaatcagataagtgcttattttcttcatacaaaacagaaacctctttccccgtgagcatttcaagcaacacaactccaaatgcatacacatcaagctttgtagaaaccactccattttccaagtactcaggagccatataacctattgtaccaacaacatgttttgtcaaagaatattgaccatcatgtccttgtgttgatcttgttaaaccaaaattagcaatcttagctctaaaatcactatcaagaagaatattactactctttatgtccttatgaacatgagaagaattagcaaagttatgaagataattcagccctgtagccacatctaaagcaatctgaattctctgactccaattcaaaaacctcccatcttttctcttatggtgaatccaactactcaaaggtccattggcagcatactcatagacaagataccaaaaaccgccattgaaacaaatccccgaaaggcgaataagattcgaatggttgatcttctgcattatattaatctctttagagatatctccatcaactttcttgatagctgcaaaatctccatttatgttacctttgtaaacagatcctttgaccaaattagtactaatactaaaatcatttgtagccaaccgaagttcctcgaatttgtagactttgattgattgagcaatatcagataaactatctaagaagtcttgtgattcttcaatctttttgtccactacttgtttctctcctgcctcaaaacttttcgagacaagaacaggttcttcgagttctttactcttttttctcaatactctgcagtagattatggtgcctaaggccaatataaaagcagttcctccaagagcaccaatgagggcataaacccaagttttgtttgagctctcattagaagagggagtggtagtattaggacgagtaactggaggcggtggtggcgatgttggtggctctacagttatagaatttgatggtggcttatcaagaggaaccaaaagagttgtgtttgggaaaatggtgtcttgagaaataccatttgtactaacaagtaagttttgatcaatcttaaatctttgacttataagtaaaagaaactcacgcttagctactaagtagctaataagatagttcaaacccgaatcgatttgattctttgtaggacaagcacatctaagaggaacactaattctttgaccttgtaaaagaccactaggaatgggattttcgggttgattagctatagcttgacaagttgtgaggccttgaaatatttcattagcaatagtggaatattggtcaccttggttaacaatataagaagtgtttgattgataaaactcaccagaacaggaacagttgacaggaacaatcaccaacttgtttgtatcaaacgttgttgtttccgggactgaatttatgagtgagacttgagaagggtcagcacccaacagagtagatatggctgaaacattgttgtagttaggaatggctctgaaagtaacataagtttggcaacttttgttaactccattgcagaagtagccaagaccagaagatgccttatgttgatcgttacaatctgatgtggtttttcccacgtaaggctgctgtgcaccgatcaaataacaactacaaatgaagaagaagaaaacagagagaagagaagaagagaaactcatattgttttggagggtctgaaactgaaacaacaggacattatagcataataaataagctgagattgactttttctaagaggtaatggagaagaagttgtatgaaaaacttgtaagaagatcaatcaaagggttgtcatgttctttgtcttagtcttcggttgaccaggcttttcaataattgggcaaaagtttgaccttgactagtataaaattttcatcaatagccgccactacgtagtatggtacgttatataattttatataaataaacagtaaggcgtatcatatcatttctccttctacttaggtcgcattcaagaaaaaactacacaccttacttgattctctttcaatattaactctaatataatgtttggatggaaagttgcatgaaattggattacatcatattttttttaagttaactatgaaagctctgtaatttctttggtacctatgaatctatgatgcttaagattagtgtaacaaaatctactgcttttagtagctttgtctttagtatttaactggaaaaaaagagtaacattttataccttatgttttgtaaaagttattaattggaccatctattttgttaaatga

SEQ ID NO: 378023 - DNA, 1435 bp, Cannabis indica
tgtatctatgaagtagcctttttaaaagagtgttttatatttggtgaccttttttacaacttggagagccaactccaactatggttttctcttcaattattttcatcttcttcaaaaagaaaagaaaagaaataattttaaaaattaattctctaactgtgtttgaagatcaaagtagacttcatgtaatatagaattcatgtaactcgcattggcttaattaaaattagtatttttatagaaaattgcatggtataggcatgaatggacgtttctgtttttgacatggagaaaattaagattatttatttgtttggaatatggttatgtagagtatagatattgttaagtttatttttatgcatttttagagtctaatttaaagtatgttttagtatttttattattttatatgttttttggttatatataaaaaagataaaaaaataatacaaatttatagtgggttggttaagaaaatatttatacaactcaaataaaaaaaattatacaaatatcttttacactcaagctgcacgattgatgcttgagagactcgaaggccttcgtgcaaacaaacaaggacgacaacaatgaatcaaccttgacagtcgaagaactaccactaattctagcaacgtcacctgagaagaagactcaaatcaatttgaatatttataatttttgactgatgcaaaaatttgcagaaaaactagtttgaaacataaattcaatcctgaattataatttaaattctagaaaattaattctccgaaatttaatttgcagattcataaaatgtagatctataagaaataaatctggagttcttgatcaaagcaaacaggtaaattcaaaaaaaaaaaaatgtatcaatacagtagctaataatagatttggagttctcgttgcattatcgttgttttatagacttcagatttgtatttattcaattccaattgcgaataattaagtaaattcacatttatctcgcgctacagatttagtagcattgtttttagtctttttgattgtatgtagttgaattgttgttggttgtcagttttatcaatgcttcaataattaacgagtaaataattacgagctggtaaccgtataatatttttagtcttatttacagttatttcacattgacaatccaacacaagactcgcacacaaaacatttctaatatggtcagtatttttatattttaacatttgttgagttcacgttggtttacaatgttctgttgtttcttcacaaaatattctaaacatacaagtcattattcatcaatgcaacaaaaacttttttaattgaatctgatctaaagttagtattgggagcaatcagattgaaaatctggtcttataacaattgaattatgtgagtagcgatggtgtggtgtgaattgaagtaagacttgctttgt

SEQ ID NO: 378024 - DNA, 2891 bp, Cannabis indica
tagcccggaagttctaaaaagtcataatctcatgcaaacagaaaaaaagacatacctatatctgtgactgctacacgaacatggagattccggccagtggcatactcctcctgaagattgttgagctcctctgaccatatccaacatgctgagctgccatggctcatctcagcttcttcaaacaagtatgcttggcactgacaattattgagacactccactttgcattcctcttcagtcttggcattgaactgagagtctggatttccaactttcatcatcttgaggtccaagaacgtgtcaatctccgaattgttttgacatgtagttgtcctcctaacacacccttttgagtaatccccagtgttccagttttctggtgagattggcttgaaaccaggcaaacatttacaaaccaagttgttcttactattgcagctaccaaagtttccacaagcattgtatacactacatttgtctctgggttccgcccaaattggagacgaaatcatctgagaatcccacctcagatactgaatttgaccagaaacactcataactaatcttgtgttactgtacaaagatgctgtgagataaggaattgagtcatttctaactgtttttgacgtgaagttagaaagcaaataaagcatagcaggaggcatctcattgaggctaataaatctacctgaaactccactattccagtactttactgatcttttcaatataatcacctgattagttttctcttgatcttgctgaaatgtaaagttccctgatcctggatcaccataacttgtccaggaagtcaatactaaatcttcactcaacatcatgcctggaagaaaagtatccgttggattttcaaaactctgccagagaacactcattgagttgtcttcagggtctatgttgctcaagaccaaattcccagaatccattagcttaaccactctattcatctgggttgaacttggaatctttgttgaccaataagtttgtccacttttatccataaccttgagatttccatcatctgaaatggcgaaaactccaccagtacctgataaaggattatctctattggccacccaaacaactgtatgtggatttgacttgtaataccatattccaatataccttctactatcatagcttccattaggagtgaagaatcccagctcaaaaacctcccctgctgaaaccagagaatcttttatctcatcactgagcaaacttttaagtgttatggtatcttcagctgagtaacacaaaaatgaattgtataataagaatgagtagaaaaagaagataagaaaaatatgattttgagaccaactacacatgattatatttgtttgctttcttcttttgcttaccataatgtgttagaatttttatgtgtccgcccaaaaaatcttcttaacctctaaattctaatcaacagtggcacagtaaaacgttaaataattaaattttccattgagcccgctgcagggattcacaagactttcttctctgcataaaaaggtagccttgctgtttttcattatcaaagcgcccccacattctaatttattttttacaagacgttaacatttgcttagacttaattggataatttgattcaaatgtcgtttgtggtcataaatatttcagttgacaatgacactcgcaagtattgaatattatattagtgaaatgaagatttcaataatcaataaaagccaaacgaagcttgaaagtgggaataaacaaagggtcgggtcgagcatagatccgcatagacatgattttcaaagtcactcaaccatacacgtttttaactgaaaaaaaggatagctttcatgactaaaagtaaaatatttacaatattataatcaacatacatataattagagctacctgagccaaattaaaatcacataggggttgggatttttaatgagattctagctaggccatcattgatattatcaaaactaacttaattgattcaatacgttactgagtctgaacatgtattagaaaaaataaagctaacaaaattaacattccccacatacattcagtgtattatttcaaatttatcaagtgaaaactttggcttgtatttaaatgactccaaaacagttgtaagtttagaaaaataagtaaatatataaacatggactgctgtgcttcttgtggattggtgaaaaggcgttacattagtttgagtggtgatttattgacttaagttgaattattggtaaaagaaagttaaaggtagctggccagccatcagagtcaagcttaccagaattttgaaatctcaaatcaagatttttgaattgttgtggtcccttcacttagttttaaatgtttttcttaatctgctatagagggaaggaatttgacataggcttaggactttaggtggtttcttatcgtgaagcaacatctgcttcttctcatcttttttatttgtataataatttgatgaatgagatgttaaatttaaacacaaacagcattttatcattaataataataaatacaattaatattcataaatatccaaaatcagttattttatttagtacattcaataataataaacatacctcaatattgaatattctctatgagtctccttaattcaccataacttttattaagtattgatagcttttggaaaacatctcttataatctttacccccttatcatccatatatatctcatattccactaaaatcacatacaaatatataaatatgctaatttaccctaaggagtaaaatttttacccctttatcatccatatatatctcatattctactaaaatcacatacacatataaaggtattagggtgctaccatgtgcctcaaatgcagttaataaa

SEQ ID NO: 378025 - DNA, 6144 bp, Cannabis indica
agtttgttatttttttttttcttttttattaggaatcatcaaatttattgcgcaaaattttagacttcatggtagaaatgtcacctttatgatacacaatgtgtcgagcttttgccaacattttttcttctgtagtgtgaatatagaataaaaaagctgcgccatgaagatcaaacattacgaacaattagacatcggcgaaaaacactggaacgctgggataaagtactactttcttaaggattaaactttatttttattttattttattttatttgtgtatatgtgggtagagtggtgatacttttttttgcttataatacagtggaagtgactgatatgtttgttttaacagttgaggaaatacgtgatgtatacatggggctgcaagactttagatgatgaccatgactacaagaataatggatcatgttgcagtggtggtatgctggaacctattagccgaaaaggatcattacataaacataggcaacagagcagaatggattctatcaatttgaacaagaaagtcaaattacctagtaaaagcaagatggtagccgatgtttgcatctgttccctaatgctctcttaagttcattaaaagttatcttatctgtttgcctgtcatttttattgtgaactttttcttgtgtagattcctgctcaagatgattcccacactataaccaagtcttctataccaaaaactgctttgactcgcggagagaagtcagactctcggggtgaacttgtgagttgcttttaatgtttgtcttgaaattaaaacaaagatctgctcattgtgtatcttaaagtaggattgttctgcatcctttgttcccatctctcaatattaccagtctatttacctatgttttacgattctgattcatttacttgacatccagatttgttattagctattatgttcaaagttcttatcaacacagattttttagtcagtacaaacactagttagtattgtttgtccttcaatatattagcattaagattttagaaaggtggatgagagcagagatgttacattgactgttgatgtctgtccatatttttaggactgtgcatgtctaccttttttcttttaacatttgggtcctatcttaagctgacactggaaggtccattgatcttcgcaaaatgaaaaatgtgaaaaaaagtccaaaacataaacttagctatggtgttgtgaaagtatgggccctttcacccttagtttgcaaactagcctctttgactgatgtttaaatgtaaataactagctccttgcctccttgttttagtagtcatttgttagatttaaaatgcttatcttttcctgtcccagaaacacgaaggcaaacaacaatccggtgcttcatgcaaggaaagttcatcccagcttgattcattctctttatctaatgaaaccattcctctaccacctacactaggtaactacttactttataaagtaatgatcacttgctatttctttgactttctttttgagacgatgagcattgtgaaatgtcattactgaatagtcaacaatgtcttgtgtatcattacgtctgatcaatacattttgttgcttttactacagagttgaaggattgttcagaaatgaatatgtctgatgttcaaaagaatcttaaatgtttgtacgattacaatgtcatgctaagggagaaatttttatctgtgcaatctatgcttcatgagttagcaatgaagtcctcgcctcctgcaaatgatattcgtaacacctcatagttttccaagcaactataagtactgcattgccgacattccaagttttgtatgaaattgttttggtcattttcttctaggagaatcaaatgaccgccagagtcaagattgtggtgttcaattcaaggcgcttcatcttcgattgaatgataacagtctgtttctgacatgctgaggggaagcattgttgatcttttggggaatagcctgatgtttaatctacaccatatttttggaggaaataccccttgatatgattcatgatatatcactttcgattcttgcttggctcaagccaaaatttacccaacttttagcttcattgtttcataggaatttacttactgatgttggagaaatacgaaaaaaaaaatgttctaatttgaaatgtcaatgccagtatattgatggtagggtagcctagtttttttcctatgcgctcaagtagttttagaccaaatttttgaagtttctattcttttttaggatcagaacttttgattcttcttgcagtggcattcattacaataaagtattccttaaatgttccttccccactgctgatatcttggaatccatgaaaaccattcagttgacatatgctaattaaatattttaaccctgtaaagcaagcaagaacatgttccaaagctaggcttgcacactacatagtctccgagaaataactacttttacagttgatctctaaacaaataatggcccaaatcctattacaaacataaactcaacggcaatagttttgtttttgcggaatgttgacaaatccaaattcattatataggtaaaaatgtaattaaggttgtcttttaaattatattaaaagtgcaatttaaaaaacactcaattcttcaaaagaaatatctcctccacattcttccttgagatttcaacagacccaactcctaaagaaatcatttaagttggctttctgcaccaaaattatgaaacaaactaaacaggtgaaaaatctccctcacgttaaacatgtaattttttttatttaaaaaaaaaacgctaggataggaggattgcgtttatacatattatttactaatatgttaataatgatttcgcatgattggctttcaaattgcatgtaacatgctagcctgctctgactttagacttcagttatcacataagagccaatcttgtgagccacaagtgtattttccctccaagtaaatagaacagcatttcacatgatcgagtgggatacaacgatgttctcgctgcacagctgcagaattcaactccagacacactaacccaggtttggtgttttttcccataaacacctccttacaaaatttaccatcagggcttcaaacagaacatgctccttgactgcatttaactgcaactgaagaccggagagctagtgttcagtgtatgtttgcagcaaaatgtaaacatgcttcactgaaaggattttcgacatctcctactctgcattaatatgcttaaactcagtggattttgaaagaaaagtatctttccctgcttgtttccccaaggcctgagcaaacatcctctttgcagctcctagatgttcctttttatgatgttcttcattgacaccatttctgactcttccagatgcaacaacaccactagggattttgtcagatttatttttgccggccttactgtcagcatttgatgatgtgcccgaaatatggttattcttttttactttacaacacgagttatccattttgccagacaaatgaaggatttcttgaacatcttccaccctcaaatcagtctccactttatccttatgctggttgtttgattcatcagcctctctggaagcacttgagtcattgtgtgtggtctcgtgattgcgtgagttgattctttgccctagagcatgagcaatcatacggcgagcaaccacgggaacacttcgtggtttctgcttgatgggttctttttcatcccctaagttggctgaaaatattctctcacgtgcagccaaataagcagcttctctctcctcaagtgaatgttgaaccgaaggtgattttgtcttcaacactggcaacatgatttaatgattttaatcacatcattccatcatctgataataatagaagtcacaactcacaacaaaatgaacagcagtaataataataagttcgcaacgaattttttttagtattcaaaatattttcttctcagacaaataagagctgtgaaatgacatcaaactttaacatgagaataaaaccaacccttaaagtaaaatttcatgatctgtattacatgataataaataacctggtgagtctcctgttcttcttaacaattgatgtgatgttgttggagattgaggttcatcgtactgccacaaaatatcactaacaaggatggaaggtctgcaaataaggagatttcgcttgatttattttactaaagatgactacataatgagtcattgacagcaggaaattctaacattataaactattaatggaggatatacagccataataaagatggaagaaaaaatattctaagtaaaatattataggctttagtcttcacatacactgatgtatcagggcatctctccaaaattaagtgtcgatcatctccttcaccgacagattcatgcgaaaatcttgcacaaatataaaatcaaatcaaatgtctattgaaatgcagggagatagacctgctgagtagctttcggccctaaggaaaaaatgttttactttcacaacataagggtcataaccataacacatcagaaaacaagcagacatgtacggaataaagcaaaagactagacaggtaagaatgtaaacatataagtgctagtgctacagacatacccaaatatatctgcaagacgatgcataagaagacgattgtatgaattcattggttctagctctaggatcccaccagagctgcaaccaaaaatccgagaacattaactcattataacaataagggaattttacaaccacacaagggagacatagatgggccagcttccaattttatcatctatgagagcgtgtaagctttctttcctcgtttaatttttcaagcaagtaccaaaccattaaaatagtaggcaaaactagtgtcatgcaacagatattctaacaggaacaggaagagccacccaaaattcgatttgatgtactcctaaccctagtcactaaagtttctgagcaatctagctaaaaaaaaagttaacttcgaaattacaaatcgtatcaatctgaaatgggtacctgatatcactctcaatgaagttgaccaaggcttcttccacagagagaacaagatgcttgcatggaagattgtccttgacaagtgaagccaactcctcaacctgaaattcaacagtactatatcagtattttgtttgataattaaaaaaaatccaaacatgcagttcaataaaagccttaaaaaaactggcagtacccagacatttgatagaaccatatacactatcaaagtaaaatcaaattcaactcagacaaaaaccttcatacaacaattttgaagaaaacaattccactacattaaagttaattaatttgaattatatacagaaaatattcaaattagctccgccccaaaaaaagggggagttttcttacactgaaccttcaagtttccttctttagttctacctgggctaaattttaagcataattgttgaaaaacagtaccctaaacccaattcatacaacgattaagaaaaaaaaaagtggcagaaaaaaaacataaatagaagaaaggaattaaacaagaataataactaggaagatgaaaaaaattgaaaaaagagaagtagaagaagaagaagacaaaccatggcgaactgggtcatgctcatttttaacagaagacaaaaaaacagtgagaggggagagagggaggttggaagagaaagaagaccgattttgcttcaagttcaaggacgcgtctttgttttgttttaccaaaaatcaatatgagaaatattttactcgggtcgggcccgggtttgctgatgtcattcatcgacctatattatattttaatttaatatggctcttccttcattttccagctaaccaaacaaacatccttatcctcaccacgtgttcttccgcaaaatgtctaggaggacatgattcatactcctttttgggtacagatataccctttactctacctttcttaagactaacatattggctaaggctctaggcgatctaattggcaaatttattgaagtttatgagaattccactaatgagggaaacacacatttttagcatctttctcaataaaggtaattagaagattctgttggaatttattttaccaggatct

SEQ ID NO: 378026 - DNA, 5448 bp, Cannabis indica
aaaaaaaaaaaaattggggtatttactataactactccaattattttcattcaaataaattactttgacaaagcagtcatttgaggaactgcagctatatattcatggtattagtcatagttaaagacttggactgatataaagttcaaaaagaggaaaataatagtagtaatataatagtagtagtatgttgacctacaattgtactaatgtggtggccaggaccacaggtgtccctaacatttttcagaaagaaagcagagacaggtttcattcggttgacaatccaatttgttctctgagagtttggtaaatggtctcaacaagattgagtaggaacccatctgagccatgctttgccaataaggaaactgacacaggaaggctatcatacttcccaagtggtatgctcacctatattaggtacagaaatgaattcccatgaaattccatgattgggattgggaaaaagttgttaagtgtttaacatgttagacatttgattacttgaagagaaagtaacaagaaaaagtgagaaagaaaacctggcataacccggatactccagctatggatagcaagctaaacgctcttgcacgaaacacttcaagagtgcttgcaggtgtctgtagttttggtggtggtccgggaagtgtaggaatggcaaggacaccaaaatcctggtggtaatccaaatcagataaattagattcatggccaatggccttggtagaaaggtctgtttattccatattattggtcaaaataaattacaagatcaatgctacttaattttctaagcataagattgtcaaaaataagttcaggagtgagattgttgtttctttttttttttgtctgaattcaggagtgagattgttagtgttccaaagtgtacacgcagagctctggcttattttaaagctgagagagaaagagagtaccccaagaagttcagtaagagctgcacgtatttcggtcttcacagagagacaggcatcgatgttttcatctgttgcctcaagagcttcacatacacgttctgatatcccaggacctaaatcaggcttgacagctttgacccattcaccatggttgctcttgaattcatacctaaatagacaagattttgcttagaaaagtactgaagttaaaagtaatcactaaagtcaatggaatccagtataacaatctacacctttgaagcaaacgcattgcgcttgataaggccgccaaagatggaatgttgtactcttgttcttctacatttactttactaacaaaacttttcaagctcggaacattttccatgacatagttcccaaggttagcatattttaagagatggcctgcgttggtaaatgtaaatgacatctcactctaagaaagtttttagataaagaatatccatacctatatcacctttctaatgacccaaccttaataccttatcatagcatataatttccattttacatataaacaaacctattgtttctctaactatgttagccactctaaacagctgagttgtataagcagaaagtagagggattaaatagacttgtcaatatcgacgacaaacaaaactgaaattgcatctgataacttacccccaaataacttttctactgatttagctagaccttctacgattagattgcctggagtagttgaaagctggaaacagtcttctgcaatgatcaactgagagggtctgataggatctacttgtggcaattgcagtagtacacgtccaactctattcaaaagctcatgatccctagcaaaccatcctaaaccagaagttgtgtcataaatagctcaaagaattgttcattttcattgcatatgaaaaataaagaaatcatccagactgggttgtacattgcaggtaaaattagagcatagtttagttccttaccaactgtatcaaaactttgtgccatagggataaccccagaagtagaaatgatatcatgagaaggtctaaacccaaaaattccacaataagatgcagggactcttacacttcctccggtatcagttcctgtgatttagataaattttgatccaaatatatactattaaaaaatcctatattaatcaagaaaatagttagtaggaaagaataatccacctaaggagaagtctacaaggcctgcaccaactgcaacagcagatccactagaagatcctccaggcactctatccggtgcacttggatttcttggagttccataatgcttgttttctccatttatactgccaaaatatatgagcatgacattgtgtgaaacaatataccacagcaatgttctacacttcaacataacaatatactaacctcacaaaacaaaataataaataaataaacaatatactaacctgtatgccatttcatccatgacagttttaccaacacatttggctccagctcgtaagatagccaaaactgctggagctgttgaagtggcaggtgagtgagtccttgcccaatcaggatttccaaatccagttacaaatccatcaatatcaaatctgctttcaagctccaagttgaagaatcaaacaataagaattacgcagccaaaagcccatttgaaaatagatacatattacacatataaatcccttcagagtcaaaagaatgcagatgaaactgaaacccagtacagcagtacttgaattttatgtacacaaccgtacacatcatcagattagacaaaaacgtaagaactactagtagtgagggactcacatgtctttgacagcaaaagtgagggcatggaggggaagttgaatatctgaagaggctggttgcagaataattttttccatgaaagctccattatcggagtctgtagccatgtctatcactgccaccggagtaaaagcttatcaacacgtgaacctgaaagctatacggactttgctttgactaaccgagagcttcataaagctgatgaataacatcagccattatatataatctattttagtcatggagtgacaacattatccctttactttacattagtggccggtctgcttttattggattaaaccagagttataagggcaaagcaggaatatggattgttggcctgttcttaaattattcagaaaaatttgtggtcattatttaagcctgcatatcttcaacttcaatggtaaaatacaacagttcccatccacaagagaaaagtcaccaaaaatttaaccttgttgcaattgcacaattccgagggttgagacacagtccagtgtgacttagtctaaatcaaacacaaagatcttataaaatgcttcaagtcattgaacattttattcttgtatgcaaatgatggtttaaaatcatgttgatatgataagtcagatcaaaatatgaaattaagaagacaataaacaaagacattgttacattggtagtaatgtggggaaataaatatcgaatatatgatattggaaaaacttgaattgcaacatatgcagatgaaactttcaatctgttccatcagagtcctcatcaaaggtaaacaaataaggaattacagttctcagttcactggtttctccttgagtactctcactagtttcccccggggaactccaacctagccgctgcttgtaaacagcatcataggcttcaatattcaaacccgaagcaagaaacaattccacttcactaacaaagagatcggttcgtgctgctagaaaaggcctagctgcatcagatattaatgatcgaaactcttcacttttggcttctggcttgtttctttttggttgttgtttgctcctacagaaaccaaggatttaaaaaggtaaaggcatcgtatcaacatcatccaattctcattcatgagaagcacatatttttaacaatttaagacacaaatataaagcaaatagtactttgtctgaaatgaatcgatcactccacatatgtggtgtacaacgatgccaacatcttcctcctacagctaaaaaaacgagcaattcagccatgctggctcatgaaatccacacgaactcaagaaaaaaaagttatacatattatcatcattttgctcactaactcagagacctgcataagggtttgaatttcccttctcaaccaagtatggagccaacggtttggatgaagatacttgtgtgatttccaatagcttgacacactaaaaatatcactcaaaagccctaattgaacacaacaaagttaggcactagctagctggagaataaataaagggaaacatagcaaagaaatcagtgtaatcaacaggatgagttgagtcgaatacctggttcggtgtaataacactgtaatctgtacttgtgagcttttgataagacaaagctgaatataaaaatacatgaaataagaaaatgaatctcacaacagagatgcaagactcaagaaaaggaaaacatagaaacacacccatatccaaaatcctgattaatgtaagactgttgaaatgaacttccgacaaatccatgtattatagaaaaattttccacctacaaattacagaatccattaaaccgatcacagaaaaatgtctttagtctgtaatcaatgcaaaaatcaaggaaaattttagtagttgatatttattgtcaacttctctacgtttttttttcgcaaagttctgaaagttatgtagacaaaggtgaaccttgcagagaggacactttacagaagcaagtttgagagagtgcttgccagaaaccactttagtccattgcataatgcagttgtaacagaacttatctgcagaataagaattgaaactatcaattattcattctatacatataaatgtaaatagttgaatacatacatacggaaacatttatcaaggaatgattcttgaataatgggtccgaggcagatggcgcaaggattcgattcctccgaagtccgagattccctgatgtttgttctcctcatatccttctccatctctacctccgttaccggtcctggccccggctccggctccgtctccatctccacctccacctccacctccacctccggcggctctggtttcaagggaagaacgacgaaaagcaaatcgcggtatacactttctttcaaaaaaaaaaactgcgtagatatattaaacaaagaaaattaaacttaaggtcatcgtataaaatgttaggaaattttacaatctaccctcttatatacattgatgcacctttgtttgttttagcaggcgaaataatttttagtcaaattttttctaatcatgtacgttatagttatttaagacatcctgcaaaattttatgaaatttggaaaagtttaacacgccaaaaactacgttcaaacagtgtgttgcacgcgtgactattttattttatacgcgtgtaaaatagactgtttgaacattgttttcaatattgtaaattattccgaatttctcaaaa

SEQ ID NO: 378027 - DNA, 2612 bp, Cannabis indica
atttaggtttaatacttcataaacatactattcttacaagtgtaatgtagctaaaagttttgaataaattaaaaaaatatttctaagtaataaaatagaacaaaatatcataaaaataaatacgcaaaatagtcaagtgttacaaattcaacatataaattttttataaaaatatgataaatatatattatatttttcaatatttttattgtataaataattttttaatatatataaatataattggatattggatcgatttttaattggattttaaaattgacatccaataacgatcccattcaattagaatttaacttttagcatccaattcaattgtaattggatatcgaactttttgtaatttgatatctaactttttgtaattggattaaattaaatcggttcggttcaattagattggattcgatgatgcccaccccagaatgtagccatatccaatgcatacaaaatgtacaataaatgcactaaaatatgtatgagatggacatatttatggatttcaaagaaaaagaaaaaaaaaaaaaaggtgattccatagttatatctatgtgacggatgtttttatacattcgttacacttttttttttctgaatttgttacaaatttttatggatttgatataatgattataccatataattaagtacactatatagataatttgtattggcaatgtatatattaaacgtatatatcgttcaccattccacagtactcctatagtgtagaaaacttgaaagagagtaattgtattaactacaataattagttttgataattgtgtaggtgtattagttactttaaatttttagttttacggttagaaataagtaattctacaactttatgcagtcaaattttatttattaaattagtgatgagattaagtgtttttatatgatatttaatgtatttaagaaaattatacttaaatttgaaggaaatctaacgagaatgacttaattggattgaatttttaaagattaatttgggtttcatgatattgataacaaccacattttaacttgatacaaaaaaaattagataggattagatgtccactaatacatgatagctacttgagtactctatttatatcggtcaaaattaagataatggtaattacacaaacttttattttccatgccaattatatcatatttaattttttgtatgattaaacgtaataacatggtacaggaagagttcaacatcaagcaagacaacaaaaaagaaaaggagaagaagacttcatcaatccaagcatctttgatagaatcacatgtgaatctcttcataggaagacaatcgttagtagtcctgattatttacatcgagtggaacctgcagcagcatcccttccaccaccgtcatcatcgtcattatggactagtgaagccatgagagagaatgtagaagaagtatccaaagacattgcttggggagagaggcgtgaaattggaagaataggcttagcattgcaagaccgaatttgcagagacttaattgaagaaattatcacagatatgggttcaataaacttctacaataacttgtattctccactgccctttgaggcatgtaagagaagactttgtttctagttcatttatgttttgtgtgagttttaagaaaagaaagaagaagaaaaagaaaaaaaaaacttattgctctctaaattacttttcagcatagcataccattttaattttttattatttgttttcaggtaatttggtgtcaaattcgttacatttacttctgtatacactttttccctttttctttatttttgatcggtaaactaccttaggtccctttttgtttcaaatttattgttcggttccttatactccgttatttacctatgtggtttatcaaactctacgaaaaattccatcctataacattatatggcaattaaatcaatatttttaaaattaaaaaaaaaatagaattttaaattaaaattatttatcataattgatcaacgaaaataaaataaatacaaacttaacgataactaaataaatacaaaaaaacctaactgttgacggttagaacttgttaacaatataatcagatttttaaactaacacttaaatgaaaacttaattcaaagaatttttacaataaggatctcataaatctcttttatctcaaggtcataatgtttcattgcttttagaaaatttaaaaaatccctcccttacaatgaacttaagggtcctatttatagtgagccattctccttttatacccccatcatatcctaagacatcctatgtcaagtccatttcatctattacaagactgtgtcctaagtgacctgacatctggtgtttggaattttaaagataggtgcttgatcgaactgactgcccctagtccgatcagtgctggacgacccaacaatatgttgtaagccgagggcaggtcgacaactaaaaaatcttgcataagagtagcagttaaaggtgcctcgcctaaagttaatgcgagctggattatcccaaggctagcggcgctatctcaggtgaatccacaaagattcaccatgcaaggccttaacttggccttttcgagc

SEQ ID NO: 378028 - DNA, 2443 bp, Cannabis indica
tttttttttaataaatgactaagttaaatatcacagtctttaaaatatgttccgaaccactaactcaactccgtatgctgagcaaactagaatatgtacaccagctgcgcgcctcactcgccaactcttggctgaactaaattcttttgctcttacttgtgtaatagagcatatgaggagtcacaaagactcaacaaaaaacgcattagagtactcaaacaatgttgatagaagcattctaaatattccaaaatgatcataaggtaataattatctcactacttacaaactaatatattatcaataatcatatctataacaactaattcactaaaatctccaaaataatataattaataccaagtagtatacaatcgttgcctgatgaggcaacccaaacactattacttattaagataaccaattattactgttacttaataaagtaacaagttatcacatgttgtctaattagacaaccatacacaccctataatagatttatagtgtattaaatctattatctatatggtaattaccatatcgtattgcatgctcattactataggttcattattctcttttcttacatgtttatccaaatgagtgtgctagttgactcgagtggaatataattcagtgtcgataaccctaagttacatattagtggtaaaaataataagtatctatctaaaacacttctaaataatctaataagcatgaaatagttacttgtttgatcctaaatcatatatcatgttgtagaacttcttacaagctttctaataatatatagaatgttcaaatcgaacattggaataaaaaattatggccaaaattcaaaatctagtcatcctcgaaatggccaattggaagcctagatgttacaaaccagaatttttgtttggaaactagaagaaactcgatttttcctaatctctcattcccaaaacttatacaaacatcactagacaatccaaaataattccccatagatttttacattcaaaacagtagctaatacttcaatatatctaataaacaccaatttcaaaatttaaattccaaagtgatgcaaattaagttaacgtttctaaaaaaaattccagagtaattaactccaaactctcaaaaataaccatggtattacatctcaaaataattttaaggaaccaccataacttattccataaaaacttaaaccaaaatgaattctctcaaaatatccaattagaagttctaagagaaccataaaagtacttaccaccactccctatgcaagcttaggaataacttctgttgattatggttacaagttttgtcttttatgaagctatgttactctggaaagaagttactgaatgtttgttactcattcgaaagttttgttaataaagttgtggtcaatccagatggttcttttgtgaagcttggcttccataatgtagtgtcttctggatagcttgtcattaattcaaaaatgcatttctggatatctaactgtcaatcaagaatgttcatccgagaggagtgcctgtacgtttccggatagcttgtccatattgaagcttccagattttttgtactgaaagcatgttatcaaagatgacgtggattattgttaatcgtaatgagctaaaacatttaatatggtgtaaatgtaccatgatagtttcggagctaatttaggaaataatgcaacacaacgtttacatttaccaagaagacctcctcgactatgctaccaaccgaggggatgaggtagacctactttcgttgtaataacgaccaaaggagagtggaagacctccttcactgtcaagacacccaaggggacgaagaaaggcctcttccattgtgaatacaacacaagggacgacgaagacctctaaagaccaaggacaaagtgaagactatacctacaatcactctaaggtgcacccaagatgggaaaaacatcatccccatcttgggtatgttaatttgggagttggttacatcctcaattgaccaaagaacggccatgactgctacaacacatcatttatagtcgccaagaaaacctcttctactgtgaagctaaggagatgatgaagacctcttctgttgtaaagttgaggagatgatgaagacctcctctactataaaggcgaggagatgatgaaggcctccttcgctgtaaagctgagggaatgatgaaggcctttgacgctacaaagtcgaggggatgatgaaggcttttgacactgtaaagctaagaagttgatgaaggcctcctttgctatcaaaccgaggagatgaacaagactgccttcattaaaacatatctgagagaatgctaaagaacttcaaggctacaaccaaagagaagacaaagactacaccatattcaaataaacacaaggtgtgacaagagagtcaatgctaagacaatagccaaaga

SEQ ID NO: 378029 - DNA, 5593 bp, Cannabis indica
atcaatcaatataaagaaaaatattaagaaatttcagtggcaatctaagttttcttttctattctttattttctctattttgtcattaatttaattttttaattatttttatcttaaaatttataatatgctattattaatggagtaactaacatttatattaatttattattaaaagagtaatttatgactacatactaatctaacatatatagtaatataaaactaatttacattaaaaattattggtattctttaacacaaaatatttaatctacattaaattttattgttaatatatttattcaaattttatattctatactatttatgaggggctcgcacgcgagccgtgtgtgcgtgataggaggcataacggggggacgtgagggggaggtgagggcgagacatgaggggctcacatgcgagcccatgggtgttcgcaatcgagccatgtgtgctagagggggccatgcgtgatgggaggcgtgataggtagatgtgaggggtttgcgtgtgagcccatgggaactcgcacgtgagtcgtgtgtgttggagagggtcgtgcgagatgtgagtgggagtagggagagctgtgcatgcaagtagggagtgtgggcgaggggtagtgacaaaccgtgagcatactttggagggatgcaggtgtagggaaggaagtgagggcatatggataagggtgaagttgagtgaaaactctggggacaacggcgtgtagaggaaggcatacacccacgccttctgaaacctttgagtgtcagggagtacaagtagcggtgacaacagacttgcagggtttgagaacccgaccaaaggtacaccatgaccactcacctaagcaggtggggactcccaaacctgtaattggggaccacgcgtctgcaattcaggaccacacacttgcagctcgtgatcaccctcctgcagttggggaccactcatttataacctcggagcacaggcctacaatcggggaccacttgacaccagacaagagtacgaggcgcaaggccactccaggcacctgcaacccacagttcgaaagcgatatgttgatacattttgaccatgttgtacccttggccactagtgcctataggtacctgcatttcaaatgtgagtggggttggaagttcatttgttgtaactcataaagtaaagggaatagagagcatatcttcgatcattcattcatttcacttcttctctttatctcatctcttaatagttacatattttcagacaactaacttggttgacgagttctatccatcaacaagttgtttatgcaattttgagatatagtggcggtttaggttagattttactctaggttgttttttagaggttgttttaagttgaaattgtttgtttattgttagttttgctagtttgtttgtggaatgggtaagtttgaggttgtgagctcatacttggctcattaatggtggaattggattctagggttgtatgttgcttttattgcttgaattttgttgttgaatattattctaggtattctgaaaggtttggagaagttcgacctcattttgatcaagatttggtttgtttggggttacctagtgcaaacctgttaatcggtttgacgagtagtgtaaaactggttaatcggttcagggataggtttcccgaacaagccattttgtcaattcgtgttatctttagaactttgtttagttaattccttgatgcttagggcattgttataataattaccaatagtagacccttagttgggagtttaggttttccagattagtgttttagcgtgctatttacccattacgtaaatgtgactagggcaaccatctagcatgatgctttttgttcaagtcggctaactcacatgaattcagaattgaggtaagaataacatagaacatatgatatatatgcaaatgtatgtatgtgtgatatatatgcatgcttgttgtgattcgtacactactaacactagtacaggtaggtacagggtgcatgtagtacaacacttagcggtacttagggtatagttcataccttaccaacactagtacaatggcagtactgagtgcatgtggtacagtggtacatggtcgtatcttaatcaagaatgttcttactcaactgttaagctttatggataggtgtataggcgcttagatacaagttgttattatattatttgttatatgcttttcttattgagttcgttgactcacggttaccacttccatgtgtaggtacaggaaaggcgggggctgaacatgagtgagcttcaagcttggatggtgattgtacatgtcgagacgatgcgacttggagtgttcggtctcgggacatcttgaattttattttgcagtccctgtgcgataagtttataaatgtattttttgataatgtttgtaaaagtttaaatatgggatctcggcatatgtagataagtatatataaagtttaataattaaatcaaaagttttaatttggcacgattttcaaggaaaaccctttgattagcataggtggcaccttaattagaaaatcaatgtagcgcgtctaagtatcaggacgttacaattttggtattagagccgccaggtttgtctaccgaagatcgtcaagacatgtacaatcatcatcacagaaaagctcgactcacgattcagtaagcctttacttgtttagtagtttatgtgattagaaaagcatgttaggaagcataatagattataattatttattgtaaatgaattgccttaaatctatagtaaagttacagcttggaccgttgcctgactaggccgacttatgaatcgacaggtgtatcctatagaatggacacctagtgcaatatggagagtgaggacaatgtggtcagggctggtaatggttggagagaatggaatccaagttgtccccgtaattgaggtgaaagcccttggagggcttctggcgggagtgttgattatccaccacaagctccattagatttggagtaaaggttcgtagagatggaagctatgattcaacaacatgatgaggaaattcagaggttgaagcaacaaaggtctcctgcagcacctttacctcatatgccaatcattttttatctgcaccagcggagcagataatggctaataaccaagtggaaccattgcatgggggaaatcggatgcaagaatctccagctccttagggagattcaaatgtttcataacagttgcataaacatttttctaacagttattttgtttgattgaaacctttgtttaatgcaaccttcggccaaacacccaacaaccttcgtctgattgaaaccttcgtctgatgcaaccttcagccaaccacccaacaaccaccctacaatcatcgtctgatgcaaccaccgcgcaaccacatagcaaccactatataattattgtctaattttgtaagtgatagtgtaaaaggtattttggtaattaaaatcacataaaatgtataaatgttgtccacaccttatagaggtatttttgtaaataaagtgtcaatttatattttcgatgtaataattccatctttaaataccacgtccttctgtacggattatcatcagtcccttactccttacaaattggtgtgcacttcaaagtaatgaatgtgggacaataagtcttctttcccggtgtattgatgtcaggaagggttcttgaactttggagggattggcagagctttgattcggtcttagagcggtgagcgtcgctctttatccagttcaaaaatttgaaattttggggtcgtgattccttttaccaatgctgctagatttgcaaactctatcctattcacactatgggcgatggtttgtgtcctagtcgaaacttctattgcccaatcagggtcacctctagaagctcatgcttccacactaaccattttctagttagggtgtcacgcatgtcttttcatcttcagagtcgatcaaaggcacctgcctactttggtctggatgttgtctcctgacaatggggttgtgaaggaaacatctgagacttttcaagcacaaatatcaaatcgtcttgggacgatgtgttgcgggatcagtcatctagatcattattgtaactatttcctttgaagtagtcttcggtaggatcacaagtgcaaagatagttgaattggttgcttaggttcaattcttccccatgcaatcgagggaaatacttgtactgctgagcgtttgggccgtgagcgaagtaccaacataaatcacctctgtcatcttagaagtactttcgagtgtgaagtggctctttagtccttactcttcaaatttcataacatctagtttcgaagtatagtcctgttttcccccttaagtatcagtcttaggtacctttccctttacagggtcacagggtttggtgtcattcgatcgatgaggagaaccttgtggaggagatcgattggttctcttagtagaacgtggtcactcaacatcaggtggaggacccattggttggggcacttgaggttgagccctttcagactcttgctcaaagtttgcttcccttcgaggagccttaataccttttgtgtgttgagtttttgcatgactaccgggcatggtagaagtgtttcgtgcattgagagtttccccttgagtgctagttcccacatggccagttggctgacgaggtattcatcctgctagctctgaagctctccttagagaagctatttcactaccagagcaataagcttccttgatttgctaggttaggttatcccttcgctactcctgctcaacacgctaattcttaacattcctctaattctccacgagctagttttgaaattgctcatgttgcttgttgagataatgatgatgtgacagtttagactactgctatgtcaataccgcgtgtgtaattaatttgaaaaaaataatttattttgttaatttagttttactaaagttttttttaaattattaattgattttttgcttaatttctagcaaaatgcatatttttatttattttttaattttaaattacatagatgacgatgatgtggcaatgatataaaatctacgttattatttgcttaggaattatttttaacgggttgaaaaattctaggagcacaattatgtacaagtcatatttggggataaaaatcttaaatgatcaaaatataattaagattttgataaataaaaacaaattcatattattttttataataaaaaggagcataagttaataagaataaaaaaaattatattgtagtagcactatattcttcctttacaataaggatggttttatttttaacatttaaatatattctaactaatttctttttatctaattgtgtttgtatattttatgtacaattagttattttaaactctatttttagtattgaaaattattaaaatcaatttaaaaataaatgggaactataatatagactgttataccaaaaagaaaaaaatataagacttttttttcagttttaactaaaaaaaataataatattacaaaaaaaaaaaatcaacatatatacaaccgaaataatttttttt

SEQ ID NO: 378030 - DNA, 2381 bp, Cannabis indica
tcattaagcaattatttccatgaaaagtattgcattaaaaaaaaagtaaaattacagatgacatttgattgcaaaatggaaacttttaattctaaacatcatcatcaaaaatctaaaccccagaagggtacaatataacttattcattaaatctaaacatctttttggtttaactttaaactgtctatggctcagcctgcgtacacatatgattgtttatacttttggtggtgctaccagatatttctggcttagggactctaacaatgctgtagaccaatgtggcagccatggctccaagaataggagatacaataaagacccaaatctttgtatagatccccaagacaatagcagggccaatactcctagcaggattcattgaagctccagtaatgggtctgcaaaaatgcagtgttgtcatgtgaattataccattacatactgaacaaataagacaggtttagtcataattcttgattagcacctttattcaaaactagtaatatctcaatttttttcaatgatgattaagttatcctaaactaaattaagacattatttaggttgttagattataaattatattataaaaattatttaatatagtcataatttagtggttaaaaaaatgaaaaaagttacccagcaacaataacattgaccaaaagtacagctccaactgccaatcctgaaagatctttgcactgtatttttttttcatcaaaatggaaaacaaaataaaaagcttatgttaatgtgaatagtgaagtagtgaagttactgcaaaatagaccaatcaaaacaattcatacccccctgtgatcagtggcaacaccacagattgtgaacatcaaaaggaaggtgattatgaattcccatgcgatggcttcaaggtcagtagttggagcagagtagtgagtcattattgtacgaatattattactatcttggtcattgaataaaactctgagggtcaggctagccagggttgctccgaccagctgtgaaacgacatacataggtacctatacgacaataaaaaactttaatattgagaagacagtgttattagttatttacatatgaatgaatgaatgtaagtgttgttgtggtggtcgatctcacatgtttcaaggggaattttctggcaacagccaaggcaatagtgactgctgggttaaaatgggcacccgagacatgcccaagtgcataaatggctgccattaaaacaagaccccaaactattgctattcccacaattgttaaaggttgtattttgttgacaattgcagcagcacagccaataaatatgagaaagtatgtaccaatgagctctgcaaccatctacttacacaaagacaagtcccaccattaaaactaaaatatattaattaaattatagtatgaaaaagaaaagaaaaatgttaccttttgaaagctagaaggaggtttctcaacattaactgtgtattgttggaagcccttagatttgccttcctccatgaaagattgttcaatggataattcaagtttaggggaaggcccaacaagaattgaaggtgaattggccatttttctcctttttgggttcttacaagttaaaagtaataactgttactactaatgctactaaactaaattatgtgaaatgccacccttttggatatattcttatatgctaagtttctggataaaacaaaaagaagcatgttgttatgtcttgctaagaataattacttgagacgttaatgactaaatcaacaatgaactaatttttggatgccaattgagctattatattatgaataataaaaaaaaaagtgacggtgtagagattaacaaagggcatcaaaaatggaatgaaacttattattatttatgtggatgtttcatttgtttcttacattggtgtctagttataagaataagacaatgatagacaaatagttgtgcgtatagaagttctcatcttgatctgaatttctttgtcacatcttgggttggcctcattctctttggggtttaatcaagcacttaaatagtaatagatatagtctatggactctataaagaaggggccggctgctggtgttgattgattgacaacatctgcagcatcttcaaaggactactaaaatggtgatatattgatgtattttagcatatcataaaataataatcgggcttttacacttttaaaagagttttttttgcatttttacagaattctacatacaaatctctattgcaactaacaaaacaacttaaatcgcaactaaaaatcgtataacaactcacataaaaaccattagggaaaccactttagaaactcaaatcgtaaaatttaaaaaaaaaattaaaaaaaaaataatacatga

SEQ ID NO: 378031 - DNA, 6886 bp, Cannabis indica
atgtggtgcaagtaataggtagaaacatttgaataaccatgagtcaagaatcttctccagtgaatgtacatatcagcttatccggtaagtgatactaagttaccagacattgcatttttaaatgttctaaacttaattatgcattttgtaacgttactataggtgtttatgccataattttgtaatttagattagttagcaaaatttttattaactcacctttttatctaaacctctagttttattatcataagctagtttataaaagcacaccgtggcattcttaggggttagggcgttacaataaaaatttcaaagcaagaacctcccgttttgaggaccttacaaattgtagaagagattgtataaactttgctatttcgaaactaaatttggctaggcattgttagagatattaaaaggtactattcagtggtggacccaaaatttcagttgagggggcactttattttctacataatacaatatgctaaaaaaatatgttgaaaattcatacaaagttgaatttttatagtttaaaataatttttttgagtaaaaaaaagtaacaattaagaagagttttggtggtatatttttaaaaagtttatatatagtattatgtaaaagttagagctacaatagaaaaagagaagcttttgtgatatattttaaaagataaagtacatcgacctttagagcatctaatgtaaatcaattttaggtcttcactttctatttcaggggggactcagaaaaagctaaatatatctacagtcagttagtggcagttggctcatcatgttgagccattttttttataccattaagctattatatctcctttggtgtgaaagcttatagaagaggtaaaaggtttatattatttttataccttttacttttctctttctttaaataatcaatttattaatcttttattatttcttttctaatatttaattaatgaaaagttttaagaatataatatttagataactagtaaacaatatagataagttaatgtatctatggtgtagtgtaaatatttatccgaaaactaaccctagtgatgtggacattaatatttgacatgtgacaagaaggaagatatttacaaatgtgagtagcctaagtcatagcagtcgacttggaaggggaccctacccttgtgcccaagttgacttcgagaactttgaatctcgccaagttgtttccaactcaccatccttcagtattctaaagcaaaaagtcataaagaatccaattttgaagcttgaggaatgaaaagagtcgaaacgacctcctgaatgtcaacccgggtgcccagcgcccaagttgacatcttggctagggttttaatttttgggttccatcttagtgaaaatagttgaactataatctacatgaataagacctatcacgaacatgttggaggcactaaaattagaatcagcataattcccatttggagcacctgggcacccggtgcccaggtcacctagtgttgcacccaccacccaggttgacatgttgtcaacctggggcacttccaaccacaacactaaagatgtatctcgatattttttttctctatcatccaaaatgaggaaacaaatgcttttaaggaaaaaaaaatggatcaacctagaggccaaaattgggactcagcgcccaggttgacctagtgctaggtctcagggccgaggttgacatgttgtcaacctgggccattaccaacaaattttttgacaaattctttcaggcataatctatgttttcatcaataactaagataagagtgctttcaagaaataaatggagccatttaggagtcaaaattgggactcagcgcctaggttgacaataacttgggccgttttcaaatattttttctgagaagtcttttgggcagaatctatattttcaccaaaaaaataagatgcaagtgttttcatgagtcaaatagaattatttggaggtcaaaactgggacccaacacctaagttgactgggtgcctggtcccaacgcctaagttgacattttgtcagcttgggcccgttctaagtatttttttatgagaagtgtccccatacatctcttttgttttagaaataatgaagatacaagtgttctcggggagaaaacgagattatttaagggccaaaatagggtcccagcgcccaagttgacatacaacctggttcacatatttttgctcctcatattcaaattctgctccaagcattcttcttatttttgtcaaaaacagtgtaggagaccttgttcgcaatctcaaattccatagaagtaacaaaaggagcctagggaagctctataaagagcacttagcacccaagttgacgtatagcctagtgcactgggttctgcttttttgattctagttctctctcgagcatcttactattttcctagtagacaagggctacaatttgtgacaattcaaattcacactttgatatttcacctttttggcaaagtagaatatcggcaaattagctgcaaatcgggaaaattcaagtcaacttgatttcgcagaaaagtaacatctctgagaactggtgaacaaatatgccagaattaagaaattgactaattaatctcaatatatctctaagcatcaaaaaatacaagtttggcacattttcctactcatacagcatccaagctgatgtcaaaatgttaacttgggcattggatgtaaacctaggcgccagttgttgaactaccttcaataaaatagtcataactcactcaatattgatctgattgacgcgattctagttgttttcgaaagctctttcaagacatgtctcatactcatatcgcaattccaaagatttgaagtcaaaatttcatccttaagtcaaagtgtatttttttctgcagattacctgaaaacgatctaatggacacgatttgagatccaaaaattaacgattatcatataaaggaaattttagccattagatcatcatcaatgatctagattagaccagaatgctttttttcatattttctgtattattttaatggacccccatccctataaaaggatagctccattagctctagtttatctttttagaaatttgagctcttgccttagccaattcccttgtaattctcgtaagaaataaaaactcaaagtagatgtagatctattactgtcacgatacgggagtgaactactataaatcttgtgtgtctgtcttattacttgcttaactcatacctcatctcgccaatctagcgggtgggtattggccagtttttcacattaacattttggtgctttcattgagatcctcgaatcaagatcctgaacaagatggttgccacgagatcaacgagtgttgaaagaagtatccacactgttttgcctactgggggcatgccaaccgttggggttggttccgagatgacacctgcatcttagataccaggtgaaggccttgaaactggttcccaaacttgacccccaagaccaccaaaaactgctggtactggtaccaatggccaagttccacctgatgaacctcacgtggagctagaagaccctaaggaggtcgacccttgggttggacaacttagccaattagttactcacttacaacaccagctgcgagaatctcttgacaagaaccgtgaaaagttccaaacctagttcacagaacactggagaaacattgaatctcaacgtgttaaaaaagagaaaagaagagctaatcttgctcatcaaatctgagaagcttattgctctagcaatggaacgacttctcctaaaatcacttccactagagctgaagacaacccacatttgccaactggccacgtgggaacaagccctcagaagaaactcttaatgcatgatgtacttctaccattgcaggtaatcgtgccactactcaacatgcaacaagaactgaggatcctaaaaggaagtgaactatgagcaagcatccaaaaggactcagacttgggaatgcagagttggaccatttgcttgatatggaacaattacctatcagagaaataatctacaagcgagcatctaaaaggactcaaactcaggaatgtagacctacaagcccaccaccttccaccgataggaccaaccataatcctgctcgaagcaatccaaacaaggtgggtaagcgatctcatttgtaggattctcttcacatgtttaatgactctagggcccacaatcctataaaggggaaatggcctatagtcaacctttggggaaggatatggaggctctaccatgaaactagggagtaggagattcaaagggtaaggaccaaaaaatcactccacactcgaaagtattttcatgatgaaaggggtgttctgtgtaggtactttgctcgcggtcctgatggctagatatttcatcgagtgcatgaggaagagctgaacctgagtaatcagtttaactcccttcgaacttgtgaccatgcggaacactattttgaggggaataatcactataatgcttaggacggtcgctctcacaacaactagtccaaggatgactatatcatcatgctggagaaatgcctagcattaccctcacgaccacgtggttaggaggctatagccaagcccaaatcgacaaatagtttcgatcaacttggaaagcaaaacaacttgcgtgataccatgaataagagatggttggtggaagcaagagcttctagcagtaaccctgttaaccaagcagctaagactccaattgagatgcagaccaccacccgtggtattaataagaccaaatttgataccctagccactttggttaagggaatcacgactcttaagctattagagtttgagttagaccgagaatggtgctcactgctcctagattgaataataaaagctttagaggtcctctaaaattcaagaatcccaccgggcatcaatacaccaggaaagaagacacgttgtctcatatccattactttgatgttcagaacgatcttcaaagggtaagagatgatgtccgttgtagaatcttccatgccacgctagtaggcttagctcaacgatggtaactcaagctttcccttggatccatcgattcacagaaggagcttgtggatgccgttggcagttagttcactttatgtttataatgccagatcgaatccaatgatctggtaggcgtaaagcaatatgaagatgaatccctcaaggactatatttgatagttcttagaggtagccactaagacaaaaatacttaacaaggatgcgagagttatggcactcaagccaggctcaaggagatgagtccactgtggtcatacttttgcctcaaggcagtttacaccatgaaagattttcttcatagagcagaaggttttataaaactggaggaagttacttctcaagataaaatcctaaaaaacaagaacaagaaattgtcagactcccctacccttgacactgaggcacaaggggaagtgggaaaggaggaaagaatggggaaagagattgaataacagtggtaaataggctaactcctctagcggaaagaaagctagaacaggagataggcccaacaaggggtacgagcctagattcaccacctattatattatcttggccccaaaagaagaaatcttattgacaacttagtcaatagtgccatataaaaagcctattccctttaaagagtcagggaaaaaagacacaaataagttgtcgctaccacaacaattacaatcatgacaccaatgagtataattagttgtaggatgagatagatttctcgatttatcaaaaacatgttgcccttcaacggtatgtgaggcatgaggcccccataggtgccaatgatcctctccagcctgcagtagtggcaagacatctcgacatagtagttggaggtccacatcttgccgataacttgagaaaatcactagagaggtatccaaggtctctatggcacaaactgagatcaaaattgtttgaggttgcagagcatcctttaaaatctctatgcttcgagtgtgatccaatcacattcagagaatttaattcagaccacgtttgttatcctcacaatgatcttgccattgttaaggttcaaatagccaacatgatggtggctaaagtgatgattaatgatggtgcatcatcaaacatcaattttaagcaagccctacaaaaaataagtttgtctttaaacgatttggaaccatacaatcaactcatgtatggttttagtggggttggaatttctccttgttatgaactcaaattactaatgactattggcactaccccaaggtaaaacaccattatcctaactttcatagtggttgacaataagtcttcgtacaaagtgattatcagaaggctagccctatacgaccttcaagccatctcatccatctacaacccaatttatcaaatttttgtaccacatttggccttggtcacctcctccgataaccaaaaaaactgcccgtcgagtggtacaacacatcgttgacactcgcaaagaaggcttccttcattatacttacagctgggggggcaaccaaggcctctcccaccacgttcggagagatgatgaagacgtccaaggctacaaacataaagacgacagagaccgtatccaaggctacttgaaggtgcacccaagacatggatgacattgaccctcattttggggatattgactcaggagttggtctgaccgaggaactcaaggagattcccctcactaagatggacccaaccaaggttttcaagattcatacgaatgttatactagccttaagttcgtctcttatggcttacctcagaaaaaattaggacatttttgcttggtcgcatgaggacatgat

SEQ ID NO: 378032 - DNA, 2204 bp, Cannabis indica
cacatcacaattaacagcatcagacacccataatcatgaatttttattaagaacatttatgctcaccatactattagactgtgcagtgccagcaacattggccatagcctggttctggtttccaacaccaatagaattcagaactgccccaattacctaaaggaacagcaacattgaatactgagctcctaggaccgaatgaaaaatcctttgaataaaaattaaatattagatgctgaacaataaatacacccacccgactaaggtcaggaaccatcccttcaccttgatccccaacattaaatgtcccaagaactacactgtgtgaaatttgtcccacacggttacgagaaacacctgtattggcatcatttgctggtaaatcatgaaaacacgaaaaagtgtaactaacaaccagacaataagcactgtttcctgcaatagactaaagtcctgatatgctacaatggaaacaagtctcagattcagtaccttgattattattatctccattagtttcaccagaacttgtaccggaggaatcttgggactgtgttggctgcctttcaactagatgaagtgtatgaccattttccacatctatgactagttaaggatcacatttttcaataaacaagcaaatgcggaagacatatatataaagcaagacaggatacatcaaaccaaataaggatagtttacatgaaacaacaacacaatacaccaaaccaacctaaaagataaaactgaatggaaagtaagtaggtgccggagttctctcaaatacaccaatttataatattcaaattccaagcacgcctaagtaacaattcatctccgtgctaattaagtttttctacagacctagaaaattgtaaatttaacagcacaccagcttacactactatttcttcaaagtttttaccagctacttcgcaatataacatgcctcttcacctagaaaatgtatttaaacaatgtgcagaacccattttgcatccccctggaccctaatgatacatcctggtctactactttgaataaaaactcgcaagtacaaatattacacataaacaccttatatgttaggatacggtactcagaaagaagatgctcatcttttaagacctttcccctaaaaatcagccgctgctgaccaactggaacgccagtttcattagctattttctccttaaacgacataacaagcatctgaaattccaaatcctgaagcagttagttggtggtaaagtaaaataaaacaagatacataactgtatagtatcatcaacaacatcatcataatcttcttcttctagtaaaacttacatttttatccactcgaaaattgtaaatctgcgagtcaagtgtcttgatactgatttccacaatagaatctgaactatccatagcagtattgctaatactggagccttcaccggagtactgatccgccattactttacgatttcctaatatacataaataaaacacactaagttttctagggtttcccaaataaatcaaagcttttgattttgaaatcatcacgtaaaacatacttaacaacccttataccaaatgataaattaaatattcaagtatcgatctcaagtaccaaaatgaatgattgaaatgatccacacaattgttaaacaaataaaaattaaactcacctgaagttaagtagccaatataggaagcgataagaagcaaagcaggattattgaagaaaagcgcttagtgaagaaggagttttttcttttcttttcttttatggttttaaggggttggaccacgatgacaagcctagatagttccagaagaatctagattgtctggtgttttgccttaactcctaagatttgaaagtcgaatacgatattttcttttttcaatcgtctgatctacaaatctgatgccctactaccagtactgttttacactatgtttggaaggatggaattttgggtggaaggagagaataaggctatatttggtaggaaggatggagagtagaaggaatggagagaaaaattactctccttggtgttgtttgttaagggcgctttcaaaataatttgattatagggaatattataaaggagaatatgattatagagaaatgtgtaaattgtgtttggttgtgtaggctaatatgtaatcatattcccgttaattaaattatactgtttggttgagta

SEQ ID NO: 378033 - DNA, 3881 bp, Cannabis indica
tttttttctttttaattttaaaaagatgagggatttgcagttcaacgttgtattaaatgttctgtgctgttttatttcttactttgtaataaatgatggaaaaacattggggtttgaggtttgatggagaaataatcccttattggcaaatctatgagattgtttcattctcactctttagtaactatcatttccctatgatattattcatcaaaaaaaatccctatgatattagggtttaaagtatatctttgtcttttagtaagggaaaatgtagagttagtataatttctactaagtcattcagggtcaatttatgttaatccttatagatttcctttttatttacccatatttaaatcaagttaacaatctttaggtttcattttatttatccttattcaaattaagttaacagttcaattcgtaagaagaaaatatgtataacatacaacattaaaaaaaatgtatatacaattataattaaccctaaatgtctccaacaaggacaccagaactaattcagtaaaaaaccagaaacagaatgatagtcaaagaaacccttctacccactgtgtgcaataaaattgcattaccaaagcctcccaacacagtttcttaatcttgaccaaagctcttgtagattaacactgagccggtttaaagttgaactctctcacaacttggatgttatgggaagctgaccttcctatagcttttaagcaccaccaagttaactgctgcagcttcaagagtagaggcctctaccagcaccgctgctccaacagagtagttgccatcccggcggaggctgtagccatcccggcggaggctgtagccatcggggagtcgcctctcgaagatgaatagcatagtgtatgtgatccatgatcttctggttagccattgagataactatctcaactggcaacttcttagcttcatggactatttcattcctttcccttccagtcatgaatttagaggacaagtttggtggtggtccataatgggcttcttggaatcgatccaatcaatccacccaggtaccaaaagaagaaaaaattacattatatatctactttattttacttatttaaatttttacattcatttttatattctataagatatatccacttttatagattatgtccacattaaatttttaagtcaatataaattatatgctagacttaagtaagacttaagtaaagaatgagggtatattggacaactcatgggtatattttaataaaatataatataagtgtatttttaattaatgcatacaaaaacaaaggtattcctcaacttattccccaaaaaaaatagtaatgtcctgaagccgacacaaagagccaaaccaaattcaatctatcaatgaaaaatgatgcttctatgttagattcaagtaatgtactattatatttctccttattatgaaatcgaagaagttacacaagaattttgtcgggcctgctcatacgatacctaatcatatggtattcaagctaagtagttttatgaattgagtgttgatggctgcacatttgtacactaatttctagttaattattagatgaagtactatttatttcttaagttttatatagatttgatgtgttttttctaagggtgtagattattttgtgacgaacttagatctttgagctaattttcgacaatattttcatcattttttcgaagagcttatggaatccaaaatgatagagctcgttctcagcttttcaaaacatgttaaaccatctcatttggagtccgaatgtgaaagttatgcatgatttactgaaatttgcctgtagcgactattttaacagacttattttgtaatgaccatgtggtctaattttattttcaaataacgttttattttgggataattataccacatactgaaattttcaaatttttaacttttatactttgggatagaattttttttcaaaaatactttgtaagttttatacagtgtactgtattaagttttcactgttgttctacgattgttttttagttgttttattgttgtttttagttgttctgttttgtgttccactgctgttttataaaaacacagtatttttgaaaagatttcagtgtgatagtacttttgtaagcggcataaactcaatgtttattttcagcggcataaatactcaatgtttgtaaaactgtaatttttttctaattttatcagtacagactctgttattgtcttaaacaggtcaaatataaagtccaaattctagatccttggttctagatagaagtatataacatcagttactttcaaatgtccttttaataaattcaaaacagagtttgtactgacgaaactgaaagaaaattacagttttacaaacattgggtacttatagcgctaaaaataaacattggatttatgcggcttacaaacgtaaaacattggatacttatgccgctatttaccctgcaaagaatgtaaatttagaaaattaccatttttatgcaattattagaactttgttatatcactatttatattaggcccaaaaactccattgctggccctgcaccttatatcttgattctaaggttttcggccgaaactataataataataataataataagctaaaacccttaatttttcagaagaaatcatccaaaaacctctgcaaaattcatcaatggcgtccaccatttccaggaagactaaccactttcgttatttctatcgctcattatcctattcccgtcttcaacgatgttcatctccattgccatcttcacacctcaatgacgcggttcaatttcgacgacctctcttgctcttcttctacaatcggttcgtgcacttttctcaaatttctcactttgtacaaatctctgacacgattgttcgtgctttcccttcgtcttttcaaatttgtcaatgcaaattttgtcggtttgatctagaactctgtgaaaataaagtagttcttcgatttggaaaatctttaggtattgcctcgagggcttggagtacaatctttaactttgtatcagagatgtctattttcaactacgacgcctaatactaatgctggaaatgaagcatcgaaagtaggagaagaagctaatactggcaaagaggagaaatccggggaatcgaatcagaagcaaagcgattctgggaaatctgttcgcggaggggtacaaatacaattacatatttttcatttgtattgatttatatcaactttttttcttggtttaatttgagaagcttgacattttctgaccttgttgtgttgaccttttgcagccagtttcttggttgagttttattttgctggtagccacaggactgggaattatcttctactatgatacgaaaaagagaaaacatattgaaggtagattactatggtgagtagggtgtttgtttgttagctgtgctagtggattcaggtctcatgaactgaatcaaaattgcttggatgtttctgtttgatgttcaaaagttttaatatagatgaaaaaaatacaatttctatcatgttgtgtgtatttgaagtttgttcttttaggagtgaagatttaatactggatctgcaattatctgatctctggaacttgtttcaagcttagaaatatgattggtggcatttatgtttttcttttgaataaaatgcaaatcgtcaagaatagcttctaagcaagagaggtccgtatctttcctattcaaagcttgaaaaacatgggcacaatcagattcaaattgtaaagtttttaagtcagtccttttgcacaatctgattcagttaagcacagccatagcttgttgccatttatgtttttgaatgcctactttttgtgtttctgaaatgtca

SEQ ID NO: 378034 - DNA, 3366 bp, Cannabis indica
atgagattttagagctcttctgtgaatttattcttgcacgtgttcccatcattgatagccagaggtaaatccatttgttatcagagatttcttttttgtggacagtttatgaaatttgcatggcttgtgttatagctcaaaagaatttctaatagttttgatatatttatctcctaactgtctaatcttgatcactccaaaacataatactgtaaaattggctgtccttctgaaagaacgtaatctaatgtttccacaaataagggagaaacaattggattacaaatttctgtaaactttacttcccacttgtcctttgtttatcattttgtaaagatgcccccttacgagatgcttaaacaccgaacaatttagaggaaatgaactgatgaagaacaagctgcagagtgcggtatttgtaattgaggaaatgaactgatgaaagacaggaagacttgaatgtgatcgaagtgaagccacctatttaacaattttcaaattaaattttagatgagtgttgcatgccgttcttggacatttgatatacaagatgaccatacatcttagataatagaaatgaaggataacccttgttccatatgttttgtatcacatatgcaaggttttgaaacaagctagtattttgtgaatgttcaatatgtagtacacgctttcttttcaataggttgctcttatgttttataagtctcggttggaggtgccaatctatttctgtataaatttattatgttggtttctgtcttagcattcatcttgatgaattcaagctctctaagtattgtgtgctactattatacctttttcttagagattattatacaaaagacactgcaatagaaagtttttaattaagaaatttgttacgtcgttttaaagtactcgacagaaaatgtcaaacacttgataagagtagaattcgggatcgtattttccttaacattctcttatgaatcaaatttgataggacaatatgctcatagtgtaggatatgttattgtgaatgcttttccaaatgtatgctatatgttctagtatgaccaataataatagtatttttaattcttgcactctccctttttccccaaaactttgtattgtcctttagtttaactaggacttacatgaattctttgtcatctaaggcgttttgacaatcattagtaacataacagggagtgcccaacagagctgcaagaagctatatcaagtataatatttgctgctcctcgatgttcagatgtccctgatttgttgcttatcaagaatttgtttagtactaagtatggaaaggcatttgtctcatctgtgtctgagcttcgtcctgattccggcgtaaaccgtactgttaagtaaatttaatgcattgccactttgtaatatatatgtttagtgtttgtacttgtaaaattgatgtgtttccatttcgtttgatattgcaactacagataatcgaaaagctttcagttagtgctccatcaccagaggtgaaactcaaagtgttgaaggagattgcacgagagtacaatctggaatgggattcttctaatgccgaagccgaacttagtaaaagacacgaagatttgctggtaccttcacaaattatctatatgttttttcattcacacaacactaaaataaatatatcagtaactatcaactatttttacacatttcattagttgattctattccctgcaattaccctgtctctgagctttatttgacatagttttgtaatatcttaaaaaattatcagttttcttctcctactctgccatcccttagagggaaaacccttcttcacgaatgcatgcaaactcgaattgaaagtttctttgtcagtttactgttgttagaattccatttctcgaaattggataaatgacctacccaagagtacctcttgggtacctacatacctaatgctgtaatttctatatctcttggggccattacattctaatcttctttagtacagaatcataataatcaatctatgccttcattgacttcagggtggatcaaaaccaataactggtggagctggacattttcagcctcccgcatatcagggcacgtttaactcatcaaactcccaaagggaaatcccaactttgcctaaccatataataaaagaatctcagcagcctcaacttccaaatcctccgagtagggtgccttcatcaggtactaatgaaattcaagcttcaactaaatatgataatgcagcagcagttagaaatgtcaaaatggagacaggactacatacatcctctgatatcttggaaagagctagagctgcgcttgcctctgcagaacgggcaactgcttctgcccgagcagctgcagagctggctaatgttaaatttagataatcttagtaaatgctttgaagaacaggtcgagaaagtaccaagctcttggtatccattgatttcagttgggaaaactctcctggtgggacttaaggtacttcactttcttctcgttattagagaaagtgcaattgcttactttgtgtataccattaatgttttgtatgttgatgaatatattataacattatattttgttattttcaaataacaaggtttgatttatatatatatatatatttgtgtgtctatacatccagttgctgaaacaaaaatttacaaagtgtacatgttgtgatagaataaatttacttaatagatcatgagttgggtttcttttctgtgtctcattctcacaattgaagaaatctaagtaataggatggatctaaattctcatttatgaagacaagactttcagtttgtgattataaaagtgtgcgtttatgtatatatacttgttatatattatcttgctacttgtcaattttgaaaaattgtgtttattatagattaaggaaattttgtttaaattcaaggatgtataagtttttgattgagtttaacttcaattttgaattaaagtaattagtattaaattagattatatttctctaatctaacttaaataataatcgatctaatttagcaaaaaatatatataataaaaataaacatttaattaaaaaaagattgcaagtgtattatatatattttggagataagcattattttgagaagggtttaagatacccaataaatcaaacaacagcaacaatcttagtagctagttttccaatttgaattaaattatgtcttattatgaacctaacttatagacactttctttcattatattttatatggtggtaaatgatattatagaattcgggtattcctatagggcacttgtggtgttaggtgtcacattgcaattggttaacaatattccttaaaaattagggaaaaaa

SEQ ID NO: 378035 - DNA, 3858 bp, Cannabis indica
cctgacgaagaaaggtcgagtgtggtacgcccgaatcatggcggggggagggaatttcccagacatctgatgacaggaagtcgatgggggaggtggtttatgagtcccaagaagccccttgttttgattttcctcttccctttctcatgggacttcatatcctcgtaaaccacagccttgattcgggtgttccccgattttaacattttggattatggggtgtctgcacaacaaggcaacgatgtaagcaaggaaccaaagctgtcaccagccacacgatcataataaacaatagcaacgataaggaaagaaactaatgtgaaagcttgtgcatgggcacgaccatttagtgaagtgctatagggttttccccgagaaaaagctaaaatactcgtacaacccgtgaagcttccatattcttcaaattcaagcaagaacatggttgttagagggtcaacactgaaaatatttgatgaagtcccaaggttattagggccctaattattagatctactttctctatgtactcctccatgaggaatttaaagttgtttctacctaaaaaatatttgttaaattctccctagttccgctgagacatgcaactcaggctgggggtacgaaaaatacagaagggcttgttacctcttcctgatgtactagcctatggtacctcagcgcaggcggtaacaaatctctctgagatttcctcttccttagccaaagggttagggttgcgtgacacccattcggagtatctatactcttaaacttagtgatcagagccgacctatggtgaacctcaatcatcactaagcctttaaccttcaattgctctttgcaaaaggccctatattggccctctttcctggctatctttttcgtgttgatgctctattggggaagctcagctacaaaaggaaaagaaaatgctaagtcacatgcaagaattagcagaatccgaaaacaaggcttgtaattaactattaaaatacctggaagttggaagctaaattgaagaggtggcaccctattaattgagaactcgaaggaaaagaaccaatattcccggagatcatgggtacgatccgttggcaaacgggacagtaagagttcaggtgtttatccagtcggaaaaacatgaacttagacatattcgtccttgtgggattggccttaacacagtaaaagtagaggatttcctcaatggaagtaacttccagtttattaatcttgcaaaatacatacaccccagccaatgggctataagatgaagggattagctagaaggacgcaatcctgatttttgcaattatatgcacaaagtaagtccttaaagggagatgagcgccgctaaaaatgtgggaccaactccatgcactaaaaccatcaactcccgtggatgcagattctcctaaaatggagagcctgtgccacatcagaccaagaacgttacgaaggcccacgacctcaaagtatgcttgtaacatcccataggatcggaagcagttggcctcctagtccatctcccacatagatttaggacaaacctaggccagtaagggaaaccccctctcctggtaattacgggtaaatttttctccgcggtaggcccatcttcagggatggtttctaaaatctccacaagctgaggtgttcctatggagatttcggtttggtcttgtcccccaagagatattttagtagcctgaacagagtccctggcggccggcataactacattcgcaagacattcttcgttcaaatccatggaaggaagggtaaactttttgaaaaaatagaaatggatgaaaaggcaagatttttattttttacgcacacagtctcgacgtaccacccaagtacaacccaggccctaacctagactaaaacctttactttccctaaataaaacatgctaagaaactcaaatagtttgttagagcacttacttgatggaacagaaagagtagtcagtgattccaaaaattttgtcctaaaactctatagccaaccaatgcaatggtcgcaatcagcttgaatttcaaaagtccccttcgataaagaactttgtcagttcagttgaaggggagcagcatttgagaaaagcttagcacgaataaagagtagatgctgaatcaaaacatctaattctttctgcatgcaaaaaacagaacatagaaaaaagaaaagcagttgcagagaaaaagtgaagctttgaataaaaggattaaaaaaaatactaataccaccatagacagtctttatgtcaaaaaggaaaaggaactccaccagatcaaccgcatggataggtcacaaagaatccaatgactagggaaatgaggggtcccacatgctgatcttacccacaaaaatgtcgaggtctttttcctcatgtcattcaaccgtcagaagcactcctcctttcttgctaagcacgctttaccatatgtgaaagagaacaaggaacacctccaagcgtaccgcgtggtcaacacacaaaaggaggaaaatgccataaatacccgtcgaagaattcggttcattctgggaggtatctgtgatcgcaaaattgtagcacatgtctgcaacaagtattgaagaaaatagctagcttccgtgacccaaggagtcttgaaagctgggggtaaatattatccaaattttccttttactagacacgtggcatgatcaagataggacacaatgtccacacaaggcactcacgaaaattatgagaaatgactcatagacccggtagtcgataagaggtaataactatcgggagcaatctcctttagtgaggaatctgaacagtgatgcaggttccagaatcttgggacacgtcaaatccttacaaaatagcactccaaagatggttacacctttttcttacacaggatcagatctcgtcccctgtgccagcccatggtagtgcgcgtacataccctcgagcacactttttgcccaacagcttgtgtagagacaatttcgtaaaggaaggacctttgcacgacatgtgtccaaggttgtaaaaggcccttcatcagtcgctctaaactgcacgataaagaatgttcctgccagtggatggccaaatagtcccttctaaagtaccatccttagtaacgtgtggtagacaaaaccctagataggtaaagggcatgccctttatcccttatgcacctatatataccctggttctttcaaagacaagggtaagacttttcatcttccattaccctacaaaaattcctagcagtaattcccatgctgtaatacattgtaatcttataccatccaccctaagaggctaataatatgaactcatggactaagaatcattaacgccaaaacaacgtaaaacatgttgttcatattatttatcatttaacacttcctttaatctctcaaaatatttagttcccaaaaactcagtaaacaccaagttaggacatcaacttgcttttattaggcaatgtgatacatggatgcaaggttagggcgttgacttgcctcctattgtcaattatttactcgacgagaaacttccaaatgacaaaaatgaggcatgaaaactattgtattcagtgcctcgttacagaatgatcgaaggaaaactatttaggagagggtattcaatgccactacttaggtgtgttctccccgcataagcaaatgaaatcatcagagaaattcatgaaggcttctgtggggatcgtgcaggctggcaaagtatgtctaaaaagattattagacaaggatgttactggcaacaatcaataaggacacacacgagtttgtcaagaaatgtgataagtgtcagaggttttcacatatacctcgcgtaccgccaac

SEQ ID NO: 378036 - DNA, 5260 bp, Cannabis indica
caaaatcggctgcctatattttttatctataaagaagcgtatatagaatttttcgatatatataaataaataatttaatatcggtgtcctactccaattacgataaaaactatataattgaaataataaagacaaataaatgaataaaatatctgaagataatataggcagtagtaatatagtagtaattagatatggttgatctgggtgtggggtcattttgtacgaatgccgccctgaaaataatgaaacttggggctactttgctaggttttggttttcccaaacaaatgtttctatcattaccatttacaattcactatccagaagtgaacacgtcatagaaagagaatctcataatgacgtggcaaatttctactggatgtatgtgggacgaaaaaagaagtgatgagaacagaggagcgcactttcttagatggataagatgtatgaaaagtcaaatcaagccgatgagggtagaagggtaatttcatcatctgtcctcttcttcttttttaatgaagctttagcgaacagtggactgtgttggtttctgggtttgtcctgtttagagggcttttgatcttggagaacgggaaaagttgtgcagatacatatatagatatttaaaaattcaacatttagggtttctttattaaaattttctgtttgttggatgggaataattttctggtaaaattcctggcaatgggaaaatcattcaaggactcactgaaagcgcttgaggcagatattcagcacgccaatactttgtgaggctcttctctgttttgattattattttattctctttatttttgtttctttgtttggaattcgagattcatcacgaatatgaattttctttttgtttctgtttttgttccaactttttactgttaccaaatgtataatgattagtgttttatgcaactaagctctggaaaacccattgtctaagtataatattccagaactttttttacaaacgatgagcgaaggaaaagtgagaaatttttaatttttaattgttgttaatatttttattttccatgtttagtctttcgtttcaaggttttggagataattatcacaacctatttgtataattagtgtaacttctttttgtgagttcaatgaatataaatacagctcatgcaatttgtgagttcaaggtctttcatttttctctttgttcaatatatttgcaaggaatccgttttgcaactctccactattcataatatatttaatttgttttgcctattttcttctgaaaataatgtgcaatttcatagtgcttttgggatgatatcaacaattacagatgtttagattgatttttcactcatctttactccagggctttagattatccgagagataaagatggagcacgccttcagatgagattatcttacagttcggtcgcacacctctttctttttctcgtgcaatggactgattgtcaacttgctggaatgctgggcttgcttagaatacatatttatatggtaatttatttttcatgtatatgaatgtttgaccttattgtttctccaattcgtttgtgaattttatttccacttatatttgccaatttgtttgtgggcttagcatcccaactcatcccaaaaagaaatcaatgtagcaattttatggtgacttacttatatgtttgggtttggcaatgtggtggattggtttagacctttgcagatggcaagactaccatgtctgtttatgaaaggaaagcaagcatcaaggatttttatggtgagtgaggtcatacatgtttgaaagttagggtatatgatcataacattgttacaatttcaaggattgagtattcatgcgagttgtcatttttgcttctgtgggcagctattatatttccttctctgttgcaacttcagaagggcattactgatttggaggacaggaaacagaaagaggtatgcaatgttagatacaaaagaagagatgagttggagaagggtaagctgtctgaggctgacaaagagagagaagaagaatgtgggatttgcatggagctgaacaaaaaatttgtattgcccaactgcagccattcaatgtgtttaaaatgctatcgtgattggtaagttcttgcttttccatgacttctttcaagtatcgtttgttttttacaaactaagaacacagaaaaagcataatgcaccatgggctcacttttatgggtgcaatgaagtaagggttgagccctcctgaatatgttaacaaaatcattttgttaattatcttagctgacactaagggaactttacaaaatctataaatacatattcgtagctttgaaattttttctttttccctaaataatataacttctgtggcaacacaatttaccaaagtagatatgtgtaactgtaatgtatttcccatgaataaagatggcagtacctgcacaaagcattattacttcattgcttaccccctcactctcagcaaaaagtgttgcttgttgttgacacatgcatgtttagtttcttctgctgtttttctttctttctttcttatatgtaatgggactaaatgataattttcatgttacttttaggcgtggacggtcccaatcttgccccttctgcagggacagcctcaagagagtagattcaggagatctttgggtcttcacagaaaagtcagatgctattgatttatcaacgattttgagggaggaccgcaaaaggttatttatgtacattgatagactgccacttgttgttccagatcctatatatattccctacgatgctcatgttcggtgagcctcatgttgcctacatactctgtacataacaatcatggttgtaacttgtaaattccttcgagacattttgaactgcattttctgctggccttggttatgtaaatgtcctaagaattaggatataatgccttattatggccattttttttattggtccgggtgctggtttatggtttcatatttaacctaaatatggcgatgaaatatagttcaagcttcaactttctactctgctatatctccttgtctcagtttttttctttagtatacatgcatgcacttgctattatcaaatcaccattgaattttgttaaggtacatgtttttctgttaggtacctggtaccttgccttccaaggtaagtgcacatatattagtttcacattgaggcgtactatcattgataagtagctcaactccttcggccttccatcagtaacaaattgagttgtaatatgatagtagaagctaattatatgtacacaaatcaataaatacagggtcaagattgttcattctgcatgcgtacataatctgtgtagaagcgaccattgctttcttctgtttgagtataggcatagcctccatggctggagatatctaagccagcaacttcttcatccacagtgatcctcaaaagtctaagcttatgcagaatatagaaaagtggtcccatggtcacactaacccagcccacaatcgcaaaaagctcgacaacttgagctccaaacagaccccatcctccacccatcaggacaccataggacctgaccacaccactctttcccgaatcgtaagcttgaatgacaaactcctcctttgcaaacagcccagtgaatatcaatccccaagcaccacaccctccatgtaattgggccgcttctaatggatcgtcatattgcaacttcagggccagaatgttgagcccaattaaaacccaagctgcaaaaaacccacaaaccacaccggcccatggttccaccactgcgcagccagatgttatggcgacaaagccaccaagcactccattgcaaacatctaaagtattccagtgacccaccaacaaccgccgcccgaacagagtaacaatcccggcggtcgaaccagaaagggtcgtcacaaccgctgcacggccaattccggtccagttaccttggtcagtagtggttggataagccactaaaatcttttcaaatgaaccagggttgaacccgaaccacccaaaccacaacaaaaaggtacccaaaaccacaagtgtggcgttatgacctctcattggtacggggtgaccaaaagcgtcgaatctacctacccgcgggccttcaataagggaaccccatagacccgcgactccaccgaccaaatgaacgacaccacttccagcaaaatcgattgcaccggaaccaaaaagtaagcctgtggtggaactcgggctgagccagccgtgggttgaccagagccagtgtactacaactgggtagacaaagccagagagaaagaaagagaagacaaggtaagcactgaattgggttctctcagcaatggagccacttgtgataccggccacagcaatggcgaatgcccattggaaaaggaagaagctgtaatcgtaagaggagttgggtacgttgttgagagcgaaataagttgagccaatgaaagggttggtggtgaagtctgaaccgaaagcaaaagcgaagccgaaaaggtaaaaagagagactaccgacaacagcgtcgacgacgttggtgagcattatgttcattgcgtttttggctcggactgagccagcgcagagcatggcgaagccgagctgcatgatgaagacaaggtaggcggagaagagaaggtatatagtgttgatacaatcttctacactttgctgccatggtgataaaacactgtccatgagtagcaaagtaatgtataatagtaatagttagctcttggaagatataaagctaaatagttaagataggttgaatggtagctacataaacattatatggtgtgtaattggagttgagcattcgttgttgagctacataaacattatatggtgtgtaattggagttgagcattcgttgttgacttgctgttcaattctacttcattgatttttttcaactgaaaggataggctgtgggcaacatataatacaactccatccttaaaacctatacataaaaatcaccttaccgtacttgatatactcggaaaaaaaaaattgtattgcaattaaaaatattagagtggtttttatatgaaatattattattagtttttattttttattttataaaaaactttacatttatctatgaaactcaaatttttatatgtttaaaagaaccccaagttgggattgaatgtacctaagatggcgatttctaggactctcaagaggcatgtttcccttcctccgtccggtacccaaaatgggttttt

SEQ ID NO: 378037 - DNA, 2016 bp, Cannabis indica
aaccgtcgcctatttgcccattttacgatagtcgtataggcgacagttataagtactttaaacgactgtttaaaaaacgtcaagaaagactatttttgtagcaataataattatattgtagtatgtataggtttaattacagaccatctttactcataaattgtcccaagtgtaatgtttaagttctacaacatatactactcttttctttaaggtgcttgttgttttaatattcaaaaatatgtaagcatgaaatagaaatatattgattattgccccaattgacgacttcttaattaattatatgtcttaaacaagatatgtatatactgggtgctgttgatccactttatttgttgccacctcaccttagttatatgtctttggttctttgagagaaaaaagtttgagagaatatgagaatgagagggaaaatgaaaaattctcatttcgtacaaagagggttttttactcgtcatagtcacccagtgtgatcatgatacgtggcaaatcaaaggttatttgatctaataactatctcaagtcatgcttacacagaccctgaagggtataatgatgtggcgtattagaaagataaaaatcattatttcaggcatcattttgaaaacccttgataagacttccaaacgtcactttgatatgacaacacaacttgcctatcactcgagataatttcactactaacagacagctgtcattgcaaaactaagggtattttttatggcacgagtttttgttctaaaaatatgagtacagtctcgtaaatagctgacacgtggacttaattctcaatggaaaatgatgacggatcaatagatagctcttgtggagctaaccttacatgatgtgaacttacaagaaagtgcaatcgagacagggtctagacactatacataatataacatcgagaaataagtaaggtaccaagagaagttagtactaatcgtgcatgtatcaattatatgtgatgagcaagtatatctctaatgtgataggtaaagattgtttctttacacatgtttggtttgaaagtctaatgtgtttgacgactcattaggtactcacaatttctaagtgttcaacgtaaaaatattcgaatatgcaattaagaatgatcgctgacattcacctaataatcctaaaggcccattatgtgagtgaaatacctcagagcctgcgcgcttgtgcgtttggaatacgaataattataatgtaactagacaagttgcgcacgttcaggcatttaatcaaagaagatacaaaatttatctttcatttattctgttaacattatcttaattaatgtaataaatggtgatgtctggtcgattatgtaaaatcaaaggacacttgctttttatataacggagtgatccaaatcaaataaactaaactgaaaagaatttccaaaagtgacctaagcataccaagctctaactgaactactacacttctctgtctcatttactttttattgtctttattttgtctattttgtagtccaatctttgagtattcaccacactaggtgaatacccgcatatttgtaagtgtgttcttgctttgctcgaatactcactatttttggtgatgtctaatttctttcgacaacaaagatgttgggacttgaagatgggtccaaaggagttacaaaactccatttttgattatgctgaaaatgagttaggtgacatattgcttaaagtaattttcattgtaaaacctcccaaacgtttttgttttattggagtttagtcccaacatttattctccaatgtctataacccctatatcactgatttgtgtgatgataacatatagagtgtcatgaaagtgtgattatcttaaatataataaatagtggcaacaacctgtgcaaattatggataaaaaagaaaaagtgcttcgcaacaagactattgcactggttaaggtgctttggaggaacagtaaggtggaagaagccacctgagaattggagtctgatatgaggac

SEQ ID NO: 378038 - DNA, 2029 bp, Cannabis indica
atatattttatgttatatgcttttttttactgagtttgtcgacttatagttattgcttacatgtgtaggtaaatggaagactaaggttgaacatcaatgagtccagagcttgggaataattgtacatgtcaacacggtgccacttggagagttcgatctcgagacaacttgggcttcattttgtagtcgctaagcgacatgtctgtaaagtttattttgaatatgaatataagtttttaaagcgggatcctgactttttgtaaggatatatgcatatatttataaaagtttaaagttaaatcaagaatttaaattgatcacgatttttaagaaaaccctttgattagtaaaagtgtgcactaaaaaattattgtagtgtgtataattaaaaatatagtatatggagtaattactttagaaaaatatatattaaaattggtgacacacgtatataatttatttatttttttaatatacacgtatataatctttttaaggctaataaacgtatatcatttttttaaaacaaatacacgcacatcatttttgttttggtttttgcaatacacctatatcattttttttttgaaagcaatacgtatataattttttttttgaaagcaaacaaatgggattaaataaacaaatctctggacatatcaacatataatatgacaacacacaaaatatggttagttaacactaagtaattaattgtatatgaagtttatttttaagctcaattattgttattttacaaatccttaaatcaaatcatatctaatatgtaaataaatttagcgtaattatatgttgtgaaaggggtctaagaataaaatgtgaattgattggacagaatttaatatacttgaagaaaatccacacaaaaagcaccattttatgataaaggtctccatctaaggctgtcccttttgcaagtttaattagagatggagaagcatttagataatgacaaaatggttcttgaaataaaagtgtgaaattgaagcaaagccaattttttaattattaattttcatttttattcttttcttataagaaaaatttataatttatatgtgattgcattaatcatacatagttggtgtcatattgattccaaattattctctcttttttcattattggcataaaagatactaaattagtaaattttgagaaacttacaaatgcaaagtgacaaaaaccatcgtcaacaaaggaaggaacaaataaaacaaaccatttttaagaaataaattagaaatgtgatattttcccctattaggaatatatgaaaccattgttacttttgtggttgtaaattcaaatagcaatagtcattattaaattatacttaccttaaaatgagagtatgaattgttgttgttgttgtttttttttttttggaacaattgagtataaattgttggaaactctttgaatagtcattttctttggcccaaaggtcattgtggtcctattgttaccctaacaaataattgattgttaacttaaaaggaatttcttccgtgtagggtttgtcatttaggaattggttatctttttcaagtataccatattttcaacattatagtgtttttgttatcattttcattgatgaacatgcatttaggcttgggcaacacataatcttttctagtttcatacttcgaatatatgtttcattctttctttaaaatggtttgtatgctttgttctagtgctgccaaatctgaaagagggttttatcttctcccttaatacaagtaactataatggagtaggtcttcattattgattgaaccaccataaacatattgttttttattgttttctctcttcaacctctctcactttctgaattactgaaaaatcaagtcaattaaattttagttttatttctattttatttttgtttttaattacttttatttcatttaagggctcgttggtaacgccgtattaggtcgtattgtatgtattgtattgtattatattgtaattggtattatgtatcatattttta

SEQ ID NO: 378039 - DNA, 3582 bp, Cannabis indica
tctagtatatatatatatatatatatatatatataaaaaaaataaaaaaaataaaaaaagaactgctgagacagttaaattataaggctttcatttgatgcagaaactaaaatttgtaaattaaattaaattttcaatattattttgttttttcaatgcttgtccttcagctgagccgtacaatatttagaagcttgaaactcttaacaaattgctaaaaaagttgccataactatagccattattttgttacaagaaagtgatttttaaacctcattgaggcaaaccaagaaactgtcataggtcactaaaaaattaaataaaagctaatcgtcatcaactccaggttcagataacaaagtctccagctgtttcactttctcatcgttgaagccaagagtagccaatattttgtgaccaggggaattggcttctaaccaaatgccaagaagcaaataagacgtcgtagtttctccaccatcgcctgcaatcaaaatcagagaatcaaccataaagattctaaaataaagaataacagttgagaaatcatgcaacaaaagtgcttagcacgatttgcactacatcagaaaagatgaactttaacaaccctgaaaaaagttggagtgtctaggatcatcacagcatagacacaaccttttaatagattaaacttcactattaagaattattgattataacccatgcagaacttaagattttgttcacaaatatgtacaaaaaaaggcctgtatccagaaaccttaccagaccaaccaaaacgaattccagaaaagcaattgaaaacttaccagatttaattttttggtcttagataattttagcatgaaatgattatgttatcaattgtctcatccacttagcttgaagtgtcatgatatattaattaattttggaaaatggccatcagagtcttgcgctctaccaactgagctagacgggcatttgatcagttcaccaaataaagatttaaagtaaaggatagtcatcacttaaaactccaaatgagccatcttaagcttatttagcgaaaacaagttgatataatatcaattgtgttggtacgcactcttcgagtcagtgccaagctccaaatgcactcttcaagacagtgtcaatctcccaataagaatattcctaattgtaattcattttaattccttgacctatgaattgccattacatatttatacaagttaagtaatactaacaaatactaattagtccccatactttcatgtaacacaagtcccgtctaatatctatataaccaattagccaggataatccaaatttttttcttgggatgatcatgatgaaaaaatcccttagaaccatgtctgctagtaccattacatataataaatgctaacccatttgactttgaaaactatcttaatacttaccaacatgattaattagcttcaattgaatataacagatcagtcaaatgttaacatcctggctactgttagttcacaaggaaaattatgaaaatgttcactttttcccattgattttctttttaaggtgagatttacattattagaaaggatggagttgaaggaaaaacccaacatatggcacaaaataacttgtcatgagcaataaatcataacaaccctgaaaaagcttagggcttgggatcatctcaatatggacaatcttttgaaagattaaattcagcttaagttttaagaactattgatattaacccatgcagaacttttaaatttgcgttcacaaatcgaagaaaactcctatatacagggaccctaacggaccaacaaaaacagattccgaaaagacaagtgaaaatttaccagatttaattttttggtcaatagcccaatcaagtactctttgagcttcttcagtcaaaggaggatgctcaggactgaaatagaacatgtctgccttcccaactaacttgatagcttcttcccgaactttagtaagtgttattccacttgctctcaaaaatttagcagccagactagtacctgaagttgatcacctaattattcagtacagtacattacataaacaacacagactcaatcaacaagtatctcatttgtcaaaaaagtaagatacattcctggatgtagacatgtaagaaaggcgattctcaatacatttacccgcacaggttgtagtaattttcatcttcaagcaccatacaatctatatcactaagaatcccaatactaaaaattataatctatatcactatatgaacagaaaacatgacataaataacctaaagctattaagaaagacattcctttactatcaggccatatgagccgaaaaaatgagatataactaaagacttcaagcatgaaagcataagactccagctcaaccataactataaacttaaaagcctaaaatgattgcaatttcagttttagacaaatagcattttcagggtcagctcataatcatattattattttatttttcttttgctggaaaaggcagttcgtaattttgaagaattattacaataaaaattggagaggtttaaccaagtattaccctcaacaaggatccccatgagaagggcttcagtccctgtagttgaaaactttagcttcctagcttccaattcagacataccaaatgactttatagccctcgaagaccatctgcttcaatttcaaaatacccaattcaaaaaaccttaatcccaacagaacaaaacccagaaaccaaaccacaagcccaacaccacaaaacccctaaaaaacaaagaaggctacactcacttgggaatgctctcaggagaagaaaccgtctctggttttctgcaattgccaaatcagaagcatctgaaacaataacgtgtccatctaaaacggagaagaaagcaaaaaagaaacagaatttcgaagaagattcagaaattagaatcttacgctgttggtaggcttagtgaaactgtggcggcggcgagtcggacctttagcgggcggggccggagactggaggactgaagcgataaacctttggtgcctagccatgaactcagcagagttctgggtctgaatgttacattcggagatggtgagtaggtttcgggtgttcttccaatggccgccgtaggaagctttgagagaagactggcattaacagcggccatttctccggaaaaaggataacagtcttaacttcgagtctcttactgatatctctctgagtggataggaaagaaacgacgtcgtttaagcctttttttttcgaatatttacttctcaaatgccacctattatctttttcagttttaacaaaaaaagaaaaataataataatacaaaaatacttttagctagccaaataaataaatatacaatctaaatataaaaaattacacaaataccacttacacacactttcaacccaggatttatgcttcttgagcaaccatcgtgcaaccacgcagcaacccaaccaggggcggacccacattgtagcgaggggaggcagtcgcccccctgaaaaaaaaaaatacgagaaaaaaatgtatgtgtatttaaattagttacaacatatatttgta

SEQ ID NO: 378040 - DNA, 2591 bp, Cannabis indica
tttttgttttcgaggtgttaaaaaaattcatggttgtgttgctgtgaagattggtttggtagttgaacaggttaggaaaaagtagggtgatgtgtactagttcgtgtgtataatttttagattacgtttttgtttggaatctgagaaggctttttggtgtttacaaactgttggatttggtgggaatttgatggttggttaatgagtaaattggggttaaaaggaaaattatggaatttggaaatttttggtcttttgatataataagaaatggctaacttaacttagttgaatttgccaattagtaatggaaacttgtgtttttttttttttgtttggtttcgatggaaacttgttgttgctatggtaatatttggaaactgacttgataatagcagagactaaggaggcaataatgaggcagattttctcattctattttaagtaaatctacagtcaattttaggcgtaagaacctgaggttatttaataatcgttttaaattgttcaaaattagtgtgttttcagaccaggattcttttctttttcatttacctttttttgttgatatatacgtgcttttatttgtttggagattggtcatcaaatttatagcgggataaaattaatacgcacatctacaagctaaacagaaaattagagaagcaaaatagaataataaagaaactgcctgtctagaggaaaaaacaaagaaagctcagctcactgcactctggaagcaatgagaatatgtttgcttcattgtatatcgtgttctagatgatactcatcctgaaattgtttttgatttttcatatgaaaaattaattttgattttcgaacctgaattaagttagttcttttagtagattcatggtagcaaatggggatgggtatattacatttattttcatggtaatcaagttactgctatatcttttggatttttttttattattgagtaattgatcacgaatcctctatcaggctaaaagatatgaaagatattaaggttatcattgtgaatttggccaaaaaaataaaataaaaataaagacgtgagttatgcgtgctataggaatattgtgggtaaattttagctagagaaatgacagtttttttttttttttgaaaaagttagagaaatgacagttatttaaaaaggaaagggatttgatatttgtatgagaaagggtgaaattctagcttctctctttgctttagtggcttaaaggtttaaacgttctctctcttttgttgttgttgctgttggtgagattgataatagttgatacaaggattttgtgcaacttgttttctaaatcaagaagatgaacggtgggtgcaatagagatagttgtgagaaaggtttcctagtgcattttggatgctgcctttctgtcaaacaaaggttggtattgaatatcaaaatcatgggccaacaattttgtcggtcaccattgatgttaatatgctcaaagtcattgctcaagcttttttggaactggcagccaataggttgaaatgccactttcgcatcgcaaaagcagaagccatcaacttcggctcgtataacgacttagtgtgagtagggtagcccaaaatcttaaaagtgagttacttgtaagttttaacaataggcttcgccgagggtgtgggtgatgacattatcatcaagagctaaccttacttgaagctggtgttgtttacaagtggcccttgttcatgacctaggccaatgaggttgaagagacgtacagagtggctgtggctacaacaatcaaactaactaatgggaaaaaacagagtgaaagagcaatgcgaagtaacggaactgagaaatgatttagggcaagaatgacttcccttgctcgatgtgttgggctttttccatgtgctgggccaagcccaccaggtgcaaaatgtgaatagggcccttgatatcatctttcaaacctttttcaaagcttccttcgattgtgtgatcagttatattggagacttgagaggccaatactttgagttgtttcttagcattaagttgtagtagtactagtgtctagtacatgaatcattttgcctgctttttggctacaatacatatcaaagaattaaggtggcgtttggttgggaggaatgaaattatagaaataggaatgggaatggaatgtaataaaatataaattgcataaaacatattgataaaaaatcattaaattttatctcatgttacattggaatggttttcccttcaatttcaaaatggaatattttccaccaaaatggtggaaaagacgtttaattggaatgacattccaatactttcaaacgcaaccaaacaaatgaatggaatgaaaattgtttccttttcattccatttcattacatccaacaaacgccaccttgaggtgatgggttggaggtaatggaatgaaatggaatggaaaggaataattttatcccgtttgttgtcattttaaattattagaatactatttcaatgcaagatgagaaaaaattatcaactttttatttattattttttatgtcattttaaatttattttaattctatttctatgttttcattcc

SEQ ID NO: 378041 - DNA, 5387 bp, Cannabis indica
agtcgtgtgagaatattctatggcggccaccaaacagtttggggtttaagatgaacatagatcagactcaaaaatcttaagggtaaggtcgattattagagatcatcaagggcatgtggtagatgctctatctaaactagtacaagaatgtttcaaatctaatgaaatagaggctaaagtattttttcattgtcttaattggatactacaattacaattgccaattattcacagggccggccttgaaataaagtgggtcacatgaaaaaaaaaaattgagcccttatgttaaaaaaaatgtgatatttttgaaaatcattaaaaaaatatatatataattttaaaaagagaaaaaaaaaattggcccctgaactaggtgggccctaggcacaaacctaatccgcctatgctcagagtcgctctaagagttttaaaagctctaaactcttatctatgggcttaatcaagttattttaatataattttaaatgttggttgttttttttttaggttattgttttttatgtatgggaaaatgctaaccaataaggcatgatttagtaaaatatactctagaattagataaaaatatttgtgaaaaaaaattctaaaagatgctggagaattttaagttaaaaaaaaaactcgagaaggaataaaagagaaaaaagaaaacggaaaggaaggggaaccctaattcctaatcctattctgtcttcacctcagccctctctctcgtgcgattcacttcagacacttcagcctcacagccgcatctctctctcggacgacggtgagaactcaacccaaccacctcctcttcagacggtttcttctccattctccagcaatttatctccctcagttcccgccctctatttattaggtatgtaacattaaaccattctcttgtttttcctttcacaaatcacttttgccctctattggcatttttcacttacttcttggttgaacgtagatgtatactaccgatttggagtactgttttttttttttattggagagtttcactattaagtttaattttagtcttagttatttttcttatgccgaatcttcattatagagtctgatttcatcatctaaatgaaccttatactgtgggaaatggttcaagttaagcttcacgaacctggttttttggttgtgttgcaggacaaaaaatttggattgttgggtgtccaggaattgggtatgaagagaataccctcaagtgaattttgattttagattgctatggcgaggaaatacagcagtgaatctagtgatgatgacgatctgaaaaatcagagagacagaagtagccatcgtcgtggtagtagaagggattcaaaatcttacagtcgtcgcaaggaaactgattcctccgattctgacaggaggagtaagactataagagatcagcgaggtagtagtgacggtgatagggaaaatgtggctgatgtgggggctaaggatagaggtcgatggaggccaagtgatgaagaagacggaaaggtctcaaggagaactgatggtgaacttgagacagataaaaaagttggtcagctagaaaaggatcaaattcgtcaacatgataagaggaacagagagcgagagcctggagagatagttgatgtgagagaattcgatcaaggtactgaagaagatgatagacgtaggagaagggatcatcggggtggggagaagacccatcggcatgataatggtcgtagaaatcgggataggtattctcgtcgctattcagatgatgattctgatagagagtatcgcaaaacatcagagagaaaaagggactggaaagttgatgaaaagcagagtggacacagaaccgaagatgatgacttaaaaactcatagggaaaaagagagtgtaaaagaacaatttgaagctggtagggcacttgaaaagcctaaacctcaggggcattctgcaaccgaaagcaatccaacaatggatacatcaaattttggtaagagtggtggagtttacattcctccattcaagttggctaggatgttgaaagaagttgacgataaaagtagtgttgaataccagcgattaacttgggatgccctccggaagagtataaacgggcttgtgaataaggtcaatgctacaaatataaaaaacattattccagaacttttcgcagagaatctgatcaggggcaggggtttgttctgccgatcttgtatgaagtcgcaaatggcatctccaggatttacagatgtctttgctgctttggttgctgttgtcaacaccaagtttcgtgaggttggtgatcttttattaagaaggatagtattgcagctcaaacgagcatataagcgtaatgacaaggtagagtttgtttcctttttttcttttaatcaactatagacagtattagtatatgttcacgttgatttttattgtattctcattttcaattggatgtattttgttttcagccacaattactagctgctgttaagtttatagcacatctggtaaatcaacaagtggcacacgaaattattgctttagaattgctcactgtgcttcttgagaacccaactgatgacagcgttgaagttgctgtgggctttgtgacagagtgtggatctattctccaggatctttctccaaagggattgcatggtatgttcactatggaatcatcttttgtactttgtgcttctattttttttactgatatgcatgtttatcacttttcttttacaatggatgcttatctttttctcttcattccatccatggagaatgcttttggtggtgctcatacagtttatttgtttttctctacttatttggttttacaggaatttttgaacgattccgtggaattcttcatgaaggagaaatagacaaaagggttcaattcttaattgaaggcttatttgcagttcgaaaagcaaagtttcaggtaaaatctactgctcccatcaagtttggtgtatgcaggtgcagcacaaattttataggacttattttttttctttctgatatgcgaatctacagggttaccccgctgtgcgtccagaactggaccttgtggaacaagaagatcagtggacacatgagatttctcttgaagaggagatagatccagaaatcacacttggtatgtcttgaatcttataatttttagcagcttcttgatttacatacgtatgtgctatatgtaacaacttcactgtaatttcagatattttcaaagcggaccctaatttccttgagagcgaaaagcgttatgaagagctaaagaagaacatacttggagaggagtctgaggatgaagaaggttcagatggtgaggatgatgaagatgaagatgatgaggatgaggatgagtctgacgaagatgaagaagagcggatggaaataaaggatgagacagagacaaatctcgtaaaccttcgtaggacaatatacttgacgattatgtcaagtgtggactttgaggaggctggtcataagctgcttaagattaaacttgagcctggtcaagaggtaagttaaagtttgtcttccaactgcttcaacattacttttgataggtgggattgtggttttctttcagggtaggtaatagtagttatctctcgtcatttcatttttacaatcgatcatcattaccttgttaaaactgtgctgtaggcaagagtgtgattaaaaaaacttggtacaatttttaattcctttgatttgttgcagatggagctttgcatcatgcttttggaatgttgcagtcaagagagaacctacttaagatattatggtcttttgggccagcggttctgtatgataaacaaagttcaccaggaaaattttgagaaatgctttgtccagcaatattctatgattcatcggctcgaaacaaataagctgcgcaatgttgcaaagtttttttgcccatttacttggtacagatgctttaccttggcatgtattggcctacattcgtttaacggaagaggatactacttcgtcctctcgaatctttatcaagattctcttccaggtattaactcattgcccatctggttctttgtttaagaagtttctatgggactatttattgtgaatggagcaataacttggtatttgtttttcctttgcaggaattatctgagcatcttggcatccgattgctgaacgaacgactctcagacccttcaatgcttgattcatacgagtctatttttccaagggataatccgaagaacactcgatttgccatcaacttcttcacgtcggttggtcttggaggtatcactgagaacttgagggagtatttgaggaacatgccgcgccttattattcaacagaacaatgcagcggactccgatgatgaatcatctgatagctcggagtctgagtcatcaagttccgagtcagaatcttcagatgaaagtgattctggtaaggatgaaaagaaacgtaggaagcgccgcaggcgatagagaaatcaagggagttattttgtagaattgagatttgtcttggctgtttaaattgtaaaatttggatacttgtgaaatgtttgacaaattttgtttcactaatttttgagagctaaagtatcaaatatgcctagtgataatagagcaagagtttgattagaatatttgaattagtaattaatacaacttaacgataagaatataatgtttagcttaccaaattattctacaaatttaatttatatgttgtttatgatttcaaggatgatcattaaaaaagagaatcatcttttggatatttttttttggattttttattttttacacttttaaagtagtttttttttactaaaattctacatagaaactcttactgtaatttaaatcgtaacaaaaaatcgtatataaattttattgcaactagggctgcaactattttaaaaatctaaacagtaaatttaaaaaataaaaaattaaaagaacagggtggtaaatttttttttttgttggattggcattcttttgttgattttcagtaaaacatatctttcacttataaagtcgtttattttttggtgtaatagagtgacttgtaattgtaagcacgtaaatggttgtaattgtaagcacatttcatgctattgtattttgtttcttggagattgagatctccgattatcttttttatatatatttattctatataaaatgtggctatataacaaaatttttgttttatgagaaataattgggtgacttttttttaaataaaaaaaaataacaaattattagatgttgtcacataagggtagcatcatgtagttagttaaattaataatccacctaaagtgttgcaattaataataaatttgtttttatttttttattaaaagttat

SEQ ID NO: 378042 - DNA, 4428 bp, Cannabis indica
ttacacaatgcataattggctaatttccctccctataaataaacctctgaccagcaacatcattggagtttagtaattgtcgtatcgcatagaccaagccatcaacatccctacacccatctggaacactcctaatttagttaatggcttgaagacagtcggactcaaccgtgaaccgcaccaaccttccctgtacaccaattgaaataccctccaagatcgcttcaagctcagccgcaagaggagagaccgccccaacctatgatgaagctttagcaaaaatacactgcccattctcatcccttagcaccaagcctcgaccacaatttcccttcactgttgataatgtcgcatatacactaattgaaaaacagccagcagcaggtcgttgccacctatgaatgcccagatcctgcttaactgcgccttcagtgctattacctgcttggtattctcccaaaaaattatggctccactccactatgtccccatccgtaggttgacaacccccatgattgacactattacaaatgaaccataaataccaacagatgacaagaaatagattaaatgtttcatctgtccacacatgaaacaacttctgaagaaaggaaatattatcacccacaacatacttcttgatatctgaccataatccacatctcttccaaacttgaatactcgcagaacacccccacaacatatgacttacatcctcactcttacccgaagagtagcgttgacacaatggactaatagccaccttgcgttgagaaagaacgacataagtcgggagccaagtatggcataccttccacacaaaattcttgatctttgggggtattttcaatctccacatctcagtccaccatttttctgcatccaccacatttgactgatgaatctcctcccttaaagcagctgcaactctgtatccgctttcaacagaatattcaccattccgactataatgccacaaaacagtatcctccatctcccactcaccactaggaatctcagaatcagatctgcatcaaccgaattaaacagaccacggataaagtccatattccaagtaccatccaaattcttaatccataacccgcatttgatcaggcataaccggtttatcataaacccgaaaggagactggcctaggcaaccaagggtcctcaagcacccccaccttatctccctgaccaactctccatcggtagcccctctgaatgatcttcttcccccataccaaactacgccaaacaaaggacgctttcgacccacacttcgcatccaaaacatctccatcagggaaataactagcttgtaacaccccgactacataaagaatccggataacgaatacaccgccatattttcttagcaagaagcgcttggttgtgcagttccaaatccctaaaccccaaaccacccttctctttaggcttacacaaatatgcccacttacaccaatgggttttcttattatgctctgacgatccccaccaaaaccgagcagccatacgatgcaaactcttaatagtgtctttagacaacctaaaacaagtcatcgtataagccgggatggcctgcaaaatagctttaaccaacactttcttgccagccacagagaacatggacgccttccaccctcgaatcttattccaaacccggttcttgatcacctcaaaaagatgtttttttgttctacccacaaatgacgacaaaccgagatacttaccataattagccacaaccttcacacccatcaatgaggccagccgacgccgcgtattcatccctacctttcggcaaaaacacatttctgacttttggaaatcgacaagttgaccagaggcagcagtatacttagccaaaatccctttaaaacaagaacactcctgtctagtagcctcaaaaaaaaccaagctatcattcgaaaagaataaatgggacacagccacacccgatctcccaaacctcaaccctgttagcctaccattgctttcctcttgcttaatcaaattagaaaaagcttcagcacaaaataagaacaaaaatggtgaaagaggatccccttgacgcaatcccctttgtggaaccacacttccagtaatctccccatcaataagaaacgagaatcgaaccgacgtcacacttcccacacagcatgtaaatgattcattcttttattaatatgcatttttattgatataaaaaatttcaattactaatgatgctgataaaaaaatatcgtgatatcggagtttttagtcgtgactaatgatatttaaattaacataatactaattggttactagtttatcagttttttgattttataattatatggtgacatgtaactaatgagtatataattgatatggttagcaactaaataattattttaattttgaaaaaggtgaaaaaatatatacttttcacattttaaaatgattatattaaaaagtaggtggcaatgatactatttttgagctcaacaaattaatgatgtaaccaaaaattatttttaaagttatagaaaaaaagagtaaaattgataaagataaagatagagagagaaagagacaaaagagaaaaaaaaattaaaaaataataggtatgcaacacatatgctgctgcaatagagtcaaactaacaaaaaaacacaagctcatgatcaaattaaaaggtaaattacggtattaataatgaacaaagttatttttgcaatttaattataaaatatgtgtgtgcatgtaaatttcccgtaattcaattgcttactcagaggcccaagctcatggatcagcctataacattcactgaagaggatgttaaaactgtgcacttcccctaccatgattcattggtcatagagatacccatagccaacaaggtggcggtccatattctagttgataacaagagttcgttgaacattttattcaagaattcattcctttccattggtctcacataccaggatttagcacctagcaactcataactcactgactttagtagggattctctcatcgccatgggaaaagtgtggctttctatcacattgtgtcctgacactctccaaagtaatttcatcctgacactctccaaagtaatttcaagtgatctacctttgttgttgtagactaccctacaacttataatgttatcttaggatgaccatcattcgtgtattttggggctataacttcgatataacacctatgcctcaagttctttactcactctgcgggggttgggacagtatgaggagatcaaaagaaggtcaagaaatgttataatgtcgccatcaagcagccaatcctagtggtcaatggagaaggaaataaggatcaataatgcgaagaagacgagttagaccctcgagtaggggcaaaaaaggtgctacatccaatggaagaaatagataaaattcaaatttatgaccaagatccatctaaaattgtgcgcatcgagaaaggccttcatcctggagtaaaaaaaaatcataagcaccatcaaggagtcgtctgatgtcttcgcatggtgccacggggatacgactgtgatagatccaaaggaaatttgtcatgtgttaaatgtgaataaagacacgcgcgcaatgatacaaaagaggtgtcccttagacccaataaaggtagaggcattaaagaaaggagctgagaaaattctaacaaacatcttcatctacaacgtgtattttctgaaatggttagctaatcttctcctggtcctgaagcccaacgggacctggtgggtctacatagacttcactgatttaaataatgcctgtcccaacccaaagattgtttttccttgccaagaattgacaagatggtctacgccacctctaaacatgagttattatccatcatggatgcttactccgaatataaccaaattaaatgcacgtggcagaccaagaatacacaagcttctaaactgagaacaaagtgtattgttaatggtcatgccattcagattaaagaatgaagaagcaacctaccaacagttaataaactacatgttttgaaacttgttgggcgaaaaaacatggaagtttatgtggataatatgttggtcaaattgaaaattggtaaagaccattcaaatggtctcaagaagtgctttgtggtagtatgaacatacgggatgaagcttaacccaaaaaaatgcatatttggtgtcatatcaagtaagtttctgggctttattgtcaatcaacgggggatagaggaaaatcctagaatgatacaggccttattaggcatgccatcctcgacgaaacacaaggatgtgtagagtttggctgggaaagtgtaacgtccccgcttcaagcctccattgggcccttgcaccaacggaataattggctcttgtacacgagtacgtcactctggctgc

SEQ ID NO: 378043 - DNA, 4045 bp, Cannabis indica
gagacgtgtgtagtacatgtagttacgttttgagtaatgagattggtttgggttggggtttggtattgggtaagggttaggtttggggtattttgatgctcaagtagaaagatattcaacttaaataatggattgcaattcaattggaagatctatattgtgtaaaactactagaattagaaaataaattaaataataagttatataattttatattaaattcttaaaaaaaattaaaatcaaatcaaataaagaaaattataacatcataattaatgttaatcataattaatgttaaggatatttatattcggtttcatttataagttgattaaattttgtaactagagcatttaattattgtgttaggtatataattgtactagcaataagttgttcagttgtagaaaacttgttatttccaactagagaaatgctaaagggcaccagtggtgcctagcaccttcctatttatcaatatcgttattggtccaactaagtatcgggtcccatataatttaatataataatttttaggaagtatcgctaactaatcgcaacgcgataatgtaccatataatttaatttaatataataattttgatgttctaaaaaaaaaaaacaataatttgatgttgagtcacaaaagtataaagaaaaatcaataaaaaagcaaaataaaaatatgtcatgacaagactaaaaaatacttaaaattatgtcaatatgtcatagagataaaatgaaaatattcaaaagtatctgacaaagatcaaaattatatcacaaaaacaagaataatcacagtattaaaattaaattacagtaataaaatataactctaatcaaactgcacttaaaccaaagaagtccgacgaacctagccaaaaaaaaaaataaccttcaataattttaaatttaaaaaggaaatactctaatttttttataattattttcttttagtatttagtattgaaaaggatgaaagatgcatattctcgtacgtataccacactatttaattattcttggagcttttttagagagagaaacaatggagaaattggaaatatctgaattggattttagagtgagaaaatggaaataaaaacaaaaaggttatttatttttattaattttgagacgtgtagtaaatgttaatagtattgagtagtacgttttaatgagcttagggtttaattacggatttgtccttctattttgattgggtttgtaagtgcgttttgtcttggtaagggtattttggggattttgatgcgttggggtcaaagtttgttgatttcaatgccaaacattgttggacaatgtgagttacaagaccatattatctgtctaattaatatattggaattagtgtgttattttatgataaaataattcggttaattagaattttttttaaaaaaaattgatgtgtattaaattattcgtttaatttttttaaaaaattattgagatggtcaaactcataaatttctgtccaattttactaacatagaactaaggtggataaaaattaaagagacacgattaaacaataattttagaataaaaaataataatatttggaaaaaatttaaaatctattttttaaaaaaattattaaataaaataaactagttaacttatggcaacttcacttattttgaaacatatttgatataagttattctatatttctaaaattggtagtatattgtgatcttttagttgaaaaaagaatatcaaattcaaatctactaatgtcaaaaaaaaacctataatcatatcatattattcaaaatatgaaaaatttccatcaaaaaatctcatatttgttgattttttaaaaatttattgcacaaataatttcatatgataaatgtcaaaatgtgtcccattcccatataaaagatgtattgtaataaaaacaaatttcaatttttttcatatttacaaaatatatttatatagaaagaaagagttcatcctaaaaaagttatgaaacatgcaaggttttggaaagtatgttttattagttactgttatttgccatatttttatctaataatactttattagttactgttagtaagatttagtggcacaattatctttcttgtattcaatctcttgtattacatgaagcaagtaatgaatgagtatatttttgtgttcttctccctctcatattagtcttttctttgatagtaggctaggactgtataaaaaaaattatgaaacatgcaaatttattttgggggtaaatttacacaaaatatctaaaattgtattttttttacactttgtatggattttttttctttggatttgtgattttttttataaataaatattattttggaccttattttgtaaaaattactaatttgattctctgttttgctaaataaaaaaatagacttatattttctaaaatggtaaaaataggacattgagctcaattttcaacaattttattttttgatataactaactttaagataatttctaacacgaacagatataaaaaaaaattgtaaccagtttttttataatatctctagatcagattattattttttttttaaatagatcagattattattaagttttattttgacaaaaaattagtttaggatcttatttgtacaattttaaaaaatacaagatttactttattatttagtaaaacatatgatctaattagtaactttttcaaaacacaagatttaaaatagttattatctttttttttatataaaaaacaatattgttctaattttgccgcaacacaatacaatatttatgcagcgttaaaataaaagtttttttagaacaacctaaaaataataatttgtaagaaaaaaaaaacataaaaaaaaaaaagtaaaatttcgttaaaagtaaatttttttattatttttaagaatttttaaaataattcttttttgttattcacagacaaatgaattaactttataaaaataaaagaaataaatatttaaaaaaaatagtagtacaaaagataaatatgtgtactgcttacttaagccaactagtacacagtacacacacagtactaacgagtaaaaagtgaaacgaccaaaaggggcaaaacgacattactttccgaaactacatcgttttgattttactattttagttttgccaattttttctatattaagaaaaataaactgatacatacccacaatctcaataatattctattaatggaatttaacacaaatgaaaaggtctctttgtacttcatttcaatctcatgcaattagagtttacaatgcgacacactcttttattttatcgatataatttagtatgaactattacaccgcattacattattgaaatttactaaataaaatgggcgtccaactacaaaaaaaattctgatactagaagtcgcactgtaagatagctccctcattggctacgctcaccgactcatgtaccacaacaatacaacacaaaacccatgccacactacagaccttctattagggtcaaccttaaaaatttatgagctttaacataaaaaacactaaaaattatttatattttccaaaaagaaaaaataaaaaatattagaccttccctacatgtaatataaatcaaaagtaaagaagaaaattgatttattatatattattatttttgaattattaatatttatttaccatgaattttagcctttttcatatattttttcctttaatatttatttaccatgaattttttgttttcattaaatagcacgtttactataatgtatttaaaatcgaaataaactaatagagaaatgtaactgtataaataaaaaataattagaattaatatttataatatgttgtttgctaaatatttttggaaatggaatagttgtgatttatcttgtttactttattaggaaacgtaatcggaatgcttaaattgactaaattgcatttttgagttaaactatattatatggtagttattttgtaagacatatttaaaaaaataaaattgtcattatatattt

SEQ ID NO: 378044 - DNA, 5453 bp, Cannabis indica
catcatatgcaatataggggttgtcttcatttaagaagaattcgttcaagaccgtattattctgagggaaagaagatggaagattggagaatttgacctaattattaagaaaaaaaattggcaactgaaaaaaaagggattttatcatgagctgaaacgtatcatgatactttaaattgacctgattgtagttttcccaaacaataaattctactaaattacttaagaactcaacaatacatttctgttattgtagaaccttttcctatggtatctcctctcctctgaaagctgcagggcggcagaagtcatctagaaaatttaactctcagatagatgaccttgaatttgaggtggtacaagctttttgagtatctctacagttgattatttttaaaactgaaaccttgccaccaagctaccaaccatccttcactcttaatagaaattgaagttgtattatgtcaattttgactaggctgattattttaacttgataaatgcaggatgcaatgttggatggtcttaatgatcccctgagtaatattgagttttctccaaatattgtggactcaataagtccagaaaataattcttttactgtcagagatagttggcaacaggataattacagtagtaaaagatatagtgcctttggtcatggcaatgaagataaatggactggtagatatacacttccttttcctcatgaacaatcattctgaccatgctgatatagatcttagttttaataccgccaactgaataaggatatattaccagtaacaattcaaagattatgtgcataaatttataatccgatccctatgtcaagctttcatgcaattctctgggtggaagtttttatagtttttagcctctgatttaccattgatttctgagttataaggattagatactgacaaggctgagtagtgctgtttcttttatatacatgtcattgtattctctataaacattgaacttgctgtgctttcattcaagcagttctctgtgccttactaatgttctcaggggggaaatgtaatctgtcttctttttctcttgcttctgtctgccaggtaggcctaccttttcacaccacaggttctttgatgaaagagaacatgaaaagtcaagaaaaacctggcaaagtcaaattcacgacagttctgctgaccatttgctatatagaaattcagagaatgacatgtcagatttctctttcgaaggccttcaccaacctatgaggtctttaattcttacttttccctgcactatttcttgatgcaacatgcaaaccttcgtggtaaagttgttaaatctgtacagggctggtgacagaatctcgagcaagtttgatttattaggtgctctctatctcacccctattttatctcctatatttttttttcctttatgttcttcatttcttttgagtagatttcgttttgctgttttcacttccaatttttggtgaaaaacacttcattcagaggtatttgttgttgtggtcacatttctagcctctatccatgggtggcagtgtattaagctataaatagggactgaatcctcaatctgtttcaaactagttatgtggagaatggatatttttgttgtgctgtatatatatatgggtgacttagtgaaggtgtcttgggtttttattccaactattatggtcttgtttctatggaggttgatgggaaaatttttatgctgtattcagttatcttattatgagctaaatagctatctatgtttgtgttcttatctacgtcgctgcatcacttctcttttgtaatcagattcaacattttcatatgctcggcatccaactgcagaatatgaccacgattactatatgtccaactgggataggtatgcctactgcttagaggtctaagcatcatattgcaaactatgttgtttcttgggaccatttcaatgttctcaaggctcagtaaaaatgtgacggtagacagggccccaactgtagaaaacatcttggatttcaaaccagaaacaagcccaccagatcggttttgctttatgacagaggatgcaattgataattcgagcttgcagaggtaagcagttaatgtgacacaatgatttcagaaggtttcttttatgttatagttcgagtttttaaatttcatcttgtaaattttgcagtgaagaatcatgctcatcaagtgcaggtttgttggccaattattttttctatccttattttggcatttgtattaatatgctgactggttttatgcaatgatctcagtgaggtatcaggcaactggtaatttcctatcaaactcatcaagacagggcaggagaagacaatgcaatgttttagctggatccggcgataagcatgcttttaagaaggcatttgccaatgtaaacaaggatgatatccaacaagaaaatatggcaagtggctctgcaaagcgcataaatatgataaataatttgaggtcaaaaccatcatatccctcaagctttcagagaagttttggagcagaagatatttcgttcttcgagggagcacatactacaattgatatgaatccaggctcagactctttcaatcaaaatttaggaacaaaaaataatagctttcactctgattttttggacgaagaccctttctgtaaatttcctaccccaaaattacatggtggttctaacccttcttgtgacagatttaactgcgattcagctgaatgttcacctcctgagcttttcatccccaagattcctctgcatgcttcctcaatgaatatggagccagatattcatgtagattgtgaattgaggaggaggcctcaggattcatcttctatagctggttctcagggtgagacgccatctcctgatttatcagcgcaagaaagctttagtaaggatgttgaatataaaccgaaatttgaaccatccaactgtggaccatctgagctggaggaagaattttgtattaggaatggggatttggtctgcaaggacaagaaggctaaagatgcttcacatacaaaggacaatgatcacaaggataggaaggaaagtttgcctgatcttgaggagacatcacgatccgttgatatcactgataaaattgggagtccagaatatgatgagtatgttaatcaaagataggaatactgttttcccactcatttatataagcattcttttgcactcctcaaaaaatacttatacttacattttattttacttctttccagggatgatcgtgctgataaaactcctcattcatataaaaacatgaaagaaggtacttaattgctgttacttctagcaatatgtaatttgagatgtttatacttttgggcagattaatgtgatagtcatgttaatgcagaagtagaggattttgggtgtgaaggaaggtttggttataaacaaaagagcggttatgtggattcatcttgtcaaaaaatgatgtttcaaagctatgttttccagttcttttgtgtgcataaaaggttgatgtaggcaaaggcatctactcccgtgaagatggcttgtgaacacttacgtagcattctagacatgatttcattttgtttaaagcagtggaagtttgatttttttctacacaaatgggttcaggtgaggcctcttccaataggcgaaggaagaaaagaataatctagtaatgaacaatattaaactcatttcaggtctgaaactttccttgatgactagtgttattgcgttttatgtattcctgactgaatgtgttctagaattatttatacagtatctaatatctataactatattagagagaacaagatgacgaattaaaatcatagattaggttaatgataacttaaaaatattgccctagaagaaaaagaaactctattaggtgttcgattattacatttgctttaattttttgttcttttgttttgtgtgtgaaatagtagttacatatgaacacattcatatctaatgtaaaggtgcatctcttgtattaatatttctttgtcacatgagaagatttgtttggtgaaggtcaacgtgtataagatttcatctcattgtttcttctcaaaaggaaaagaaagtgaattgtcgatttaaaatgtcgatgataatatgatgacatcttgtaagttaaacaaaaaatactacaaacaataaaaattaaataaatgaaatttaatattgataagatggaatgaagcgtcatgattattgtaagaagaaaagacagataggagcaacattaaaggtaaataaaacgtgtcattgatgttgaatactatttaagcaaaaaagagtaatattattggtagatttgaaatatgttctctaaaaggggtaatggtgttgagaaggagaataggtagagtaagatggggtcatgacaaaggaattgggctcactggaggcatgaagcccatttggggtccttggtgatattgggccttttgacattgaagccatcatggtggccgacatcattgcactgcgtccaagcgctctttcactgtgtcttctgggccctttttcggcccatttgagctctgcttgcctcatcacagtcggataccttgaacagcaacatcctgtctcccctgctctctgaatgtacctattaagattcatacaacatcatttcccttggctcaaattacattaatagaatagagtgaagatatgtgcacaaaaatatattattatatgccaaaacactatacaatatagttaagatttttttggaaactttgggttgttttagtaggatgtgatcggctgaaaaaaaaaataccatacaatatagtataggaaatttctacaactcaccttttaagggtgcaccatgcactatctgcatacgagattttattaatctaattttttttataattatttaaaacatcttttaaattttcacaaattttagaaaatatagtataccgaaaatatggttcaaataatctgttatacgcatgtaaaatagactatttcaatcttattttcggcgtgttaatatttttttatatttctcaaaattttacaagatttcataaataactacaatatagatgactatgaaagaaaaattggactgaaaaatcatcctaggatgccgtaaccaaagtgtatcgatgcactccttttagagagtgtattgtaaaattattttagtacatattttgtacagaaaccataaattattaggtgcttctacaatgcacctacttaaaaggaatgcactgatgcactttctacctgtttcggtattcagaaaaagtttttagtataatttatttttttcttttatatttgtgtacgttataattatttaagaacattctactaaattttaagaaattcagaataatttacaatataaaagtagtgttcaaatagtatatttcacttacgtataaaataaaataatcacacat

SEQ ID NO: 378045 - DNA, 1798 bp, Cannabis indica
ttccttttaatttgttattttttgtcatatctattttaattttttattggaaatattgattgagatttttgacaaccaataattagaactgtatggagtaattaatgaatgttagaagagatgatttttacgtggttgaggtattaattagtcttattccacgagtcactgtgttaaggagagtatttattacatatagtttttcaatcgatccccatttttgtttatcactggggtatttatagacttatgacggtggtaatgttgggctttatgccctaaataaaactctatttcaatgtaatctctatcatttaaatatcaataaagagacagaagtattttcatcacttatttaatgtgtcatttggttcatgttatcatttatatgtttatttgatttataaattcatccaaacccttatcacattaatattcttgtttattgtgtcgtcagtacagtggaaagtaatcaagattgtgtgattaaatatatatttctagatttatcagtacacaaggtttaactgatatgataatctacaacatggtttacttgcaccttggataagtattgtgtcctttccagggcattggtttaagtaaaacttgggttggatgcatggagtatgcattggaagggaccgattggataagatatgtttttgataacaaaatctaggcttttctttgtcgtaattgagttcattggtttttcctctgtccaattcgtgtaataatcaaccacgactatagcatgtttgactccaccctttcccgttgggaaggacctaatcaaatctataccccacactgcaaatggtcacggacttgtcatcgacgtgatttcatttagggggccctcaggacgtttgcaaatctttggcatgggttgcacttccagacgtaatcaatccagtccttttccatggtgggccaagaatatccttgccaaatctggcttctattttactcacataaaaccacacttcatcgtttttcacctcactgaattttttttcctcataacagtttatgcacaatcaccccgaaaaatttcaaataactgacattccaaaaaactccaaagggagttttcttgaccttgtcggtcaacttaaaagcttcgaacttagcctttattgaagtaaagtacatgttccctctgtaagtgatacgccttggaaaatgtccagacaatgagagaatgaattctggagccatctgcatttacaaacaaaagaatgattattaattggaatataaatcgcacaaactcgcaaaataacacatacaaattgcatagaatcgcaaaacaacatgtatacatcgaacaaagatcgcacaaacgtcgcttaaaattgcttaagcactgtttaaagtttatgcaacaaaatcacaaataatatcatatgtacatcgcacaatatcgccaaatatcactcaatagtacaaacacaaaatctatactagctactcgcacaaaattgctcaaaaaattgctcaacaatacaacacacaaaatctatgttgattactcgcataaaatcacacgatgtcgcctaaaatcacaaatcaacatgaacacaaaaatcactttaacttggcatgattggtcacgcaaaattgcacataaaccgtctaatgtcgcaaaaatattcaaaccccaaaaaattatattctgaaatccaaattcttccttaaacataaaaaattagtaatcgaaagtttaatcattaacatatttcagtttaatcacagattgtgaatttaaaggagaaattaaagattttttttt

SEQ ID NO: 378046 - DNA, 4807 bp, Cannabis indica
atgtaccttttgtgttttcctttacagatatctatgtggatgacagacagtaggttccttacaaaatcctttcagtactgttccgtgacgagaccctttggtgctaacctacggtctgctcttgccatttctagggttatcaatacccactccctctcctactccactgaagccatatcctcatcttcgcctttgactaactctctgtaccatcggatttcacggttgggtgatcccaagatttccatgatcccagtgctcgaacagtgggtggaagaaggtagagatgtcaggcaatctgagctccagaaaatcatcaagcaactccgtaaataccgtcgctatacacaggctctccaggtatatttgtaacttgtattaagtctagtttcatttagttttctttagtgaagataatgatgggaatttatttctgttcttaggtatcattttattgtgaatctttcttttcttttcttttttttctggaataatgatatttgttttaggaccagacaaacatatcgattatgaatagaggaacaccagattcagttcaaactcttttagattaagtattggcaaaccttttgagaaaaatagccatttgggaaaatatttgtgttttttgttccacatttaaaacttagatatagcgtatcggtaatgaaatgaaaatgtgctttgtagaatgaagtctcaatataaaattacctcagaaggattatagataattatatcatgatgtcaacgagtaaggctactattttgtttagagtatctactcggaggctgcttaagtacttgtattattttcaatatgctaagttttcgggttttctgtccttggaggtttctagtgtatacagaatattttaatcttaccctttcttcactcatatcaaacacagccttaataatttaactttaactttaactcgtttccatcttcttgccttaacaaacattggtgtttgaggttgtatcttaagatgtgctggttgataaagtttttacttgtgcatctttcaccctagacctaatggctgtgagtttcagagtggtattcttttgagtaatactttcagttgataaaatttaatttcctcatttgcatatgtgaatttgtggcatgataaatttgggtcaataacttttctttgtaaaagggtaatcattcaaacatgtcattgtcactagtaatacattgtgagcttaagttataaatctgacactgtcgtttttcaggtatcagaatggatgagtgaagcaaactttgggccttcatccggagacatagctatacgtttggatttgatttcaaaagtttatggcctagagagggcagaggagtacttttatagcatcccagagtcttccagaattaataagattcatggctctctgttaaattgttatgctgagaataaatccttagaaaaagcagaggaccatttccagaaaatgaaggagatggacttcatcgaaactgcattgacttataatgttatgctaagcctctattctcggatgggcaagcatgataaactaaagagtctaatacaagagatgaaacaaaatggaatcgagtttgacaagttcacattaaacattcagttgaatgcttgtgctgttacatcaaacatagaagaaatggagaagcttttactgatgatggaaactgatcatcaagcagcgttggacttccattcttatttcattgctgcaaatgggtacctgaaagctggctatcccgaaaaggcgtggatgaagcttaggagatcagagcaagtgattgataacaaagaaaagaagattgcttatgaacacctcctcacactatatgctgctgcagggagaaaggatgaagtttatcgcgtttggaatctgtacaagaacttagggagagtctataactctggatatctttccgtgttaagctcgctagtgaagcttgatgacattgatgggatggagaaaatctttgaggagtgggaatctgtgaacacattatttgacaataggattgcaagtgtgctgattagtgcttattgcaaaaaaggtcttttggagaaagcttttgttagtgtggaacggctttttacaagtagtggaaaggagcctgatgccggcttatggcagtgcctttcaactcaatgctgtatagatggtgagatggcaaaggcagtggaaagcatgaggaaagccattttgaccggtgggcaaagatggaaggtaaaccgtaccacctttagtgcatgtcttgaatacttgaaaaatgaggggaacctgaaaggtgcacatgagattttggggttactacaccaacgtggtttttgcccagatgatatccgtagtagattagaagaatacttaaatagtgatataaattcaggggcccttaatgcaatgctaggagatgataagaaggaagagaatgatgatgctatagatcgataaatgaataagcgaattaatgagaagatgctgttatagtgaataaccaacaagcactgtaattatagtcaatatgaacaccatatgattggtgtaatcagctgtcaccacggcagttgttttacttatttcactgtggctctttgttactttgtttttcttaaaacactagaatgggagattggaacttgtaatcgcaaggacggttctaggctatgcttatgatatgactactactactactactgataaatagtatgattttacattcacagcaattaatttaaaatgcagatttgtaccatgtgtcttcaaatagtactttgaatttaaatattaattaaattttatctactcgattatattgagttctaaattcaaatttaatcatataatttcatataattgagtttagggtacaatttcaaattaatcaactttgagttcggttttaaaacgtaggcgcatgagagagagggtgactaatgaccaaggttggcggcttcagggtcttggtgggttcctcggatctctatcataggtggccggtggtggctcgcttaaatggtagttgagccacccaaagaaagtggttgtgtgtgtgggttgagtctagagagaggcagaaacaacaattatttgcttttggcgttccatacgaaagcaatgtattcgatcataattataaagactcatgttggacgattcataagatcactttaagctataaaattgttaatttcttcatattttaatgggtgttgtttcttaacatttttagtatttttttttatcgttttatgaattttttaggttttaaaagtaacttgaattttatgagtgaaaattaatggatttattatttttatgactaggtgatgttggaggatgaaaaaactcaccaaaataatattttcctagtttagaaaatccatgaagtcccaaaacttgagatttggcactgtagcgaaggttagaggttcgtcgcaacaaacaaatgagaagcttgcttgcaaggcgttgtggccgcggcgaagagaaaggcttgtcgcggcgaggaagctgtggccgcagccaagggagaggctcgccgcggcgaggacacgattctagcgttttaaaattttattctttttttttttgttaaaaaaaaaagaaagaaaattgtagatttttgaggggatatataaaggacttttagggttcgatttttagcacttttgaaactccatttttgaaggagacactcagagagagagagagagaaagagaagaagaaggagattgcgacaccaattgttcatcatcattgtttattttcttctccttaatcttgctactttttattatgattttcattatataagttcaaagtagttcctttttcgttaggtgttatctcaaaactcaagacatgaattcttaatttcaatgatgaacgttgtttcgttagtttctaatatattgaattggttatattttttattctcaatgccatgattgttgttttaatcttatttataggatcacaaaattaagttttgtttcaatctattatcaacttaggattatgttaacttagaaaccttccctggcgacgtggacactaatgtttgacacgtggcaagaagaatgacatcacggagttgagtagacctcagtcatagtagttgacttggcaagggaccctagttgggagctctgagatgaaagtttagacttcaataacttgaatctaactcacaacttgcttctcgaaagccaacttgagcacataggatttcacatggcccccatgttgacattctcaactagggttttaatttcctggaccgttttagtgcaaatgggccaaactttgcatggaaacattaactatacatactacaaacatatttgaggcatcaaaattatatttggagcaagttcatttttgagcacccggagcaaccggtcctaggcaccccagcgcccaagttgacaatttgtcaatctgtgcaccttccaagtattcgatcgatgattcgactttttcatcttctttgtcttcatcaaaaatgaggaaatatgtactttcagtgaagaaacaatacttcctgggtaccaaaagcaaggcccagtgcccatgttgaaacttggggctggcccaaggcctaggctgacattttgtcaacctgggccaattctgatgatatttttttagaactcttctgagcatcttcatttttcttcaaaaaatattatgattcaactatttttggggaccaaatggaacatctaaagggccataactgggacccagcgctcaagttgaaacctggtgctgggcccaacacccaggttaacatat

SEQ ID NO: 378047 - DNA, 4189 bp, Cannabis indica
attattttggcaccaacttcttgcatttacaggttcagatattgttgttcaaggcaaaaaagaaaagaaagttccgaatactgttgttgaagttttaattctctcattacaaagattgtgtgaaataattgagcccaaagaattgaatataatgtggaaatgcttacacatggaaatagctgattctgttaagaataagtctcttactcgattaagtcacttgttatcgctgctagtctctacagttcaaataaatgacggaagaagtgtttctagtgagttctatttattgtcctattttctttatttttaatttccatgaaattgttgtactaacttagaatttgtaatgctgcatagatcaccaacctatgatcgatgccgttgcacttcttttacaggaactgatcttacataccggaatcactactgaggatagtgtacctgaaattttcgatcaggttcttgagttgatgctttgcactcttgatgtgctgcacaactatgatgacatgtcaatcgtatccgactgttcattgcaatgggcaccggtatttgagttaaagagcgccaggtttgggtttccattcttcatgttacgattctagtgttgtatacttgtatgttgtgaatttccgaggtctgacatttttaggcgttggtttcagtttgctggcatttattcacaaactactattgaaggatcattccatattgaatttcttcaaggttaatattctgaggtaatttcacatgttaattatttcagggatatgtttatagtttcttgcccgggacagtttctgattctttttgtttgagtttcagtgcgctgaacgatttaatagaaacctcaccaaaggaagtagtatgtctattgctctctttatttgagagacaaagcttagatgaaacttctaaaggagggcttttgaagattcaagattttctccggacagaaatacaggatgttgtatctcatggttcatcatctactcgacttcaggaaaacaacatagatttgttgtggggtactgtcaattgttttccgtacttgttagatcccgaaaaagattcatcgctgctagctgatttcattgatgcacttgatcaatgtgtagtgattgaatctggtaattcttctccttctattattattttgtttttgtttgtttagtaacctgccttgtcctctcttgtatgagttaatttaacattgttgcgagctggatcaagcttagtgcagcaaagaccaattaaaagtatcagtaacatacatgatatatatgaatatgtacatatatattttctctctgataaattttgttggcagtaaatttaatttcaggcttttcagctagttagggtagatttagaagggaataatagccagtatttcttatggcaacagtcactcttaaatcttgggcctctgtgatttgtactttcgtaagtgcaatcagaatgctagggctgtccaatcaatttcatcttatccctcgcttttacctacatatccaatcacacttcttattaggtaaatcatttgagactcgtggttgtctaacaactgatatgatattttctttcagacaacgccgctggtgttcctaaacatgttttgcaaagcattatcggctctgctattcattcctattcaaaattgcaccgtggtaggaatgacaaatgtgaggaaacaagcagatttttgcatcttgcgagaaggcacaaatcgtgcactcaaatattatctgctgttgcagattttttggattctgcatatgggtaagttgatttgtaattattgatttattttatctcctgctcttaattatattgatcgaaaataattaactatctctaattataggtcaataatagaagaaaactgcaactctcgtacatatcatccagaacttaaagcagacaaggctgttgatgcaatacgtctatttgctgaaaatttgcatcacctggaaaaggggcaccgtgttgcagctcttagattactctgccactatgaacttctgatttgtgatgtttcagcagaggatcagccagctcataagaaactgaaaactgaatcttcagagaattcccatacagacagccagagctttaatgtatggttgttcacttttttgctactttgatgtttaaattatagtttgattgacactatttgatgctaagttactttgatatatcagcttctgcagctccttctcttaattgagacaactcctctttcagtctctacattcaggacagtgaccttgtacatctctaaagtacacatggctctctctgctggaaggatatctgaagtttatattcctcttcttgtaaatggaatgattggtgtctttcataaccggtttagttatgtttggaatccagcgtcggaatgccttgcggtggcattaagcaattatgttgggctagtatgggaaggattccttggttattttaagcagattctctccacattccaggcatcaaatgatcaactcgataaagcaaaggcagaattctccagcaatgcaagtggtcagttgttttttattcttcattcttttgtgctttttcatacgcttatgtgctgcagtgcttcacaacgcttgcaagtgcccttttctttactttctaagaaatgtaaacttgtaacaaccatatatccaataactcctttaatactagcattgttaacttatatattgtgttaatattttgaattagtttcagacatctttttcaatgcagttgcaaatctcttgtagattagagctaccattaactatttactttacaagtttgactgctaaccttttttcctttcttgtttgctagttcttgctgagcgctttaagttgtttgtcgctcctccctctgatggtacaccattggcaacagtaataaccttgttgctccaatctttacaaagaattccaacacttgttgattctcgttcacgagatgttgttcctttgcttttgaagtttttgggctatgatagcagtgagcatataaggtgatcttgattcttcatgtgctattttgtttattcttagttctatagaggtgtaacttgcttttgttatctgtgattgtagtgtgggatcattcagttcacttgtttgtaaaggcaaagattggaaggttattctaaaagaatggttaaatttgctgaaattgatgcggaaccttaagtccttttatcggaatcaatttcttaaagatgtgctggaaaataggtttgtgtatcaatgtatatttattttaactgtaaaatttgttataatttagtttatcacatttcatatagttttaggatacataactggaattcattgttgttttttaccaggcttttggatgcaaatgatcctgagatacagtcagcggttcttgaatgcctgttgatttggaaagatgattttctgctatcatatgatcaacacctgaaaaatatacttagctttaatagtttcagagaggagctaaccacatggagtttatccagagaatctaaacatattgaagagtaccacagaccttaccttgtacctatagtgatccgtcttctgatgccaaaagtcaggaagttgaagaagaatgcctcacgaaaggtatatttgtttttcagctctacaacgtgtctttttttttttaattataaaggagtatccatggcccctcccatgaaatgaatctttcaaagtttttaatgcattatgcatctgttatctgttcgtttgtaatacataagataatatccgtcctcaggaagtttgtgggttcttgtttgccctttatttggtattgttctttcatcttattcttcatctactaagctgtgtgacaaattctgttttgttcagcatgcaagtgtaaattatcgaaaggcggttcttggtttcttagcgcaacttgatgttgatgagcttccccttttctatgcattgttaatgaagcctttgcaaattgggacagtgggaagtgatgatacgtctgactggttttggacttcttccggaagctctaaagataggtttcaagcttcaaattttcttaagtatttcacagttgataatattacagcattgtcatggaagaaaagaaatggttttcttcatgtgattgaagatgttgttggagttttcgacgagttgcgaatcaagccttttct

SEQ ID NO: 378048 - DNA, 2802 bp, Cannabis indica
ttttctctgcttaaattgcataagctttttccttctcttttatctgtctctcttatcaggtttttagtcatatcaccaatgacttttgcatacattggcacctgtacatttattttcagattctagagaaagcaaagagtggagtggaagctatacaaccaggtttttatctttcaatgctgcagctaaagtttctgaatcaaggacaggataggagtattaaaatgatgaattattttcttgtatcgtgggcaatcattattagagagtctcattaattatcatataaaacatgcatgaattactccattaactgccaattaattctgaaatagaactttgtacattttaccatacacttcactctatcctacttcttctcttctacatccacttgttgtcatctgataaagcaaattagttgacaattgttaattcaagttgattgtgtttttgttttctgtcattttgcaaaagctaaaatggcaatgccatcattgccatgtataggcacacctgcaccaaatcctgccataaatgtggttactttatttcttcatagcccacatgctataaccgttaattgcttgtcctctgagtcagactctgagtcttgcacatgcagtcttcaatgcccagtttcattttttattttacattaacaactttgagtaacgtgtgtgcttttcatgttaatccatccataaacactatcactgaagttctttatgttttgttgttttattaatcaacttcactttggtactgctgtaattgaagagtaataaggtattaagttaaggtcttggaaatatccagatgcatatttcaaaattttctcaagaagccatggaagtcaggttagtgaaactgtccaataatattgattaagctcaaaacaagaccattgttgtatgtggtaatgatgccacatgattccagctacgctttatgtctgtcttcatttgatataccttaagctacttgttagaaaaatagacaataatttagccataacaaatatacatttacttgaataatcatgacagaagaagaaaaaaaaaaagaacaaaagctaatgaaagtaattcattatgtcaagaaatcaatactcaaataagctttttaggttccttcggtaagatgtattgtattgtatagaattgtgttgaattgcattgtattgtataagtattatttaatacgaaatactatgtttcgtattgactttcattattaggttattaggttatgtaaaattataaattattcataataaactcgactccaaccccgaccacggcctagaccccagacctggaacatgccccagacccagatttggattccggacttgaaccgagacccagaccaagacccggatctagacctagacttggacccggacctcgaacttgtggacccagacctaaaccccgaacctagacctcggacctcgtctcgaacctcggactcatatctaaaccccagacctgaacccaaactcggtcccagacttggaccataaaccctggactttggacttggtggaccccaaactcagtactgaatctgaacccgaacctagacccgaacgtcaaatctcggacccaaactaacacttggaccctggacccgaacttgggtccagggtctggctctagggtttggggcttggtttggagatttgggtcgggctcgggctcgaagtctggatccaagtcctggatcccggatcctgacctcagacttgtacccgagactctttgtaaagattatatacaagctaatacaagtcatttgttatgtattaaacagtacgactcacattgtattaaaataataattaatacaatattttattcaaacatagttttatatattattgaatataatactactcttataacttactaaaccagttcctaaaattcttgtttgttatggtcgttacttctgctagacatcttttgactctttaattcgttatttcccgatgtatgaactaatgaggctatgcctatataaaattcatttgtaacgaagacaaacactagtaaatataagttgggatacagagccaagttggatataagtttttaagtcaagcattgaactttggttttttgaagcacacctttatgtaactttctttgtttaagacaagactctcatattgattcatcatttgagttttgtcttgaaagtgtatatgaaacatcaaacaagttctgatgaaaaaataacatacatagtactagtgaatatttttagaaatgaaatttgtttgttcagttggtcttactcacacactcattgttacttatcttatgatgggccgggctccgtctaggcatttcttacttgggccgggcctagatttgacacaggatgagattatgtgggtgggttcagtgtaataaatgtatgtttgggtttggttcatctgcctcttgtcgcttcagcttaattctttaggaaccaggaagaggaagtccttaattctttaatttgtttttacctgtaatagcaggttattaataggtagacattcttttttagaattaattaattataattaattattttcttaaaataattaattaaatatttgactagacctcttttagcaattaatatttatatttaaatccttactttaattattttaataattaagctatttaattataatatttacaataaatttttttttacaaaaattaaacttctttttacacaaattaaaatctcttcttataataaatttttaaataactaattatttttaaatgatattta

SEQ ID NO: 378049 - DNA, 2653 bp, Cannabis indica
tttttatttctttttctttttcctcataacaaagaattaaattaagacttgaaatgcacacggattggagaggagatttcttccatccaaaaatgttcatcgtctaacctaagggtatgtctagtcaatccatggacagcaatactaatataagaaagagacgcaccagaatgctagacaataaagtttttatatcataaaacataactcctagttcattttagcacacagtagtactctccaaggccaggaccaaagacaataaatcagagaaaaaggctttgattgggtgaagagtaggtaaaaaagaaataatgatattcaacctcttaaagtgaaggaaaagaaatattaaaaaactatttgcaaatattatgatctataaagcaactactgggatgatagacccaaaaaaaaaataaccttaacgagctcgtcgtgattcgaaaagggatagaaatgtgaagtaagagttataatcatacaccattgtcctcaagttgatttcttaatatttatagtgtaacagaataagttccaacaagatagccttcagtttgtcagactaaattgctctatcatactttttgtaagtacaatataagttgcgagtggcaagatgtgattttaacaaaagaaagctaaacaagtcaaattgttacaagaatatcaacccaatacagtaaagaaatgtaagagataacctaagagattgagttcaaactcagaaaatatagctagctggccatgttgaactcagttaaatatttcaaaacaccgatagtcaaacctcaaaaccataataactaaaaactactcttaatatatgattaaacaaccagagcaacaatgcatataataatccatagctagcaacttaaaatggttcatattcatttcatcgactcaataacccattcaatttatttatcagtttttattttatttgccgagcaatcaagaagaatgaacaaaaatatttcttagagatttggtatattgttttcaacgaagaattatatttgatgagaagaagaagaacattaccattgttctttgctctggtgaagagaacggcatttagagggatcattattacgaccatcgtcatcgtcttcttcttcctcctcaatacatctccatcggtccagtagttctcttctggatgccatatttttgggcattgatcattcaaattctcaggccccaactattcggtagggtttccctcttgctgggattttaacatggaagccgaaaagaggaaaagagggagaaagaaacgatattatttaataataaaatcaaaattagtgcgaccttgccctttatttaattaggaaattcctttctttctctttttcttaaaatgatttagattgtactaaaaaaaatatacatagaatgatttaaaaaatttcttaaaaaatacattaaataaataattagtaaattcccgccaacggaatgcggtcacaaaagttgtaagtgaaccaacttcaggaatgcggtcacgaaagacataaactcttccaaaactcttccaagagcgtcaaagagtgtctccctttcagctctcggttgggagtcattttcggtaacaacacttgtaaatgtgtcctttgtaatgctgatggctctgattttgctgcccactttttgtctctatccgattacccaaggcctatggctggctagtaaatggaagttgaagattgaaagtatcccgctgcactctagtgcagaggtagttaattggctatctcgctatgcttcgttgtgtagtggggaaatcacaaacaatagggatgaatttctcatctttgatgttctttatcataacctttggtttttcaggaaggacatataccataatcacacccaatggattcatactgagatgatgaaaagggtacaacaggagttttcttgtcactggaagtgctatgtggatactaatgtatgcaatgaaggtggttcgaaccccataatgacgagatgggccttaccaagaccgggaagaattcgtttgaatgttgattttgccacgaataagggtataggagcggtgggggtagtggtcagagaggctgggggtaacattctcacgctctttgctatcaaaaccacgttcctgtctattaatcatggcgaactttgggctgttttgaggggtcttgaggtgatctccaacttcggctacactatggtggacatgttctctgattgccaaactgtggtgaatgccctgttgaaagcttcatctccccactggaatgtccagatggtgttttctaaaaccttatccttaatgtcatctctgtctgtttctccagtttggatcccccgtactgctaaccaagcggcacatgtgcttgctagttagggtactaaccatgattgtaaggggttcctaaatttctgggaggtgagttcccgtgtgctcaccaagattatggatgacttctaaatacatttaaagtttctcatcaaaaaaaaatatatatattgaaaattttgcaacaaaatactatagctttcattatggtggagtgttttgcaaaattattaataattatgaaaacttttactaacaaaatacccatttacacacagttgagactattgtaaagaataaattcttaaaatatgt

SEQ ID NO: 378050 - DNA, 2829 bp, Cannabis indica
taatgggagaaatatcaaagatcataagagattgaagtcctttatggaagactattctcttggtgacattaaatatacaggttgctttttcacttggaataataagtaagatggagagtaaaagtgtttgcaaaactagatcggatttcaggaaatagtttgtgggctgaatcttttccaatgctaaagtgaatttccttcctaaaggggatttcgaccacagtctggctattcttactgctcatcccattcaaccaaatggtagaaaacatttagattatttgatatatgggggcacttatgctggttttatggagagaattaaaggggcctagcctattgaaatacagggaactcatatgttcaagttttgccaaaagttaaaagttattaaaaaagtcttaaaagagcttaatcaagatgttgttggtaatgtagcagcacgagttaagaggctgaagctaagctttttgagtatcaactggctgcccaaaaagattcaattgataaggatcttattcagctgaaattaaggctaggaagacttataaaaattaaatgattattgtacctcttttcttcagcaagaggaaaaaaactcatggattaaagatggagacagcattacaaagttgtttcatagcagcttaaagatgagaaaagtccaaaattcagtttatgcaataaataataatgatgaaaattgggttgacaatgtggaaggagttaaaaatacatttttagagttttacaggcaactcctgggtgctaaaatatctcaaaagaaacaagttttgactagcgtggtaagaaaagatctagtattgaatgagacccaaattcaagtgctatctcaatcgtactttaaggaggagatcaagactgccattttctcaattctgaatgaaaaggtgctaggacttgatggcttcataagtggtttcttaaaaaatgcttgggatgtagttggagaggatttcatcaagacaatcagctcatctttgatttctggtaagattctcaaagaaattaatacagataccttgactcttattcccaagatgaagtgtttgaatagtgttaaagtaacgccctgatactaaggtacgctacaatgattttccaattagcatgcatccttttctaatcaaaagatttttatttgaaaaacgtgtcaaattaaaaccttaattaaaattattaaactttataaacatatatatataattacataatcgggataccgtgtttaaacttttataaccattcacaaaatacgtttacaacttgttatataatgactacaaaacattgcaaaagatgtcttgagatcaaacactccaggtcgcgtcatttcgacatgtacaatcattacccgagctcgaaactcactcctatttagcttctacctttcctttacctatacatgaaaatagaatctgtgagccaatagacttagtaagaaaaacatacaataaatcatataatagcgacttgtgtctaagcgcccatacacctatccacaagccttaccaaatgattaagaacgttcttaacggttggtgctattgaccatgatatctcccactaccaatactatgatcgcattgccggactggcactatattcttaccgctatgatagcatcaatagcacccgacagtacatttagccatgatcactcttaacaagaaatatgcccatactattgaaccgacacaatggttgtgtagttatgatagcgctaattaatactttatggggtgaatatcactcttaatcagtacggtgcctgtaatgccaaattgacacaatagttgttctgccatgatatcacctaaaacatatataatcacaaacacaacatgcatatataattagttttatgctagttttacctcatttccaaattcaagtaagttggccaatctgaacggaatacctcgtgctggatggatgccctaagtcacatttacataaacgggtaaatattgcgccaaaaccctaattcgagaaacctaaactcatactaagggttctacttttgttattcgttataacgataccctaaattctacaaaaatgggaaaactagggttcccaaaattgccccaatcggtagataggttccccaacccgaaggctggttctgtggggtttcctagggaccaatcagaattccagtttctacaagtttcactgaaccggtcaactggtttagtgtaggaaacaccaaaaactccaccaacacttcaatttgatctcaaactacaaaaactttcagagcacctataccaacctcaaatagtattttccaagcaataagatccataaacacaaatagaaacaaaaagtttcattaattagtcaagtttgaattttcaaattcaaacttgcccaaacccttcacaaacctacatgactaacaacaaacaaccagaatcaacttaaaacgaatctcagaattcaacttaaaatcaaacctaagcctaacaacacctacaaccacatataacaaaccacaaccaactacaacttaaagaaatcaaagattaatggtttttagggcttacctttagcttgaactaccctaagccttgaagaattcacaaagaacaactgagagataccaagattcctcctagtttctactggaatcgagagagagagagagagagggacgggggggggggggtaaacgaaggtagaaccttctatgtattttgtcttatcttcttcttttcttcttctaattagataaatctaatttcacatatgtataggctgaatataatagtggacagctgtcaaagtgaaacggcaaccacc

SEQ ID NO: 378051 - DNA, 990 bp, Cannabis indica
acgttaacaaatttgttaacgtattttgaactaataaggaaagaaaatagaaaggtgaaagtgagcgaaccatggcctgtccccctctggcagaccaatcattgggaatcaaggaagagcgagtacggtaccattccgtgagagtagccttacccaaaataacagtcgcggcgcctctcaacctctccaggacagtggcatccctctgcaccttcgaacccaatagcgcataagaccccgccgttgtgttcagcgcgtccttagtcgatatattgtccttgagcagcaccggtactccatggagctcacccagcgacgacctcccgtcgcgccacctagcttccttcctcgcctcgccagccttgtccgcctgacaccgcgcatccgggttgacttcaagtacatcgtggagttggatcgagccttgagatccggtcaatgtaatagtcaactagctgctgggaagtcagtcttccgtcggcaaaggcgcgttggatatcagcaatggtggcctctttgatcgagaaatttgagccattaaatctgttgacgaagcttaagagtagtaagatcaacggcgaggagagtagttttgttgaaaggttggcccgcattttctcttaaccatattccaaaagccaaactttctataatatatttggtaagtattggaaatagtgacaccaatgcatgtgtttatctattcaagtggccaaaccactaaggctaacttagtggtgagggagggatgggaaaaaatgggaggtcatgggttcgaactcaggacccttaagttattaagctaatgtatgattgtaaaaataccattacgctacactcaaaaaaaaaaatctattcaagtggccaattttatgtcctaattaattgtgtttgaaaaaggtaagctttacatgatttaataattgtgttagatctatacttgtttttctttttattttaacattgccaagcatttgatattgaacaaat

SEQ ID NO: 378052 - DNA, 6315 bp, Cannabis indica
agagagagagagactgtgctagaataatatgtatataacagtaaggtttaatgtgggcttttttcattggtttttgaatgagctcaatagtctcagtttaaaaccaagaccaaaagatcttctagtgtcgattatgaaccgacacttatatttgatctgtatgtatattttttttaactttcttttttcgtctcaattattattttagtgtctgtctattaatcgatacttaaagtcataatatagtgtcagttataaatcgacaccttagagctcgggttgtatttaaaataaaattaaattgacaccaaaaaatctattttataagtagtagtgaaattgataggaatgtgtaccgaccctaaaacactgacgctaattacataccaataatagcatcaagggaatcaatcactcattttaattaacgtcggtggtcgaaaaatgtgatttttgtagtaatgcaacaagcttaataggaagtacatttattgacctgatggggtctcaagtgcgaaacaccattcgggtttccagttttggtaggtaaggacatttgatgtttgtattaattggaatgatatatctgcatcacgtgacaatagttgtaccaatattaattagatcacagcgaagttattacaagctgtatatgttacatcaaaacattagatcccaattattacaaattggatataaaaagcttgtagtgttaacgtttctccctcttttaatatatatattttttgggataagtctctctttaatattttagtagacagaaaacgtacgcctgtcccatgaaatagcagaataaaataagttattaataaatttttcaatgtacaattaatatataaaaatgataagattaagagatatatgctgttcttgatcacgtggattaaacataaacctggtattacattaataaattacaaaaaaaccaaaaaacacacacagatactgcagcaagatacattcacgacttgaacaaattacagttacacatttgatatactcaacattacaaacaatattacatgttattacagccccagccccgtatatttgggtgtcacatgtatcctaggatccgccgatctcactcatcattattttttctaacatgtgctgagtgggttaccacagagacaatcgttgctagcaaacgacgacgcttccaagtgatcgaatggtgacccaagtgggatagccccacatagatggttatgactaatatccaagtgcccgataaacttcgccgccgacaatgagccaggtaccggacctttcaagttgttatacgacaaatcaagtgccataaagtaggaatcgccaccgaaaacatctggtatgttaccctctaaagcgtttcggctcaggtttagtatccccattcctgagctcaaaagggccggaggtatttcaccggagatcaagttactgtcgaggtttagcgtcgacagaactcgcattttcccgatactgcttgggatcgggcctgaaatccggttcatggacaagtccaaatccgccagacgcttcatcccgcagatggactccgggatagtcccggtgagttggttccggcccaacaacgcccggctaagcatgccgagtttaccaaaatttgaagggatttccccgctcagctggttgttggtgaggtctaggtgtttaagtcctccgatatcgacgattcctgcggggatctcacccttgatggtgttgtcagcaagatttagtacggttaacttttgcagcgaaccgattttgtctggaattttgccggaaatttggttaccggttaaatcgaggatacgtagtgaagagagagaagtgagacaagaagggagctcgccagaaactcccttccagtcagcaaggatgagcgttgtgagactttcgaggttacagatctcgggtgagatccaacccttcatgtaaccgcaccggcctgccttggctattatcgggtcctcggactctccccggaggtttatgtcaacgacccggccagtggtcggatcgcagctgacgccgtaccatttgttgcagcagtcggttccagaccacgactggaagatgcccaagtaaggttcagagagggccgccttgaatgccatcagggctgcctggtccgacggcgggcaggaattagcggccgagataatggtcatcaatgttaaactgaacatcaacaaagtcattgctctcctctcctattttttattttcttttttaatctttctcaattatttgagatatatactagacggagcactagagagtatgtgagagtttggaataattgtagaggtgaggaattgagtttttcttgtttatagcaaaaagaactacgtcaggagtaaatgaaattaattgagcttctgatttattggatggcggatcatgtgaatctgaatttattaaatatttaagcatactgtattcagtacataaatattttataataaaagttcaattatattttgctcgagtggacatttgtccttttcacatgcatgcacatgcacatgtagctttgtctatccattggcagtttgtgttttctatctaatgcaatcacttattttactcatccaatctaatctacaaaatgaatgagtaaattcattgttgaaaaaaaaagtgtccattaattacttagatccatcattcttttatcaaaatattaaactaatacccttttttttattgtgataatggatatagtttagtaatttcaaacatttccttccaaaaaagatttcaagttttaatatcaaaagatactttttttttactcaaataaaatttatagttttaatttttgtaaaacaaaattaataattaatatttcattgtaactattatccaaattttcgtgaatgagacaagtggcatgatcggagagaagaatataccagcgacaagaattagtcaaggttgtcgagaaagggaacgtctcccggatccggaaaataataggagagtacaattcctgaaagtaacctcctttaatgaaggacccggagcgcaataaaggtcttgtagacattggccacgttagcatcttgcaaaagtcgctccatagacggttacacctttttttgacacatgatcagattttatctcctgtgccagatcatggtagtgcgcataagcaccctcaaatatgttttttgcccaacgacctggttagaaagtacttttcaaaggagagaccttggcatgacgcgtgtcctagatcgtacaaaaatcctcacagcaactgtatgacatagatgaagaaggttcttataagccaatggtcaaatcgtccttcacagtactggtcttagtagcatatggagtacgaaaccctaagtaggtaaagggtgccttttaccacatgtgctcctataaaaattcctatcctttcttgaggcaaagggaaacaatttcacttacagacactctccaaacattccaagaaagctctctctcaagtggagcaaaagaagctaagtaatcgttagtgtaaccaccttgtaatctcaaaaacatttgcctaaagaagccaatacaatagactcatggactaaggatcattaatgcctgaaccacataaaaatctgtctatttattatttattatttcttatttctttaagctctaaaaatatttggtttccaaaaaactcagtaaatattttggtgctttcattaagagctgaaagaagtctagtaatgttcgtcgtccttcgaccatggttaaaacacaaaacactaccggtaaaggaactccgttggatacagttatggaggaagtcacctttcttccagtcgatgcataggtggaaaatgatggagaaggcgcatgtgctatagggaaccaagagaggaacaccgagaaggtcgtagaggaccacggtgatggtcaaaatgtagaggattatgaagaggacgatgatgattactactatagagatggatattataaagatggttgctattatgagcatgaccctagtctagtgtgagtaaccgaagagttgaagctacataggcagccctagaagagcaacaaaggcttactgcttagatgaaagaaacaatgcagcaactttagagcaagtttgataagggtaagggcaaggtgattgaacctccacgaaaatctgcgcctaagcctccacgtagagatacacccttggttgaacaaccctcgaggacgcagaaggccaccgatgattttgagcatggacgcccctttgaccctcgaggcaaaaccctgctgaagggaccagtcgcaaaggttcctagacctaagagacgggaagatcctcccagtgataccgtcaatcatgatgtgaggattcctatcagccattctagagacagttggtccatgtcagatctgtggcggcagttgaatgcgaaatacgagaggtataaaagcgagaagacaaggccacgtggtgtgacctaagaaatcatctgagtgacaagatgaggggacgtgatctcccggaaagtgataccaagagattggaggaacaaattgctactttgactaagttggtcagaaaataaaatggagcgttgttagactccgaggatgaagatcagaaaccttgtgtaagtagaatcacggaaactccactgatagaaaactttaagatccccacattgaattgtatgaagggagaactgatccacgagcacatttagccaaatataataagatgatgcaggtggcccgcgttagcgatgatgctaagtggggtcaatcatcagttggaaagacctacaatcggcttttcgtaaacaatttatcgtcgcatgcaaaaaggacatggaagtgagctccctaaccaatgtcaagcaagaacctttcgaaagtctgaacgctttcattcaaagaatgatggaggcagctaccaaaaccaaggtcagtgacgatctgaagctgatggccctccagtcttgactagttgtaggttccttgttgtggggggagatgcagagaaaaagagccgagaccttaagtgaattcatggctaaggcatagggcataattagccttgaggatgcctatattcaggcctttagagtccctcctgcacgaactctaactacagctgctcccagttttgcatcccgaaatcctgcccatctttgtcccttttaggaccccaattctctttaattatgtacagacccactgcgttcggtctcgtacctatgtagacccgtttcctcaggtactgggtagcacagaccgagtgcaccgtagctcccaaacaatccaaagctgaggtctcgaattctagtgtggggcatttacggggtaagatgggaggtaagaatcacaaccataatgattcggtaaagaaaccaagaaaggattacgatacgaagtacaccaagtacataagtttgatagatactattgagaatgtttataaggcaacgtgtaacatggttcattatcagaatcccccgtgcatgttaaatggtgggaggaacaggcgagatcagaacaagcaatgcgagtaccatggaaaaaagggccacaccacaaatgaatgtgaatatttgaaagatgagattgaaatgttggtctgagtggggcatctgggcactaggtctacatcccaattatttatcccggacagggggtagtctaggagcacgtgatgcttcccagacagtagggtgccgtaaatcccctacagggggttgggcgccctcaagctcccagatcgtcattacctgttcttcttgctccaccaactctgacttgggtggctctgcttgctcaaagactaggaactcctcttagaatcgcttttccacctgtagatggacattttgcgtgggcagaccccatctttccggaagtacccataatgcttagaagagatatctaaaggacgtggaggagggaaaaatgtgggcactagtatagtctcttgcacatagtccaagaatgatgaatctcccaattacctccactgaggaatatgctaagaatgtgcggtcccctcataacaatcctgtaatgccctaatgattaggcacactaccctaacatattatgaaaccataatcccttaaactggaattactagaaaggtaagcgcgggaaatttaaaatttatttacaatagcaagaaaattaaacttgtaataattttaactttacaaacaactaaaagatacatgttttgggtgttgggttttatgccctaaataaaactcatttcaatataatcagatttgtttattaatatagatcagaaataacatttaatgttgcatggtt

SEQ ID NO: 378053 - DNA, 2714 bp, Cannabis indica
aaaataaaaaaaaaaaccattttgattttataacacattgataactgcaaaacaaatcatgaaacactaatagttcatgtaagaagtacagggtatcaagcacggtactcacattgcttcttccccagaatgttgatcgttttgaattatgattggtaccaccactgactttattcatagcctttccaggacctgattcaagaccagacaaaggtaagggatgccctggatccattgatgataggatctcccccattgatcggtaagattcaccagctggtgaagtacttggatgatccaactcatttgagttttcattacctttcttctgatcaccttgttcttctatcaattgagctattggatctcttacttgttggggatcaacgcataaatttgaaccctctgcagaagcatgattctctttgggtgaacctacatctgaatcatcaaccccaaatgtctgtgtacataaaatgaagtgtttgtcaattaaaatgttcatagaagtaacttgcatgtatcgtaaattcctaagtgatccaacatatttcttttggtcgcagcagaacatagcattaagttactgagtgggatactggccaactagatgcatatttaaacagaaaccttagtaattagtcaatttttcttaaaagacagttatttttagaaaattctccacaacattcaacacatacaaaattaatgtacttaaaacatatttatatctagggacgcatacttgtttattgtaagacaatcatgtatatgagcataatataatggagaaaacaaagttgaccttatagtcatagagatcactgccagcataaccactgctttcacttaatttcccactatgtacacgttcaggatcatcatctgtttctggatctacttcattttccgcatcatgataaccattatctttcatatcaatattttcatcatcagtagattcttcactcccgctgttttcaatccgagagtcagccgagattgagcatctttgtagattttcatcctgaataaaaatctaataggtaagcaacataatttaatttctaaagcattatgcttcatgccaatgtttgcttcatggccagaaaataaggattgacaacaggataagaaccacttacatcaaaaatgttttcatactcctccaagagtgtcgtaacaattgcgtgtgcattagtagcagcatttgcagctgcaagaagctggacagaattatcaccattaccatcaaaatcatctaatccgcagtcaccagttaatagaggacgtaaaagcaagggcgccatgcatgcagcaacagcagatggattcatcagattctcatgagaatgagatgatataatatgcatcatcttcagtactctgcaaaaggggcataattaacttgttatttgcatataaagatttccaattagagttggtagagatacaaaattaaacaaaggtaattaagaaatgaagcatgaaaaaatataaattccaagtacataatgagtatcacaagcagcaggagatttctcattaaagcagaagtcactccacagtcaaaattggagaataggcaagcaggtagtacaaaccacggaagaaaatattggcactataatgttatggaaaatatcttttggaaaatctagatggaaatttacaaaaaaaaccatatatatattattaaatatacaaaaaaaaatcttcaaagagaataaaattgaacaattacaacaataaaattagacacgtatcacatggaatcaagctaaataatttttactgaaaataataagaaatatagattagtaatagagagtataataaatagaatagtaatcaatgtttatgaagacgaaaacaagtaaatagagcacctctataaatatatatacacctgaattacagtctacagatactcaatattcatattttttgtttaatcaaaacacagttttcaatcttgtaagaaagactatatatgatttttgatcttagattttcatatatatgtgacaataattcaaaataactttaataaaaaaaaattaaaatatataaataagataaaaaattggtagtgtaaccaatatatcccaaaatagccagatattttgggttcatcaaaaagattacatataatatgcccatcgatatatatcaattaatgtacagaaatagttttcaggcagcaaaagtattttccgataatactccaacttattactttagttttcatttcttttttttatttgttctccgtcaagaattcaaataaattaaagaaaatttgtgggctattatggtaagaataaaagattctcagagacatgctgttttttccatttactccttaattgatatttttttccctgttcaaaggtctaattaaagtaccagctgcaaacctcttgtaaactgattttaaataaaaaaaaaatgagtaaactaatattaaaactaatatatttttatttttgacttcatctcgttgaagctttcaaaccagaaaactcaaatgaaacccaaaatttaacaaacttcaacccaacctatcagattatacatgcacaataaacctaaacaagaaagggaaaatacattcgggcatcatcacaaaccaacacaacaacaaaaatggtggcactaagaacagtttgattaaactcaaacatcaacaaaaaaaaaaaccaaaaattaaa

SEQ ID NO: 378054 - DNA, 3191 bp, Cannabis indica
tcttctcaaagagcgtgattttcaaacacatacaactattacttggtgcgacaatgtgggagcaaatgctttggcttccaaccctgttttccataccagaaccaaatacatcgaagttgacatccatttcattcgtgacaaagtcttgaacaaagagctggacataagatatataccttcatctaaccaaagggattgtcaagttcaagattctatttcttaatagacaaacttggagtgatgaactcacccctgcatttgagagaggatgtgaagaaatgagctttttttcttttgttttcttgtgctggtttagtgtagtcctgcattagacaggtggctcactgttagttggcagctaatattattgatccctatgagctattaccgttataattgtaatgatgagacaatcatgagaagtacgagagatttccttttctcttagaattgttttacagtaaatgagcctttaggctcctctattgtatttggtctttgaccttgcctacaaatagattttacttgaactctcattaattgagctgagatttttccaaaaacattttccctttattttctctatttttaacatcatacttttgaaaataaagaacttcgaaatagtataattttaaacattaggtggaatacgtaaaccaaaaaaaaaacattaggtcgtatttttgaaaggataaaaaatagaacagtggataagtaaaaaataggtaaaagaaaaactaagtatttaagaaaaaccacaaatatgtagtatatgtgaaaattctccaatatgaaattgtagttgggcttaagcccatttaaattctttcaagttggcccacgttgtagtgttgacctttaattgaactttggaaatgagaatttatcgagagacagaacaggtacagggctactgaggatcccaaataatccaccttaaaaccatccaaagtagcccagaagttgtaatatgggattagattcattatgatatgggagtccttaggatatgtatgcgtgataaaaatatgagaaataactactttgaggctaactttcgagtaggggtccctccctagtagaagactacatctacagcaggaatggattctgctcctcgagagttttgaatcaaaatgatgtttggtaggattggaagatgttggaaataagatgtgtatataaagaattactctcttaggctaatatcgttagtgagctcaatcatcaagtgttactaatcattattcgtagataaatgacaaaaacgtctctacatatataggaagcttttctttaatgtccagcattggagagtggagatttcacaaaatgctgctcgagcaccgcagcctatagagcctatatgatgctatgatatgatatgatgggatatttatatatacatgggcatcggatcctgcgctcacttatttatgtaagcactatactcccacgcaacaaaaagccaactgctttttctttttagacaaagttgagaagattggaatgtcaaatgtgcttagtttagtaagaaaatattaacacactgttcatgtatgttgcttaaaatgttgaactaattaatcactattcaatgacaatcatcaaattttaatgtatttaactttaatatttttctgtattttcaaggtcaaagattcaaaacctttgaggaggtgcaatggttaaatcaattaaagtgtattcatggttagatcttattattaaacaaacagaaatgaattttcgtgtggggccaggccataaaacatatggagtatttagcaaaatagcatttttattataattactttgcaaagtaccattataaaatttctacactgtatgtatatatagctaacaataaatgttgccggcggaggctagcctttcaatgaaagatttggaagcaggacacatagaaattaacattatacatctatattagataaaaaaacattatacatctataacgtcaaaaattaaactctcttcacatgtaaaaacttagaaaaggtataatactttaactatataacaataataactatatatataatgttaaccaccataaacataaggtattataaaacaggtagcagatccaaggagagaccttattattaatttgtgaatttgggcttttctcatcgaaagaaaatgtccaataatccaactctaaggtgagcctttttttttattcgatctatctaaataaacatcaaccatttatttttatttttctgctgcttttaatgtgtagtaattgtagtataatctttgtgagcaaatctcaggttgaagggaaaagtagctattgtgactggtgcagccagtggtataggcgaagaaacgaccagattatttgtggccaatggagcttccgtggtggctgtcgatgtccaagacgagcttggccatgaggtggttcaatccatagactccgagagagtgagctaccaccactgcgacgtaagagacgagaaacaagtcgaagcaacagtgagctacgccttagaaaagtatggcagccttgatgttctgtttagcaacgccggtatcataggccctctgactaaatttcttgaccttgacattgacgccttcgacaacacaatggccaccaacgtacgcggcgttgcagccacgttcaagcacgctgctcgtgccatggtcgcccgtaacatccgtggctccctaatatgcaccagcagcgtgtctgcatccctcggaggtaacagggccgcacgtcgtacacgatctctaaacatgcgcttgtgctctaaacatgcgcttgtggggttggtcagaacggcttgtagtgagcttggagcttatgggattagagtgaacagcgtttcgcctttcggattgggaacacctctggcctgtaaagctttccatcttgaaccccatgaagttgaagctaatagctctgcgttggctaacttgaagggcataactttaaagacaaggcacgttgcagaggctgctctgtttcttgcttctgatgaatcagcctatgtgagtggacacaacttggttatcgatggagggttcactgtggtttctcatagttactcgactgttgtctgaaacaaaggctttgttaaaggatatagagccaaggaagaagccaaagagcccatctttttttgtgtggtttgttttggcaattgtgtttt

SEQ ID NO: 378055 - DNA, 6157 bp, Cannabis indica
aaaaaaaaaatgagagttccaattaatctagtgattcgggcgttgctactattgaacaatgtccatgtcatcctcgttttttttattattattattttgttttgaaaaagaatttaaaatttcaagaaaaacaaaatggattcaattctttcgcatggtgcagatacatattcttacacatagtgtatgctctaaaaatcattcacatactttcatatgagggttgtcgttgttggcagaagaagctttcaccacaacaaaagtgtatcgctactatgtgtgagaggtattcaacctcttagacattgttcatcaagaacaaagaacagaaaacagagagaaccaaagagaaagaaaggcagagaaaagagagagatgaaagaagtcttattacattgatctgaaccttttacagaagtaacagaatacagctggaagaaaacagaaataacagacactaacaaccaatctaacaaacaggactaactaactgtcctgacacgccccctcaaacttagcataggtaggatcaccaatggtaagtttgcttcgaaaaagagagaacagttggctagagattggtttagtgagtccatcagcaatctgatcaaaggcaggaacatgtttgacatggaccagttgctgaaggattttctcgcgcacaaaataaagatccagttcaatatgcttcgtacgagcgtgaaggactggatttgccgtgaggagaacggtgctcaggttgtcacaccacacaactggtggacgaggcagatcaatatgtaactcagtgaagagagaatgtagccaagagagttcagtgactgtggtggccaagctacgaaactctgcttctgtactgctacgagagactgtatgctgctttttacattgccaggcaatgagattagggccaaaaaatatagcaaagccagaggtggatcgcctgtcgtcagggtcagttgcccaatctgcatcacaaaatgcagtgagctcaaagtctgctggtttgcgtaggtgtaaaccatagctgatggtgccacttagataacgcaatatgcgtttgacagccagccagtgagattgtaagggattggccataaattgacaaactttgttgacgctgaaagagatttcaggtcgtgtgatgactaaatactgcaaagcaccaacaatggacctgtattggtgaggatcatcgactggagggctgccaaaagctgagagcttcagcccactgaccatgggagtgtttgctggtttagcctcagtcatattggccttgtgtaagagatcacgaacatattttgcttgtgataaatgaagacctgttgatgttgttgtgacttcgatgccaaggaaaaaattaagaggaccgaggtctttaagagagaacttggcattcagagctgtggtataatgagatatgagcttcggatcactaccagtgataatgatatcatcaacgtacaccaaaattactgtcatggagagaggagtgtgcctgatgaagaggctgtgatctgactttgaggaaacaaacccgagagagagcaaacactgatgaagcttgtcaaaccaggcacgaggtgcctgctttaagccatacaaagctttatgaagcttgcataccatatctggtgcagcagggtcttcgaaacctggaggctgcagcatataaacttcttcctgtaattcaccatttaagaatgcgttattaacatcgagttgctttagttcccatcctttggacaaggctagggagagaacaactcgtattgtgactggcttgacaacggggctaaatgtctcagtgaagtcaaagccaggttgttgatgaaaacctttagcaactaatctggctttgagcttaaccacattaccttcagaatcctccttgattctatatacccatttgcacccaatgggagttctaccaggtggtaatttcacaagtgtataagtcttatttcgtttaagagcaagaatttcttcagccatggcattgttccatttgatgtgttgaagagcttgtttcagataagtaggaacttgagtagccatataggcttttggtttcttaatgccacttttcccacgggtttgcatactgtgagtattaccaggaagagaggatgctgcagaaaccggttgtgaatctggtgcagcagtgagaattggtgcaggagcagaatcagtatgaggaagtggagagatactactgtcattgtgagtaccagcagtgacttcaggagcagtgggagcaagagcatcagtagtatcaagaatgcttgctggaacggtacaattctggtgtgatctgtcagggaactcagaaacaatttgattagtgcaaaaggagccaatgtgagcatcaccaatgtcatgagggaacaaatattcaggcctgtatgggttagaaactgtgggaatagttctaggtgtggaagagatagagcattcaggttcagaagcaggtgtggaagtgtgtttaggaaaagtagactcatcaaatatgacatctcgggagatgtataagcgaccggtactatcaagacacttatagcctttgtggttgagactgtatcctatgaaagtgcagggagacgacctaaaatcaagcttgtgcttgtttaaggtcgaacattgggataacaaacacaaccaaacaccttgagtttagtataatcaggagtgatattaaacaacacttcaataggagatttgagagaaagaacaggagtgggaagacgattgtgaatgtagactgctgttctaaaagcttcatcccaaagtgttaaaggtaggtttgcttgagcaagcaaagtgagaccattttcaacaatatgtctatgctttctctcagctagaccattctgctcatgagtagtaggacaaggtttcctatgaactatacctgcttctcttagatattcagtgaaagacctatactctcctccccagtcagactgaaaagtttgaattttggtgcctaactgtaattcaacctcggttttgaatgtttggaaagttttaagtgcatcagtcttagacttaagtaggtatagccatgtaaatcgagagtatgcatccatgaagtgaatatagtatcgatagccattatgagaagttgtaaaggaaggaccccacaaatctgatacaataagctgtagaggtttattgtagcaggtttcagaggtcttagggaatgggaatttatggatctttcctaaacaacaagctcggcaaacagaatgtggcattttattcaaattggaaatgttacaagtagagagaacagtctttacaatcctttctgaaggatgaccaagacgattatgccataaatcgtattcatgaatggagctattacaattgatacacatattggaattagaactgggactgtgagaggtggtgacaacattggtattgggctgatgcagagattgaaaggcactacagggctgggatgagggagacagctgtaattggttggaatcaaaagtatataggccattgtggtgtttcccagtcagaaggatagctttgctcacttggtccttgacataacaaaaatcaggataaaacacaaagtacacattgttgtcagcagcaaactttgatacactaagcaaatttttagtgatttcaggcacatgaagaagtttattgagaatcaaaggtctttgacaagttttgggaataagataagtattacctatttgagagataggtaaggcagccccatttcccacatatagttgctcaggtccctcatagtcagctgctgtcatgacattttgcccatgcggtgtgcaatgatttgtggcacccgagtcgggataccagttgtcatcctgagactgagttgtgttagccaagttggcttgtgcctgggtttgatcagtggcttgaaagacacctgggaagcttttatcaaatcggtagaagcagtctatgacagtgtgaccaagtttcccacatagttgacattgcacacggttttgagttgctggaaaacgactgcctctgcctcttcccaggttactggtttggggattatgactggctccacgaggtgagtttcctctaaaatttcctctgaaacttggaaaaggaggagggttagagtaatgaaaaccagtaggagagtactgacctcgaggataagtgtgcggtctgtaatttcgatttgcttgcgcataaaacgcttcaagtgctagatcttgctcagtcatagccacattgatgctaggatcagcttcttaatcctccttctctatgcgagattcagatgcaagaagtaatgcctcgatttcaccaacagtgtatccctcaatccgtgtgttggtggagatgatgaaggtgtcgtactcactagggaggcctttgaatatagctgcgatgtgatcacgatctgagaggatttctcctactgaagccagcaaatcaacatgctgtttcactttaagaagatagtcattgagacttgatgagcctttctttaatttctgaagctttgtcttgaactcaagaatcttagatgagactttcaatgtgtaatgttgctcaagggctttccagatctgacgcgcagtgttacaacccaccatacgagttagaagactctcagtcatggacaacagcagccaagaaacgagcaattggtcttgaacgtcccaatcgacaaattctgggttgagccgatgagctgtgcgatctgtatcactgagatactgaggtggagggggaacatcctcaatgaatctttgcagtcgatttccacggatagcagctaagatctgctgcttccataataggaagttgtggtcgttgagcttaattgatacagtatggttgaaatagaaaggagtagagtcttcttgagttctggatcgatttcttgagtatacagcagctgcaggttgatttccttgtggtgttggttgatgatttgagttgtcaggatcaacagaggccatgttcgccaacaatggcggaaatggctctgataccatgtgagaggtattcaacctcttagacattgttcatcaagaacaaagaacagaaaacagagagaaccaaagagaaagaaaggcagagaaaagagagagatgaaagaagtctcattacattgatctgaaccttttacagaagtatttatacatgtttgtgcaagagaagaaagtaacagaatacagctggaagaaaacagaaataacagacactaacaaccaatctaacaaacaggactaactaactgtcctgacactatgcaaatgtaggcatatggagcatctacccattgtgttaatgagtatgttcgaattggtaaaagtatagctattgaatgccttgtcaactttgttcgtagagtgaatgaaatttttgagaccaagtatttaagacaatcgaatgtcaaagatattcgtcgcttacttcacatgggcgaggttcgtggttttccaagaatgttagagagtattgattgtatgcactgaaaatgtaaaaaaaaaattgcatggaaatgtcaatccacgtgaggtgatcatggcacacatacaatcatgctggatatagtagtgtcacaagatttgtagatttgataagaattttttgtgattctaaatcaaataatgacctcaacatgttaaatgaatctcgattattcattgatatcttacaaagacaagcacccaaagttgagtttacagtgaatgacaaacaataaagtaaggaataccatttagtagatcgtatctatctagaatggaatacatttgtcaaaattattctgctacctcaaggggagaatagaaaactatttgcccaataccaagaaataggttacaaatgtgttgaagaagcatttaaatattgagaaaaaaatctaatgcgcaacaaaaaatgtggtaatggtaatacaacgaacaacaaattttttacatataaataacttttatatgcaaaatttttaatatgcaatatgataatcaacaaaaaatttatattatacgtctgtacatacatacatacatacatacatacaaaagagatgatacgaaataatctactacttatagcctttcaagaatccttaaatctttttgtataagggaaatttgattttctatacttagaaaatcaaaaaaaattt

SEQ ID NO: 378056 - DNA, 1900 bp, Cannabis indica
tcacagaccgagtggccataagcaaagtggcaccttatttgatactgacgacgaagacccaaagccatgcattagaagatttagaagcatcacttccaaacacttttgcatgccctgaatggaactatatgaaggttggacaaaccccagggattatcacttggtataataaattgatctcaagttagtgatgacggaagatgtctttgtgtcccactcacttttagcttgatccattgaagattggtggatttgtgcgaaattggcgagatttgcaagaaaaaataatgaaagttccagaatcaagagtaagtctattcacactgaaatctggtcaacatcgacttgctagatgggcgagataagtaataaatagagacacaaaatttatagtagttcactccccatgttgcaatggtaatggagctacgtctacatttaatttttatttctcacaagaattaaaagagaattgactaaggaaagaggtcatatttctagagagaaaaagtagagtgtgatgctctgaccttataaagacttagtttattgtgtaaagtaagctaatcgagctctcctttcataggcaaggaggtccattaaaatattactaaaataatacaaaaatatggaaaaaaaaaatcatcattggctaatcttgaccatttgtgatgatctaatggattaaaattgaatttagatgataatcatcaatttttagagctcgagtcgtgtttgttggatcattttggagtaattctacgaaaaaaattacacttgacttggggacaaaattttgacttgaaatctctagaattacgatataagtgtgagacatgtcctcaaagatcttgaaaagagattttcaaaggatctgaattctcattaattctatcaatattgagtgagtcataaccattttctgaaagcattttagcaactagctccctggttgacatccagtgcctaggttgacattcttaagtcaacctggatgatgtatgaggggaaaaatgggttagacttctattttttgatgcctaagtgataaattgagaatatttagtcaacttcttagttttggtgaagttattcatcagttctccgagatgtcacttctttgcaaaattgtgtagactcaaaatttctcgatttgtagctaattttttgatattccactttgttggaaaggtgaaatatcaaagtatgaatttgacttcttacaagtcataaatcttgtttactacagaaacatagttagatgcttgagaagaaaccaaaatcggataagcagaacccatcgcaccagactatatgtaaacctaggcactgggtgcttttcagagagcttcttaggactcattttgacacttttgtgacatttgagaatgcaaaagaggtcttttatcccagttttgaccaagataagaagaaagcccagagcagaatttgtgtttgatcagcgaaaacatgcaaaccaagttgtacgtcaacctaggtgcagggctcaacccccatgtcaacctacgcgctagggccctattttggccctcagatgatctcgtttgcttcccaaaaacacttgtttctttgttatttctaaaaacgaaaaatatgtttggaatacttctcacaaaaactagcctaggttgacaaagcgcaacttgggcattgggaccatgcaccaggtcaacctgggtctaagtcccagtttggccactagatgattctgtttgagtcctagaagaactcgtttcttaatttttaatgaaaatggatatatgacttgaaagctgctcaagaaaattgtatggaaatggcccaggtttacaacatgtcaacctaggcactaaggcctagcaccaagttaacctaggtagtggtgttggaaattatttta

SEQ ID NO: 378057 - DNA, 4680 bp, Cannabis indica
aacacaccacacaaaggacaagttttttcaaccagaccttcttgatgcacaaatttcctttagtagcaagacagttagaggctgccctccaaacaaggtctttagctttaggaggcactttgagtgaccacagcttcttccaaagctcattggttcctgaattgtctgagatatgcttcataccttgaagcaaattatatgcacttcggaccaagtaaaaaccatttttctcagcaacccaataccaggagtcacttccaccagagggatttataggtataccaagaatgattgcagcatcttcgggtaagaaaaaatctcgcacaatttcaccatcccagctactgttattagcttgaaagaggctgctgacagtgaaattttcaagaccatgaacagtaggaacaggtgtagagcgatcgataattggtagccatggatctgtggtaatttgcacagtcgtacccgcaccaattcttttcctcaaacccaatttgacagtatcccttgcagcaaaaatactgctccaaataaaacacgggttcaacccaagttcagcagagagataatcaccttgtgggtaatatctagctttaaaaactttgctaaccatggaatcatgtctcaacaaaagcctccaaccttgtttaccaagcatagctagattaaagtccctcaaactacgaaatcccatgccaccatcaaacttatgctttgtcattctatcacaattcatccaaataatgccacttccattaccattagaattattcgatttccaccaaaagcttgccaacattcgctcgatttctttacaagttccaatcggaaaaaggaagacattcatagcatacgagggaagagcttgggctacggtcttgataaggatctctttcccagcccgaaatagaaatttaccctcccaaccattaattctctttctcattttctctttaagaaaccccaaaacagcgttcttattacgtccgacaatacttggaagccccaaatacatgttatccaccccagcttcttgaactcgcatcaagccacaaatgcggttcctaatatccatcctagtgttggaactgaagaaagctgaagatttatggaggttgactttttgactcgaggcatcttcaaaggtctgaaggagtgatagaacacgattagcttcttctcccgatgcttggcaatagacgtagctatcatccgcaaatagcatatgggagatagtaggtgcactcttagctaccttagagccggtaagcagtctagtagcctcataatccctaatcaaggaggacaaaccttccatgcacacaataaataaatatggggataaaggacaaccttggcgaatacctctagtggggataatcgtccccaatttcttaccactgttgatgacatggtaccgaacagagttgacacaactaagtgttaatccaatccaacgttcgttgaatcccatcacccgaagtatagcttccaagaaaccccactcaacacgatcataggctttgctcatgtcgatcttgagcgccatataacccttccttccattagtcttccttttcaagtagtgcattactttgaaagccaccataacgttgtccgatatcaaccttcccgacacaaaagcgctctgattttcaaagatagcttggttcaaaacacccttcattctattagcaacaaccttcgaggctattttgtatagtacattacaaagtgaaatcggcctcaaatcactcatctgggacgggtgtttcttctttgtgataaggactatattgaatccggaagcttacccgaatcaaagaagtcacgaacaaattgaatcacatccgccccaacaatattccaatgtttctggtaaaatgctggggtcataccttcgggtcctggagacttatccggatgcatttggaagatagcattcctaacttcatcctcagaaatagtcaccaagagatcttcattttgctcacgggttatagacggtcggattccctccaaaattgctcccagatttatgctagaagttcgaaacatgtcttggaaatagcttgttatgacatttggcaaccccaactcccaattaacccaaactctgttgctatcttgaagctgaatgatactgttatttctctttctaaagcttgcaatggaatggaaatacttagtattcgtgtcactcaaattaagacaaaattgtttcaatctttgtttccaaaagatttctcgttgtgccagaacttcagacaaattatccttcccttccttatgttgttgaattgaaatcggatctctaccccatttagagttttgaatttggcttttacaatggttgattcgcttatgaaaatttcctgtaatatcccgaccccactttcccaacacttccccacacttttgaattttctcttgaatgttaataatacccgaacccatccaacacccctcaacaagctgcttacaaagaggttctcggagccaagcgttttcaaaacaaaaagagtgatgagatacagttggaatattacctttgaagaccaaaagcaacgggcaatgatcagaggttgagaattccggattgaaaagaaccggttgtgcaaataaagacagccactcattagtcaccaaagctctatcaagcctttcttcaatccaatcactgatgtttctccctttctcccaagtgtacgggtatccaaccagaggcaaatcaatcaaattacaatcacccaaggccctaataaacccttcaattaatcggtcagggtatttcctaccacctttcttctcaaagtgagaacccaaattattcatatctcccataaggcaccatggaaggttgctgtcatttttgagagagcgaaaaagatcccatgtctgacaccgaacctccctttttggctctccatagactcctgtaaaacgccaacggggagaccccagcagttgaaccgtagcatcaatgtggtaaaaggagaacccttgaattgctaccttgctcgcatccctccataacaaagctaaaccgccactgtgcccacgtgcatccaccacaaaacaaccttcaaagcccaagtgggctctaatactctccatactagtcttagtacataaagtttcacaaagaaataacaagttgggcttcttttgggacacgaggtccattaagaattgtttggcccgcgggttcccaagcccacgacaattccaacttaagcaactcatggctctgggtgggcctagaaaccagaacccaccaaagatccattttttggaagccccacaatatcttgttccatatcatctattatatcagaatattccttttcaagtggtcccacaagatcccccaaattggtgtctggccttctcctttttgagtcaaccattgtagtaatggtagaatcaaagaaatttccattactattgacatttaaagtcaaatcttcatcattgactcccaaagtcttctttatactgttgtgcctctcattcagcatataattatggttaatatcatgaccatgattcttgcaaattaatccccttgttttctccggaatcctaggaattaaaatggccccctgttcagccctgctaccgtgagtctcatgctgagatccatcacgcaccgccgcccctgaccggagccactgtgccctgaaagtcgattgcctcctttgtgtcgatgccctcaattccaggctatatggcttctcttgcagatgcaaaggcttcaagaaaattctaggacaaaacttctccgaatgtcctatgattccacatttgaaacaaaacgttggtattttttcatatttgaaattcacccaataccatgaggagttgtcaatgcttatcatcattgttcgtttgattagtttgttaacatttatccgaacttgaacacgaaggtaatccctccaaactcccacaaaattgttaggatctaattcgatgaacgtaccgatataatttccgagcgccatcacaacactaagagtcatattacccgtttgtaaatcatgaagttgaacccacatatcgagatggttgatttctacaagccgtgggttgtcaccatccttcagcctagtgaaaatgaatggctttcggtcgtaggtccacggactcccatcaatgagcctttgtaaatcgatctcatggtagaattggaaaagaaacaaatttggactgagttccttaacgtacattctcatccccggctgccataggaacgccatcatattttgaaaaacattgaaatctgaaactcggcccgttaatagcttacccaccaaacaccatctggtgtctatcgccacctcttctatattactcatcgggatgcttaacactgctgcctcttcctcctccaggctaataggttctcttctgacctccaggactctcccttcaccactacttgatgccatagcaagaccaaacacagccaaaatcaaacaaactctcaaaatagagagacagcaaacgtatcaggggatacgactctactcaaataatttagatttgtcctctaattagggatgcaaaaaagtactaaatcaattttattattattttaacatacaagacataaaaaaatcatataaatgtttcataatttaaatgtgatagttaaatatactaataaaataatag

SEQ ID NO: 378058 - DNA, 1953 bp, Cannabis indica
aacctttcggtgaaattattagacgatcacaacttcatgtaatggaagcatcaagttctagttgtaatcaggggcaataaactttagaaatacagcagagggaattcgcgaccacaatttatctcagatgcagatcgagcctcatgaatacattcttgcttttctagagtgggatgttcaggaccagcctcttgtttcctggcttctttcatcaatgttagagagcttactcatgaggatggtttggagcaacacttcactctggaagtttcaactaagatcttagagtttcaaaccaaactccaaaatctcaatagaacgattcactttttttaattgattattttttcaaagttaagcatcatgtagatttacttgcatctgttggtgaaaggcttagtgtccatgatcatgtggatgccattttaaaaggcttgcttagtgagtatgacaactttatcatctccacaaacactcaaactaagggatattctgtagctaaaattgaggccttattgttagcttctaaatcttgaatagataaagaaattgagtttcaagctaatgtagctaaaattgagcttgatctagcagaagctaacatggatgcctttgcaacctataatcgaaataggccatataatctactaattcttgttttcaggctaatagtggtgatttcaacaattatgttgggcaaaatttttgaggaggaactcaatcaccaatggtgaatccacaattccatccatttggtcgtggaatggttggttctaatcgcgctggtagaagtccaaatcatagaaaagagctacaatgttaactatgccctaaatttagatacactgttgtggaattcttctatctatttgacaagagtttcaatggtgcatctcagcctggatcaaccacagagaatcaatctaccactcctcaagccaacatagcaaccaattataagaattgggatcaaaactattaccctaattcaggaactacaaatcactatacacttgatcaacaaaatcttattaaaggagctgagtatgatggtttaaaacagatgtttgttggtaatggttaggttgtctataaaaacattggtgaaacctttattaatcatccttctaaacctcttatttttaataacttgttacatcttcctgagataactaagaaattgcttagtgtgtcaaagtttgtcatggacaatcaagttttctttgaatttaatctttataagtgtcatctgaaggatcaggtgcaccacaatatttttttgatggggaaataccagaatggcctatttacttttgaaccatctcaactccagcttgcacctacagggaaatctcaagttccagtctttggtaataaagatctatcctcttgcattttgtctcttgctgtcaataactcatcttcaactaaatgtactaattgcaataagacaaatatgtctgaatatgaattgtgccataatagacttggaaactcttcctttagagttgttacctctatattaaatgattgtaacatttctattagcaataaaataactcattttgtttgtgttgcatgttgtcttggcaaaatacataagttacctttccaaaaatttgccaaactaaatattcaaaacctctctagcttattttgtttaaatttttgaggaccctcacacacattaacacatagtggatactggtattgcatccactttgtagatgtgtattctagaattgcatggttgtatttactaaaaaatgtatcagattctatagacatttttcattagtttagggttgaatctgaattacaacaaggaaagaaacttaaggccttacaaacagattggggtgtcaagtataggtctttctctgaacgtcttacaaaggaagggatctgtaatgaccgctctagtaatgtagattagaaaaggcaattagcact

SEQ ID NO: 378059 - DNA, 5014 bp, Cannabis indica
attctgtttattgtgtctatgaatcacttgctcacatattaacttttcaaaggtattctcttcctttcacatgcatactatggtaccctcgcaagatacttcccaggcaaagtctgtgaaacttagtgaatagcaagtgaccaagagacttgtctgcatggtcacatagggggcacccactgtacaatgcatcgaactagcacaaagaacttatgtagagaaattttaacgcttagtataagatactaaacctgcctctaagtcgtctaatcatactttggcttggcaaagtaaataaggacccttacatgtcaaggccataagaagatagccagaattaaagacgtctggttggtcacagaatccatgataaaaaagcaacgggataaatactagtagtgttcaaaaatagagggcttatggccaaagatacgaacatgaaggccctagtgctgaaaataaagtaatattctaaaaagtcatcaggccacataggacatgataataatgttctaaaaaggctccaggccataggccacatagaatgcaaaagtgagtaatgttgctaagttaaaactccacaggccataaatggccacaagcaacgctgaatatgaaaacatagtctatataatacaaacatgatgctgaatactaataaaaatttcatctacatgtgtgcaggggcagcaggagctgaatctagagctgccaggtcaagatccagagagtttgggccagccccatcattaccatgctggttggccacctcctccactggtgggtcgacgaacacctagccacgggtacccgatgatgacccctctcgataagtagcaatttagtctgtctccatccggttttcaaacagtgccttcccaagggctaatgttctctccacaaaggtcggagtgcccatgtatgacaattcagcttgagggtcgtgcaaacaaaactcataggtaagtacggaggacaggttgatgtaattttccttaatggcctgctgccatcaagagcctcttgcaactttatcttatgatcctcaagatcattttgcaacctagagatgagagcaacaaggttggtgttcttggtgttcctggaactaagcatgaccttgaatctatagaccattctctacctctctatcagaaggacctccaactcggaatcggctttgtcttttgcagcaagggaagcctccaagaccttcccacgctcctaaaaagcgtctaaagacctcctagagaaatcgtaaatcgtgctcagtttcattagggcatgaaaacaaagcaaaacaacatcaatgtcaaacattgtagctctggttggccattcccctcattggatttctacggccagcaagacccctatataattgtctaaggctggctagccacacacaagaagatgaacaaagttgaaagcataactcaccagggaaaggtccaaagtctgtcagagtattgcctgtgaggcacgctgtcacccagctccttcaacgcctcatttaagaaagggatagccgtctctatgcgctaagtggctgactcagcaaccttctaaccaacaaataaccctgtaactctaatgggcctccgtgtaccttagcaggcaggccaaaccgtaggctatccgactggtgcaggcctttgtagaggaggaagcggcgatggtccactggcatgtacaccgacagaggttatggccaccttggccctcactcgtctggtaggctcatccaatggcctacctgcaagacctctcagcttggaagacatatatacaaaaagaaagtagcaaagtcagaatgcaaatattcaacacaagaatttaatcatggtattagaaactatcaaataccatcatcgtcagaagaggagctatcagagctcacaactatagctttaccctttcccttagatgtaggcacagaccatgtaggtctatcaaaaactaggcctccaggtccgatatgaaaggaagcatcacttactagacccccacagaccacacgcccatggagagctctctctctcctctccagattctgtgaaatacatgacaaaggtacttcttcgtcatccaaattagggccttccccatctctagggcaggcgacatccacatcaggcactctcgcaaccccaggagcagggggacaagccatagatcaagaagttgtccacactagtcaactagattatgtttctctattcagctaaaaaaaaaggatgtgattcactctatcctttatttccaaagtatagatggaacttcagaagagcgacacaaattgaaatttgtggtatacaattccacgaagaccttttgcaataaaatatttttaggcatacctgccaacgtttgacatggctgcgcaattgtgttttctagccattggtacgcaagctggttgaatgaaaaatagtcagttctgctctactttttccctgacttcaactaaaaatagtacccaatcacgtaagggctaggcggaggccaacctagctccatgtataagacaaacatcactgagagatactttatgctcttttgcatgaggtgcgttgggcacatcccaaagtaggctgcaacatccagaaagtattgatgaagtagaaataccaccccatgttcaatatgacaccaagaccatgccaactagcccgaaagaggcatgtgtgccctacagtacctgtgaggaatctcgtaatggacactccgtataaggccacttgtaaggatttttccaaaggcctcatctgaaagagcaaaagtgggcgaaatcaaccttgttctaggtggtttcacattctgtatctttggcacacgagatcgctctaggacatgatccagtcttggtactgaaggtgcgccaagtccattcagcggatttcctcaagcgccatcatggtccaaaggattgtcagagaggatagaacatgtcttaaacctcctcactcgagcaacctcttctaggtcagattatgcatcggaactcccagtctttgaatgaatctctagttcagctttgataggaggctgggaaatctcttcctccactctaatttgaccccgtgtggcccccgtggtaacatgaggatcatacaggtgtgccttacgcaaagtctatttcgtccttgccataagtacgaagtgaatagaggacctatgcagctgtcaccttcctggacactacctgcatgaaagaactaagggaggtgagcaacctgacaaagctacaaatatattatagtcaacaacacccaatggcatcttccaggtaaaacaaagggtacaaggtcaaccaacgaccaagtaccgtcttaggtacaattaccaagacatacagtaagtcctaagttacaaaatcaactataatggactcattatcaagccttacatagagttttcaagggagaccatgcataaggccataattgtatatgcctttaaggccgtcatgagaccctggctaaggtcaaaagagggagaaacactggctacccacatggagccttggccttggcttggcagggtttcaagtcctagtggctagctaggccccaagacctagcctagtggctgggaaggaaccctagttataggcataggccaaccagccaaaggacacagtccccatggctggccagactccctgaaagccacccatggtcggccaggattcaaacaaagcctccttggctggccagcatgtgcatggatcaaaacatttgatttttcaagaactcaaacatgttcttcatatttttcgtgacttaaagagccaagaatcacaacaaaagttagattcaattctttttgtctagaaatcacacattgtctatcctaaggctatcatgcataacaaaataccgaaggctacaatttaacataagaatcaaagcatgttcaaaacaagaaataatgttcatgaattcatagacaaattaatcaaatcaagtgaaagagcaagaatagaaagcttacccagtacaagattttaatggagatgaaggtgagaagcttgaatagtcaaaatagtgcaaaaatcctgaggagaatgaagcttgtgggttcgaccacctagagagaaggaggagcttttccaataggagatttctagtgagagaatgtaaaaaggaaaaatgaaagtgaaaaaagggtttgcccccaaaacttacttatgtaatacatgtgggccccctttttctcacttagttcaccaacccatcaaaaggcaactaaagcagctattttttgctgcaatgagattagacagtcaagaaaaaaagctccaaccaatgcatcactttctatttggcaaaggtaacaatagtcttggcaacatcaagatagctggtaaagtccttatccgtatcgacgttctcacagggacttgaggggtgaatgttatcccgatttttatcctcgtgacatggcatgcttaaatggacagaactagtgccacatggtaatacaacttgttatagtgagatttctctcacctagaaactcgagaccagactcctgttggaggacacgtgtattcagatttccaatgaaagctgagatgtccatgagagactcctcgagtttaaacctcgcctgagctagaatcagcgagatgatgcgtgtgtgaccaaagtctgatcgcataactgtaactcgcattatatgggactagagaacggttccaactcgcatgtatcaggatatgtgcgaagtatcctttctatactcctgcgaaagcatagagatcaattctctataatgcgagttggtcccaatgatataacagccttgataaacaaatatagactcgcgtgtctaggttctatcaactcgtcatacgatgtccatagatgcgactatataagaacgcagtcgtcctaaacttaattaaatgttaggtctatcttaagcctgcgagcttacactagaatatgaacagtcaactcgcatgttagaagacgcatacgttgctgtatttagtgaatagaaactg

SEQ ID NO: 378060 - DNA, 4357 bp, Cannabis indica
catgacactaatgagtgtaagaatttgaaggaagagatcgagtttttgataagaaggaataatccccacctacgtcaatatgtccaagccgaccaaaaccaggcacaagtccaccaaaataatgactcattgcccccaccagttgctgaccatttacaggtcatcattggtggatcccacattgcaagggattcaaacaaagcattgtaaagatatgctcaaactcttcttcacgagcaaagaaatgaaatcttgactgtagaggaaagaaatccaatatagccaaagatagaagagcatgccatcaccttcaccaaaggagatgctaccatgttagattcccccataataaccctctggtcataaccaccaaaatagggaatatgacggtagcgtggtgcatggtggatgatggagcctcttccaatatcatcaagattgtgtacgagaatatggggcgtcatttgaaagatataacaccttgtacacaactcatgtacaggttttcgggccaaggaatggctcctctagaatacatttgattgccattgaaaatcaatgaaagtcccacacagaagacagtcatgacccaattcataattgttgatgtggcatctgcattcaatgtcatgatagggtgaccagccctatatgatctgaaagcattgagttcaatttaccacctatgcatcaagtttccaaaaaatcatgatgctaggttcttaaagggagaccaacagtctgcccaaaaatgttacaacatcgctctttccaaagcaaaaaaaagaagactcgcatgctaatagctcgaacagtgagtctgaccaagggcattaaggatctgcccaagataaggaaactcaaaattggtcgaggtttagtgccagaaataaaatctgagttgatcaaatttttgagggtaaaccttgacattttttctaagtcacataaagacatgatgggattaatccattaataatttctcatgtcgtcaatatagatccaaacttccgtccaatacaacaaaaatgaaggctaatggataaagatcgaccacaagcattaaaacatgaagttgaaaagctatgtgcaaataacttcatcatcgaggcattcgaccatgtttgggttttcgatcccgtattggtgcccaagccaaacaacaaatggcgggtttggattgattttactaacctcaataagacatgtccaaaagattgtttcccacttctaaggattgaatagcttgtggatgccatagctggtcatgagatcctaagctttatggatgcctattcaggttacaatcagatcaagatgaacccgtaaggaacatacaagttttctgacagatgtaggcatgtattgctacaaggtggtgcccttcgagctaaaaaatacagacacaacctaccaacgtcttgttaataagataatcaaatacctaattggccacaatatgaaggtctatgtggacgacatgttagtccaagtacgaaaagggtgggggcacatagaggacctcaacgagtgttttaaggttctttgagaatacaatataaagcccaactcccttaagtgctcgtttggagtcaactcgagcaagttccttggctttatagtgaatgcccagcgaatcgaagcaaatcatgagaagatccaagcccttttggacatgaaattcccacaattattaagaggtataaagtttagttgtctggatagtagcactaagaagatttgtatcaaagtccacagataagtgtgtccttttcttcaacatcctgtaggaaaataaaaagtttaaatggacagaggagtgtaaagttgccttttaagaatttaaaacgcaactagctcaacctcccatccaattaacaacctctagataaagaagagctaggaatatacttagcagttacagaatttgttgtaagtgcaatcctcatccaagaagaagatggatttcagcatctagtaaattatgttagcaataggcttgttgatgcaaaaagtcgataccttctaatcgaaaagttaacatattgcttgctactagcttcaagaaactaaggccttactttcaagctcatcctaccagagtacaccgaccagccactacggtaagtgttacaaaaacctaaagtgtttggttgagtgcttaaatggaaaattgaattgggacaatacgagataacctaccagccaaaggtagtaataaaaggccaagctctcactgactctgtgactgaatgcactaatgtatctcctaaaaactttgatcaagagcaagagtagaaataatagctagagaagaacgagagcaagagtaaaaaaaattagcatggaagttgcacatagatagaatatgcacaaattaattatctagcgtagggattgccctcattacacctaggggcagcaaatgcatgatgccataatctttggttcaaagcctcaaacaatgaatccaaatacgaagcccttattgccaggctaaaattggtagacgaggtctaggcgaagtacctagacatattaagtgactcccagctcatggttaatcatgtcctaggtgaataaactatatggggagagaaaatgatggcctacctaagcaagatacaagacttactaagtcagttaaaagggtacacgatcaaatagattcccagagaagaaaatgccccaacagatgcccttgcccggctagccagtagcacggtagcggacaagaccaatcttgtccctatctagtacctaccagatcaaagtatctctattccataagaaataaatatggtggatgatagcccaacctagataacaccaatagcagcatacctccagttaggagtcttggaaaaaaaatgggaacgaagtaaagaggataataaggaaagctacccggtatctaatcttggacggaattatattgaaacggagaacatttaaaagagtactaccaataagcctatttgtgagaaaaactactcttaagtagtagtttctgagcggtatatcatacaagaatttgaaaacttatgatacatcactcttaggtgatggcttctgatctatatgccatgcagaagtgattagctcttatgttataaaagcaatctttagacatttaagattttattttaatatatatgtatgttgcccaacaacaacacattgcaagaccaatgaatgatttttttacttagattgtgtcaaataactcgctaataattgacttattaaagttgatattatgtctaacatgcatgcaagaaaccggaaagacaaagaaaaaaaatcttgtgtaattgtaaatgaccaagagaccataagtctgcttgatcacttgggggcacctacacccgcacagcataagacaagcacagtgaaaatacttaagcaaacaaaattttatcaaagttaatgcaaaaaattgaaagcttagtatgtgcaaaagtggctttattaaacataaagggaaataagactgggattaaaggttgcccgaccagctatatgtcttaacaaaaataaagccaggattaaaagccgcctagacggctatatgtcttaaatttaatggcctttatggccgtgtagaaaataaaagaaaaccaaataagagcttcaaagctttggaatgtcaaaaggagtaggtcgattcaagttttcaccgacctggtccgaaacagcaagtttggaagctagcccgacaggagggtttactagatcaacagtctgaccaacatcattagcaggctagccagaagagacagcatcctgaatagaggtattctcctcagggggtttagatgcctctaatttcttgcctcgagccacaagggattcaagcaacccagggtccatgtatccatagtcacccttgggattttgtttccagaactcgtagaaagtctcaatggccaggttgtaatgtgtttccttctctgcagctcgggtctattttgactcctccaacttttccttgagatcagtaatctccccattctgggcaactagcaaccgactcagggcctttctctggtccaacaagtctctcacctacttctctgactcctctaagtccctctccaactttgcggtagatagcactcttcaatttggtgcttgagatccttaacttaattattggcagcaattatttgtttcttcacctcgccaagctaggtctctaagtcttcaatattcttcttggtggcaatgtcggtccccttgagacgggcataggtgtgccaaaacttcatggacatctgagaattaaaattacaagttagaatgaaagttgcatgattggtagagataaacctttttaattataaaaatacctctt

SEQ ID NO: 378061 - DNA, 3239 bp, Cannabis indica
caccataacaacagtatattggagaaaataggggtaaattgtatggtagtaagattccataatgagagaaaatgaaatgaagaaaacactagcatgaaaggagggaagagagagcttaatggttcaacttatatatgtgtaggtgttatgagctcggatcaaagagcctaaatcgtaaatgcaattttcttttcttttctttttaatagaaaaaaaagaaattgaaagagatggtggaggaaaacgggggcaagagagaaaaagacttctgtatgatgcctaggcttagatagtattgttaggatagattctgtttgacttgttgaaaggacaggtttgcagcctatgtaagagttggttaagcatggggattgggagtctggaaggtattatatcattctgagctcactgctacttcagagaacctggaattctatgcttctgattgcaattattcaacttttcttccgataataatactgactacttagttctttcctacttcagttttctatgttctatctatttgttacttgtgctgtatcaaattgattgtgaagcactccaatatatgcatcatgaagttgaggctaactgctttacagtttatgccatgactttctgaagcaaaatagctgaattacacactgcttcttttcaaagtaatatgattagatatagcattgttggatccatgcacatggagcatttgtgcatcatagaaagatatatatgtgcatgcatagagagataagtgcattaatactttttaaccatttttcagtaatgtgtttttttgctgttttttgctgatagttgtttttcttattccagaggtaaaagtggtgaatttgctgcctgaggagcctgaaaataatgagaaaagaaaaagaggtctagttctgaaacagaatcattgcctagtgcaactgaagaacaagtcaaagaatcttctttggaagacaaagaagtcacttgttctaggaaagagaagaaatccaaggacaagaaaaagaataagctgtccactgctgaatctcttactaatgacaatgattcccatactgtaaactcttctgcgttgaatgctcatgacacctcagtgaaagagaaaagtgccaagtctaaaactaagaagaaaaagaaggatgatttggctttggaaagttcgggtgtgaattcaaaggataaaaatttgcctagcacagatgccaatgcagatgctactggcaaggatgataaaggttctaagaaaaggaaaagattggtttctgaagataatgatttgaagccagaagataaaatagaggttgacgaatcaaaacgcagaaagactaaggatgtggaggactctaaagggagcaaggagcttaatggacatgaaaatgggaacattgatgaaagtgctgagaagccttccatgcagaaaaccaaaaagaaacaacttaatggctcagctgaggtatagtcttacagtaatgttcttaatatatgtttggaacaacattctttgaagatcctatttatagacacaagctacccttgcatgttgaaatttcaattatttgtcatgttattgttgtttgcaactttgtattattgctcatgtttataatgtttgtttcagttatatacatatatgtatgtatatatggaattgtattagatactatatcgatagtcttttctacatatagtttttccacttttcttttctggtgctgagttttgagtagtcatacattattagattcacaacttagtttcccatgaaaatcttttatgtagtattcttcttccaaaattaaattatgaaatgtaacctgtggctgggtataattatttcaaccacaataaaaagttcatgttgtcatttataatttgtgatggtttgctttgatgagctggccttcagtatttcaaaagttgcattgattcagtcatgcagctggagattgacaaatcttctttctttttatttcatggcagccaaaaactgttaatgcatttcaaagagtaaaagtagaggaagtggtttttactgatgagaggctcaaggacaactcttactgggcaaaggtaatatacacaccaagtatttgtgctatgctttggtcagttttaagcttgtattctctgttgtgcatataagtttttcattttttcatgattcactcattgcaggatggtgcggatagtggttatggtgccaaggcacaagaagttcttgggcaagttagggggaggtatgttttattatgtggccactgtaggctgtctaaattcttttatcatttattgttttccatcgaggttggggagaatggaaatttgatgctaagcaaatatagcctagagtaaatcacaaatggatttttctatagctacttttgtaggacttcatttgtctgattttttccttctttctgtaccgtttgaaaggtcatgtttacaacacttgctacgagttttagatatttttatggggtacctattagaggttcatctttcagtttaaggttttaggacttcattcagacacgacaaagattcaaattttgaaagaaactacgtgaaaaaggataatttaatgttgagggtgactggaagaagtcaacaacttatcaaatgatttgtggctagtagtgataatatttgaagtctgtagtctaatactcgtctttttaaattctcttcagggatttccgacatgaaaaaaccaaaagaagcgtggaagttacaggggtgggcagattgatctttactcacattcagttaagttcaattattcagacgaagaatgaccaccaacttttccaaacctacacagattcatcatttttgctctctttagcgtgtaccaattccaattaattataacgttccgtgttaaaacaaaattttgaattcttctatccaatagtttaaagttattccttaaaacatcatttcactgtttgatttgatcccaatatgcgaagtcttttgtttcatcaccaatttagtttcttttattttaatacgttaacgagtttcgagcattaacaatatccaggaaccaagtaattacagtagtagacttctttcaagtttcattaatggatatatcatttctctgtgagtattccttaagtacccatttacattcctatgatttcaaaaatgccaaagtacaaatatatacattttgtttattaaatacgtactttcgcatgtttactatacagtaatcaggatcg

SEQ ID NO: 378062 - DNA, 3589 bp, Cannabis indica
attcttaataaatgatatagaaaagccataataattctaaataatttatcgtacaaaaaataaattaataaattaaaatattatgaattttggtgtaagatattgtaaattatttgaaaaaaaatttaaattcataaacttaatattgtaactataataaatattgtcataaaaaatatatttctacatgtaaaattaacaataaccctcttaaaaaatatatataaatcatattcaaactaattatatattttatatctatgaaataatcatgacttcaattaaaaaaaaaaaaaacaaagaataaagataatttctaacctaattatagttaaaagaatttaacaaggttttcattgaccctttttttattgaattatttccatatagtacatctgaaaggaaacactttaaacgattatagaagttcctgcattaaaaattctaacaacaacacgtttttcagtacattaatgaaaggaaatagtatcagaacagaacaacttgcaatgaaaagtaccaaacacaaccacaaaaaagcaacaataatcacagacaaatgcaatttgaatttgtgtgagaatgttaaaacatgcacacaaaaagtagatataaataaataatttaaaccctcttaaagaatgagatgagataattatttaaagtaaacaatctcaataaaggcccatcatcaactaaattttatttcagatttgagaattgagataatttacaaaagaaaaagaaaaaacaagattgacactgtgagaccacttcagtgcaacttgttataattacaattaaagaaaaaaatgagaaaagaaatgaaataaagccattaacaggcaaacaaaactccatgaaaagtcacctacatgttttataagcaatcacataccacaaatagatcatcacacttatcatcccaaattcttcttattcggggtgaagatttttcgatgattatagaaagcataatcggttcgaaatcagaaagagaagaaatagattagtgtagttcatattgatcaacttgttcacagcaggaaaactaaaacaaagtgctggatgatggcatgtacagagaggctaactaagtgtaactacagtcataaactaaggcgaaaacatagaggagtaagagttaatagtacatgtatgaaaagggtagctttggtgcattttaaacttcagcaaagtacttctcctcggcatcatgattggcttccctctgccaatgatcatccaacgtttcatcgttgtctatctttgtgtagtctaagtactcgtgatcttcccctaagagaaacttttgctgcatgatgaaagtaaattgctccatctgatcttgcatctcagcaggcaataaagagggccgctcactatgccctactgtggtggtttgagcaccgtttgttgatttgtgattatccacaggaatctgccagtgattgtcaaattttgatatgttagacctggctctaaggagggaatatctatatcataacataaaattgaaaaataaaaagcatttaaagagaatcatgcatagttagagatctgataaatcacacaagcagcaaaaataagttcataaagtaccgcagataaacgaatgccacaacccacaaacttaatatagctactgaattatgtccatctacttttgtacagaaaaatcaagatctagctatagcaatgttcctggctgtataggaacaaatgaatgccattttttaagactactgaaaccttccttcaagttaattgaaacagttatgtcagctactgattgggtttgcaagattggattctagaaggcattagggactccataaagaatagagaatagttaagcgagtcttggagagtttgttctaggtaaaatctatgttctgcatttgagaaaagaagtctaattttcatagtgaaatatcttctcctggtcttgctggtgcatgtagacgttatagtaaaatcatgtgtgttcggtttccatgattttctgttcttgtacagggtcactactttgttctggttcttagattctatttggtaaataagaacacttgaatttaaacgaacagactagattcccatacattcaaagagcatgggattctcatccccatgtacctataaagtcttgacactgataagtagagatattcaacacaagtttagtgtattaataaagaaatgtacctctgcagaatctgcacctcttttctctttcgcctcctcttcgtcttcctcttcctcttcctcctcctcctcctcctcctcctcttcctcttcctcttcttcttcttcttcttcttcctcctgtagatttctttcaacaccaacccaatctctctcagccacacccaatctctgctgctcccctctaatctttgcaaccaaaatcgcttcctccgcccttcttaacaaagtttctgaccacctctccccgggtcgtgccatgctcctaccacttagatcctgaaacttacccaaatactcatgatgcaagtaaggttctctctccctcattgaatcctcagaaaagtagtgcccatcacaaatcagtttatccagataagcacgccttctgttcttcactgtaacagatttcgaccgcaactcatctgatgttggattcattatgctcctaagatgatttaagtgccaattgatctcataattgtttttcaaagcatcaaattgtcgaagctcttcatgtgttagttttggtccatagcgttctaattaaatcaagccaaagcagaaacaaaacaaacactaagtttcgtaacaaaaagaaatcgtattttcaagttttcgctctaatttagaattcagtctcaattttctgatcatcaaatcagaacgaaaaagggtttatttatggttataaaatttacctaagaaaacggggacgtcgcgagagaggaggtcgaggaggatgagctttcgctgagaaggattaatggcggtgggttgaatagcacgagggaagtaaaggtcgtccattgctgatagtctgtccgctatgctttccatggcgcttacaattcattccccgctactctcctcaaactaacaaatctatggtttctttccatagtgaataaatatattagaatggaagacctgcactgcaccgacctatgcttttaccaatcattcaccctccacctccattgttacttgctcgcttattctccattcttatttgctcattaaaatttgtttatatatttttaagagaatttttaaaaaattttctttttttttttttttgtggggaattttatttatttatttttttaaaaaaaatactgtatttcttttaggtggtgtttgattggaggtaatagtcaaattttaggtgtaaatgcaattgtaaaactcagctcaatcaatgctgagattcaggttttctatttatagagagaaaggctcaaaggagccgttacatacaaagagcacatgctcaattacagctggaaaatcctaacagaatcaatgaatattcccttaacaatgatacactaatcattacaaaataacaacctttatactctcatgattttcctatagcagc

SEQ ID NO: 378063 - DNA, 14196 bp, Cannabis indica
aattcgattcttagtaaaatgaaatgcaaagcaagaagtagtgattcgtgaagctataacaacaggaacaataattaaaatcacacaatgtaaacacttaaaaaaaaaaaaagacttgtcatcaattgaaccaaacttctttagtttttactttcttttttttcttcttttaatcctataatattttgggactagaaaactatatccattgctattttggtacaaaggaaaaactcagaataacatgtttaaaactcagcataaggatgaacaaaaaactagcattgtatgcaggtgcattagatatccaacaaagttcaaagcttctaagctagaaccctttaactactaaccccagattgcacatatttacatcaaggggaaggggccactaaatttttctccgaaaagtttattttacttccaaggaaagaaagagaaggctcgctactcgcagatggatctatacaagcatggaattaaattccactgggaaagcaagagagattgaaatgtacaaaaggaaaatgagacttacattcaccactatttctcatctaacttaagtggttaagtgctaccatgaacattgctgatggaccgaaaacgttcaacagcgattccttgagcagaagaactcgtaatctggatgcctgtttactgacgtcaaattatctttcttcacaactgctcttgccataagagaagctgtctcctctagcgtccttaaccgctccttaagaattccactagggtctaggtctggtgctccttcttttgggttcagtagtgagggattcatgcggaaccagcattcactctgttcggggatcacaggaaatgtgttaaggtttagagaagttgtaacagataatatttgcaaaagcaaaacagagacgttcatatgttgaggagattaaagaatcaaaacatgcttcacggataaaagttcagcaaaatataaaaatatttcagctaacagtgacaagttaagtctctctttttttatgctacctaaacatgtaggagataatctacatttgagtctaagatataaagtttcacattaaacaaccaggtttatcataataatacaaccactgtcctttaaacatcatgtaaaaaatcataataataagttaaaacttaaaacactattaaataagctatagggtggccctcggtaagaaacaaactagtgaatgaagacagaaatgaattgaatgtaaaagaatcaaatttcattccatttttttatttggtttcattccaaagtattggaatgtcattccaaatggaatgatttttacaccattttggtggaaaactattccatttcgaaatgggtgaaaattttatctattttttacatgcaattttattccattttactcctatcctttttcctattctcattcatattcatatgttttaccaaacgtatccttagtgttaaaacataaaaactgctataatcatattgaaaggaacataaagtagaacaagttacatgagctcgatcagaaatagagcataacataactacctgagcattgtaagtttgaagacccactacaggagctactatatggggttgcacaccaggtcgatgaaccaagtgacccagcgaatggaatgtcaaaaatgatgcgcgcaaattaccttccggtatccgataaataggataccacgctacagcatacctgaaaacaagatgctgtaaattaatatctgaagcaagtttcacataacaattttgatctaacacctgaaagaaattaagactatttttgcatcctcgagtgcaggctgtaaaaagtattcttctactaaccaagatctaggatgcaggtcattcagtttaacagatttgagagttgttggatctccatagccttggtactgcaccggaccatcacccctaatcaactcatttatcctgatacagaaagagaatataattaagatcttcctgaagaaagattatcttaaaggtttaaactttcaactgaattagtaattgccaagtaagtgattgattttgttattcaataatgaactaacataatcctttagtttcattctttcaaaataaggagctgaacatatcaatcataataaatttcagaaaatgatgcatctgaacaagttcaatataagtatctatatattatcagccacaaaataaaccttacaacattgtttttaaagttaacgagaagtgcaagggtgatagctgtttgatgagctttctcaagaagtccattaatataagcattttgtcatggtgcagtaatatgaataagcagtgaactagattaatatgtgacttttagtacatcacacagaaagaaaatactcacttctcatacaaaggttgtctcttctgaggctgttcagattcaaaatattcaaaaagtagttccggatcactctgcagttttctttcctctaattgaagacgaaaaacatcttttgcagaagctgaagatgattctgaactagattcttgatgagaaaagctttcaaactcctttcgaggttgaggaaagagtactgaaaatattggaagatggtccaaattagaggagccttcagatgtatcattaaatttgcacaggtctacaacctcagaacaagattttgtgctgcttgtatctaagttttcaacatcgtttctgaaaagttggaccgctgacaaataagggacaaaataagcacaaaaagaaccattagcccccaaactccttgaatttccataatcatttgcctttatttctaacccataattcccatgtttctcataccacttccataggcctcccaaagaaatattacgcatctcatgtagacagaatgacacaccacataactgatctcttgaacaagagtgacatgataaatggggtggacaagaaataactggacatgaatatttaagaactctttcaaactctgcaactggatgaccagcggtcagctcaacagcttcagatgccttttgagccctataggcatcatccacggcttctgctactttgtcttgaacaggcttgaatgcatttaaacctccagattccatatctaaagtgtgtgctgcaatcggtctgtctttcttctcttcaagcatgcttgtgtcctgatcctttgcatttggagtcctgcactcatcatcaggggagaaatcagaaaaaccctcagaactttgagccatacacacaacacctgctttaggaactggattttcagaatcacaattcactttatcttgtacagtgttttctgtagtctgaatttcagcagctggatcatcagaatgttccagagatgaaccatcaccagaagtagtcaatccacaatccttcaacccaattggtaaccatttctgcataacagatccagaggtgtgggtttgcaaacaatcatcagcaaggacatttctctgcccttgttcagctgaatttccgaaagaagactgcacttggaccagttttgattgatcattcgagttgcgtgactttggcaacgagtgattcagatcttcaatggttttactcttcgtgcaagaattggcattagacatgttatccaggccaccaatcacattcggacaagcttggacaaaggttaccgattcaggtgttatgtgctttgctccattaggctggagcacagattttggacagctagtttgagttggagatcttgaaacactactagttatcttctgatcactcacgttagaggagatgcacgccatctccttctccttgcgtggcacagtaacctttgcacatctatctggcttggccctatcagcatgagatccctttctagaagaagacatccgttcatgatttaaacctgcagaagttttacttctccaacttctagtatctttcaactgcttgttgtcttcgggagaatcacaatttttcttacacagagaagcctccaaagtaccatcatactgagagaagacaggaagcttcttcaagtcatccacactatcgccattaccatttctttggaccttctgccaaacagaatggctgttttccttccctgtacgaccaccacgcaacttaccagcaactccaaatttggaaacacttgaaatccggggagctgatttattttgcttcttcttcttgccaggtattactacatgcacttgactaccatttctatcctgactaccatgtgttgtttgacttttgttggtatgattagatgaatctaagatattctttaacaaatttctacaagaggaatattccttttgaaaatcagaagctggtgattcagaaaaatcagttctgcaatgttctttttcaggctgttttcgaccatgataaagtttcgtcccatcatcactgtttgaggaagttgaagctggatccatcagaagtgagtcagacttatcagcacagtatctgggatgcaaagcattgtaagagcagatctgggagacatcatcaacagaaagtacagaatctttggatgattgtatctgtttcttaaagccaccaccagagcatgtctcagaatttttatgaaaagcaggtatagcctcttccaatgtatccaccccattagggtaagaggtgcaagttttcaccctaccttcctgtagggaagcatcaagtgaagtggaagacaatgctggcatattattgtcatggcaagttccagaagtcaaactaactttaggacattcctcaggcaatatgtctggttctttagagccagtgttacgtagaagtttcttaccccgtttccccttctttctagacttctttcttgaattttttttagtgacagtatctacatcagagctcaccatatttgatgatttaatgactgagttatttgagatcaaacaagaagattcagtgcatgttaaggatttttgagaaaatctctgcggaagttcattccatttagttttgtttgatataactttttttctgagattgacattgcatggttgaacctagaattgttttacgggcacgagagtttccagaataggtaccagcatggacacttcctttcgtcacttgttgatcagcctggactgaattaattggccgaggacaaaccaaatgtaaacagtccatgctaaccagtgaaccagatccaaaacaatttgattgttcaggacaatggagtggtagtgcaaaaatccttcgatgcccgttagcttcaagagtaaacaatgaaaacactgaatacctgataagttattgaagaaaaagcccgtcatacactcacaactaaaatcaagagttagaaacagcaaatcagaagaaattttgctaatatatatcctaaacaacccaccgtaaaagaaaaaataaatcacaagtttaacactttcagttctaccagttattctcttaaagtatccatgttcaggtcattgtgaaatcaaatctaaactagaaattatgctttaattgggaagtagagatggcaaaatttcattggctatacccactcccaatttaaggctaatactccatggaaagaaaaattcttagggattcctggcatgtgcctaagaaccaggacccggttggtagtacatttgatgaaaacctattgtaatagtatacacaaaccagtagcaaaaataacagaaagcaatagaacagtaaccaagaaataataggaaatatgggagctgttattgaatataaggaaaatagagacaaagtcccttacaatggcagagagcaaaagctctctactgatgcagagaattcactcaaactttgcacaaatgattctatcccaatcactcaatacaaaaggcagcttactgataggaaattcctagcaacagtaagtaatcaacaatagaaatagaaattggagaagattaaaattgtattgataaactctcccaggaattcgagagcctgtactctccttacacagtagtaatatcttgattgaatacataataaaaggaaactctcttatttaactaatactctagaggcctatcatgcacctccaccacacaccagtaattcccacttaacagaattacacagtggagtgatcccctgctgtcattcccacagtacccttcctaggcccccttctagagtacacaaaagtgagtggtggtctatcacttaccactaagaaaattaccaaaatacccactctttaagccaactcagcaacaagctatatttgtctacccctcctagtgcaagtaaaccttaccgtgggtctagaatgcccatcaacattcctgattttacccaaattcttcaaagatgtcttacacttcaattggaaccaacaggcacatcagtatctgaaggctcttgataaggttttcaagtcatactaacttgggacacaactactgagaaaaaaactcattcacaggtgcgtacacagtcaccaacaaaaatttaaatcacaaattcacaattcacaaacccattaaactcaattctccctaaaagggaaaaacaaaacaacacaaggaattagcgagaacaaaataaacagaaaactggcagtaacataatgatggtgcagattatttttataattttctttgaaaagctcagacaaatttcaacagggctattgcatagtcgaaacaagcaaagcagcagagatcatagaatggaaccctttccctggaaagaaagaccatgaatgctagacagggcaccttaaacacctcagacccgtgaagcacaaaggataacttacataacaattttgtggccactgataagtcctatggatttgggaacataacatacaaacaagacaaggaaaaaaggcacagtataacataaacacacagatgaagggtaaaaaactgcagtgcttgtaaaaaagaaaccaagtaaagtgagaggcactaggctcaataaatttggaatgcttacacactacagtgcttaaaagcttgtgagagcaaacaagcgagtggcttttaatccaaacctagtctcaataaatacatgttaaatatgataaaaaaaaaaatgaagaagccaagaatgtaatttgccttctgatcagatgggctacaagtaaaaacaactaaagcaaaagcatgctaaatgattgagccttaccccaaatgctttgttctgggcatatgggctgatcatagagcaaatcattgttacattagaatcagaatatgtttcatattcatgagatgatgtagaggctggtaataaatgtttgccccatttacagtgcaataccaagttattacaattaaacctgtaaataaaaatttatgaagtatctacgatgataagctattcctatactcacaaacaaaaaagaagtaaaaagtgagaaatttttttttccttatacttattaaagagagtcagacaaccgtaaaaagaataatatttacaactgcttattcacatcctataacacatatatatatatatatatgtgcatctaatagcaaaacaatattaactaactatttagttctactgaaaccatctactagtaaaccattttcaggtacactatatatatttatatatatttttgtttgaattataattaatataattatgtttcttttgtgacatattatgtaaaaggttaaaacttttttttttaaggattcaaacaagccaaagacaacaggttatggagtaatgctagagagcctcaaattgcaaacaattttcacagacaaagatggcaagtttactagtaccgacttaggtttcaatttgttcttttatacttaatagtttaggtaatatgcactttctcacatgtatacaaagccataataagttttcctaccgtagaagttcttaaatacttgttaattctaatcataatccaccattctgaaccaaatatatgatctaaggttatataatagaaatagaagaaccaagagttttaaatccatgttctattattatttttattgacctttaggtctttggcataccctatgatttgtagatttggtgtaaatgtgcaatatattacacaagtatattcagaatgtagcatcaaatacacttagagatgcctcatatccaaaagataccagcagaaggcacaaaagattacccatctgcatgttaacaataatcttaacaaatccttatttgaaagaagattacaactgtcacctacatcttacagtaaaaatcaattacctgttatctgaattgctccaaatgagagatgatactccatgaacctgaagaagatttatttttttcttgtgaggaaaatgttctaccccaattaataaattagaagaatttaaccagatttcagttgaaaaactcatatgacctctgaagaacttttgacattagtctgctttttcagtttcatttgtaagggatcatttcctccatccaaaattccaacagtatcattattgattcttggaaggtcctgatacatcttttcatgtgcctgtcaacagtaataaagaaaatacatgaacaatcgatgtgtcaagaaatacaaaattggagccgaagtttttcacaacatcaaatacactaactatcaccacgaaccaatacaagccattaggaatgccagagattaaacaaactatcctgtcagggtcactaatgtgaagggaaagcaatatgtagaggcaaaagcaagaagcagaaagcaaaatattattttgtttacggctgccactttaaaagaatcacttttatcttaggttggaaatacaagaccgtgaacagaccttttttcacataaatcttcaatcttgcggggaatatgaaagttgtgattattaacaaggcagacgaacctgaaatactgaaaccaagaccatgaagataaaaatttgactgctcccccaaccctcaaggtcctgatactgttgttctaagaaaatagaagtgcatcaagatctccccaatagtttcttcaaattataaggatcaatgcagccaattgccttcagaactttcagatcaacagtgtgccgtatcgataaaagttcgttgtaaaaacccttgaatgtcccttgcttggtcttgaacaaaaccccctaaaaaagataataaataaaaaagaaatgaatataagcatattccaatattttttataataacaaataagtatgtacatacattacaatatgatgttataatagcattgttccaagtatatatataaccttcttatgtattttccagctaacaattcagcgtgagatttagatcgtgcaagatctcccacactaacagaaaacatttggtgttctatactttcttgtgtgataacatatttgtcacaacaggcttttcccactaatttgtaatattttagtagaaaccaataactactggttttgggtatcatacgctcatctcgcttttaagtttctatcataattccgcttaaatgttaatatcaaattacatatttattacaaagaaattttcaaaggactcaagttagcacttaggacaataaatccaatacatgaaaggaatcaagcataaccatcttattataaaaaaggaacgcttattacttaattccaacagcagcaactgcaatacatacattcatattcccatacaataatcacttgttcacaagacaagcatgaaacaacctataaaacgttacatgtctcctatcataggaactgcaagaataacaaaaaataataatccatcaacagaaattataaaataatcgtatgtcataatccaacatgatccaagtacaaacaaggcatagcaaggaatataaatgattactttttttagaattacctctcttacaatgaacatgcaaacagaaagggagcacttttaataagaatagctcaagaattttttaacatctccagactataagacagcaattacccattacttgaataaggttatacaaaggtaccttttaaatgcttcttatgaagagaaactgagagaagaaatgaaaatgtgcagaaatgaagaaaacccagagcaaatagagcccacaaaaatggtttcctctcaatccaaaactgcaaaacgattgaatgaactagatattccaaaactcaaaattgtatctaccagtcaaaagaaattccatccactaaatttagattaaaacccacatgaccaacaaacaacccttacctaaatttatccttactaacaaaaatcaatatttaaaaaaataaatacatataacataaaataattagaacccgtgagaaggaatctagtggaatataaaaccgaaatccatataaatcattgcctgaatgatagtgaaatatgaaatttaggctcataaaaaaagtcatccccaaatttagctgttccgagaatatactacaacatcaacagctaatatttcccaaatttagaactacaaaacagaaaacaatcatctgaactcctcaaaaaaccccaataaataaattgataaagtaatcaaagtagtattttattcttgacttttgagtagtagtgggtattcaaaattcaaaatttaaaaactcaaaagggaatgatataacttattattgtataattccacttaaacagaatttagagaaagaaagaaatataagaacgaaccttgcatgggatggaaaagcgactgattttttagccggagcaagaagaaaggtacttgctttgatactctctctctctctctagtctctctctactgtttttatttattttattttaatctttttattacgtttattcaattttgtatcttatctttttcttttacttacaatttattttttatattatcatactctgtcgttttataattttatagttcactatactacgtcgttttgtatttgaggtattatattataaaaaaaaaaaactaaataaaacaaagtccacctgtcattctcattctcaccacactcatccgaagaaaacagtctcttctcagtggccgacgacggtcgccggcggctaggctctctctctccgccgtgtatccttctcgtctcggcctgaacaatatctcatctcagtctaaggtgtctttatgtttgatccagatgattttatttattttgattttaccctaaataaagtgtttttttttcttgtttcttactaaatttctttgtttttcgcctgaacatctgcagctctgcctatcaatatcagttcaggtatttcttgttgcttgtgaattgtatcagaaatgattagaaaatgtgtgaatttgatgttgctgagattttcttttgggtttttagttggcaagattgggttttgattacaaataaattaataaaaaatttggagagtgtttctgttttgactaagatataggacataaccattataagcatacttgttagtaaaaaattaatctttgaatcactggaagtagaatgagaaaaaaagagggatgatagaacaagctaagtagtgttatgcaatgttataaggaagcttgtagcttgttggtcatataagcatggtggtaggttttagacatttaacaacctttggattccctatagaattatgatgttgaaagtatatccatatatgtgtataaatatatatatataggctgaaaaatatattgaagcatgagatagtttcaactacgaccatagatggacataaattcaagacagtaattacatctgcataattttcactgggttgatatagtgaagattagcatctcccctgcacaaggatgacacacaaatctagaaatctatgttgtgtttcccattgcttcttttacctccaacatgattcatggtatgcacgaccatctcaaacttttcattggctctttttttaggtccacttgaatcatatatgtatagaattcttctccatcactgaaggattacacttgtgtgtgcatgaaaagaaaaagagtttaaagataaattgataaggaaagaaattcaaacaatcattttactaatctcaattaatttaagaccaacactctgtagaaacttcacatggtagcaactttaaatatagactgaaaatttggttgactctttggattgcagagaaagtgatggagcagaaaagcaataagttacaacaatagcaatgaaaaagttctcaaaatccattccattgctccagcaaaggcctccaccattaccatctactataatcccaaacccaactctcccaaccgcaccagcaaccttcccagagccttttccaactctcaccctctctcactcctctaaccacaatcgtctcctcatcttcctcaagacccatctcaagccgcccttctcccctcaaagcctgcttcgatttctcaaatcaaagctccaccaccaccctaatttcacccattatgattttcatatcttcaattgggcctctaccattgactcctatcgccatgaccactccaccttcgagtggatgtcacgtacccttgcccgaacagatcgctttgtcgagctcgactctcttctcaacttcatggtagccaatccttgtccttgttctgatggtatcttctgttgctctcgaactgaacccatttttcattttgccattaatgcttattgtagagttgggaaagtgaaggatgcagttcgagcctttgattctatgaagaaactgattgatgggaagcctagtgttgtcatttgcaacattttaattaatgggtttgtgaaaaacggtgaacatggcaaggctttagaattctatcataggatggttaaggatagagtgaagcctgatgtgtttactttcaatattttgttgagtagttattgtcgtaattctcaatttgggttagctttggagttgtttaaagagatgagggagaaagggtctcgtccaaatgttgttagttttaatactttgattaaaggtttctttagagagaggaagtttgaggaaggtattcaaatggcttacgaaatgattgaacttcggtgtgagttttctaatgtcacttgtgaaattttggttgacgggctttgtagagaagatcgagttatggaagcttgtgagttattaatagatttttcaagaaaaggagtgttgcccaatagctatgactattttggtctggttgaggttctttgtagaaaaggatgttcagaaagagctatagaggtcatgaatgagctttggaggagaggaaattgtccaagtttgattgcttgtaccactttgatagacggtttaagaaaggcaacaaaatccgatgaagctttcagattaatggaaaagatgctaaacgagagtgtggttccggatagattgacttttaattgtcttcttcaagatctctgcaatatgggaagaactgtggaagctgacaagttaagattgttggctaccagcaaaggcttggatccagattgtacagcctataatattttggtatttgggtacacaagagaaaagaaaagaaaggaaggtgaaaaggtggtggatgagatgttggataggggttttattcctgacatagcttcttataatctattaatggatatgcttgctaaggcaagtcctccattgaaacaccatgttcatattgggtgaaaacatggggattttgtgctttccctaatgtttgttgctcaatgatgattttgtcagtagtttttaggacactgaagtgtatacagttaagagtttgttgctcagtgacagagtcacagaagagaaaataaagtaatttgtatactcatttttaatttttttttattctttgatactacttacaatgataatttatgaactttgttgagcttaaagacgatccatagtattatcatgaagctttattgtagttttattagagcttctacattgtggatgggataatacatgcatattctaaagtagaaggattaattagtaataggttaccaatttgaattatgtcacaacattcaaatttcacttcagataactgttcataaaaatcaataaaacgactttaaaaattaaaaatgctcaaaatccacattggagtatgacacacggatcacaaatgacatgatacatattagaatttaggataaggtgaatgaagttctatctcaaaactaattgacaatgagaggagtaattcatttctcttatatattctattattccgcttaagcattgggcagcttggaagttggaacattacacaatatctcttttttttttctttttt

SEQ ID NO: 378064 - DNA, 925 bp, Cannabis indica
aaaaaaaaaaagaaaatagttaaactcgggcggctgcttattctgaatcatgtgatgatggctatagaatcatatggtttctttattaataatattataacttagggaatcctaagttgcataatgaattaatattattaattagcttaatttcaatgccttatgaacttacccataaatacgataaaatcatgaatcagcatgttatgaactcatcctattttccattcaaaaaaaaattccattaattacggaagagaataattgacattcattcacacattaatatctaatatatagtctgtctcttccatatcataaaaagataaaaaaaaaaatgtggacaccaaaattgacacgtacgatgtaaacacgagtactaaatttaattcataggtgccttataactagtttatgggcggcgcattttagtagaaaaggttcactgatctttataaaatcgtgcaatgtaaggcagttgtgaaaaataataaataaaagcatggtagtgataatttaatcaattaaaaaagcaaaagaaagattgtaatgaagtggagatgatgttactggtttttggaactttaagaaaaaaaagcggaaaccgcgtctttgaatagttcatccacgtacgtgtgaggtacacgtggatccctttcttttaagattttgaggtacgtttgtctgcctggtaccgagattttctgcgctaaatttcatttcatttttgctttttgagctcactaatccttgtgaactccggtgactaggattaggataactatttcatcaaagctaaatatagattagaggaatgttaattacaattcttattacaattttttaatcaatctttacgtttaaattacatgccgaaatattacttttttatttttttatagtggtattcgttatagttacagta

SEQ ID NO: 378065 - DNA, 5955 bp, Cannabis indica
tttttggaaattcttaatgaaatagctgatcattaattctcgacgtccttttttttttcagtaatgatatggcccttggaatagatggggatgatttgcctagaccgaggcgttattttcctgtgtgagtacacacttaccttttttattgtcttggtggactcatgaagatgttaaaattattttagcaccttgatctatttgttattgatccttattttcaccagtttatcacttacatttgcacttttgattgcttttgtactcactaataaatatattatttttcagttttgctttgtgaaagtttatcactttgtgtctctagatgcttaagttttttaaatgttgaatagttaaggtatctttgctttcacaaccaaaaacaacaattaagatatttctacgttagataattagtcaagtgattttataagtgaatgatgatccttggaaattgggtaaggaaaggaaaattttgataatatatatctagagagagatagggagggagggaggtgagaggttttagcctatctattaattcagtacagagaagaaaatagaagatgaagatgaaaatggtactggtattactgacttccccaggaatttgagagcctggtccttacacttagcaaaaccttttctaaaccctcccaaacaagctacacattatttaaatcccacaacccagctgtctactgtgagactaagccacacacacccaaccacaactcccaaaacaacttacacagctaattaattccttttagcttccccatctttaagtttcatatccctcttcctggtatacacgtaagtgacaagtggcttgaagtttcaccttgtcctcaaggtggaagtgagtaaattgatcttgaatggcggagaagtcttcccatgtagcttcaaagtcggagtggtttttccatttaatcaaagcttgaggacttgtcttgtgagtgtctgggcgaatagctagcagcgtttttggttcaagcaacctttcaagatcagaattgagatctgggggaaggggagaggcttgttgatggggacctaaagcagctcgaagtaaggatacatgaaacaccaggtggatcatggattctggaggtaactgaagccgataggttgctggaccaatgcgagcagtgaccggaaatggaggactgagcttcacataaacttggtcaccaacctcaaaattgacatctcgatgcttacagtctgcctgagtcgtcattcgttgctgggtgcgaagaagattttgttttagcaaagtcaatatgtcatctttgtcaaggaggacttgtttggagataagcgagtactagagggctcaaaacagagtaatggtggtggacatgacggtataaaacccggaaatgagtcgtactaatggatgtgtggtgagaagtgttataccaaaacgcagcccatggtaaccacttgacccacttgttgggtttgaagctaacaaagcatcgaaggtaggtttttaggcatcgattgatctcctccgtttgcccatcggtttgaggatgatagggcagtgctgtgctttaaggaagtgccttgcaaatgaaataattccttccaaaacaagcttaaaaattgtccttgtctgacacaatggagcgaggaaacccgtggagtttcatcacttatttcacaaatgttgctgctacggtaacagttgagaaagggtggcgaagaggaataaagtgtccatatttggtgagttgatcgaccaccacaaagattgaatcaaacccattggaaagaggcaatccctctatgaaatccatagaaatgttgtcccaaacttgctcaggattgggaagaggttgaagcagccttgctagagattgagctaagtatttgttttgttgacacatagaacattcagccaaaaacttttgggcatccttgcacattatgagccagtaaaactcaaaagctaacctttgagaagtcttgaaaacctcggaatgaccccccattttgctgctgtgatattcttccaataacaagggaatggtgggggaagtggttggtaacaccaaacgaccccggaatttgaggcagccatgagtcaaagagaaacccccaccatcttgtcctagagagatcttcgtaataatctaagccaagtcggggtcagcggcaacttgagcatgtaaatggggaatggataagacattgggaaccgaaatggcagccatagatacgcaagctctgaaacccgagagagagcatcaactgctctatttttcgatcctggtttcttttgaatatcaaaatcataacccaaaagtttagtgagccacttttggtgttccataaagaccaagaactaagaactttctgccaagcaaataagggcgccatttttggattgcaaggacaatggccatcaactcactttcataaactgattttgattgagcccgaggagataaggtgcaactaaaataggcaaggggccttttgtgttgcataatttcacccaatcccacaccagacgcacccgtttcaagaacaaagagagctgagaagtctggcaaggctaatacgggaactgtgcacatagcttgctttaagtgttcaaaggcactttgagcttcttgggaccataagaatgcatcttttttgagctggtcagtaagtggacgagcaatcttccatacccttgaacgaactttcaataatagctagtgagacccaaaaaaacctctcaattccttgatagtagatggaactagccgctgaagcattgctgaaattttacttggatcgacggacaccccttttgccgagatcacatggcccaaatattcatcttgtggctgagcaaaaatacacatttttccggttggcatacaattggtgttgctggagttgttctaggtccgtttcgaggggagcaagatgggcttctaaagttggactgtacacaagaatattgtcaaaaaagactaatatacaagaaccacgaaaatcacggaatacctcattcataagagtttggaaggtggttggggtgttggtgagatcaaaaggcataacctagaattcatagtgcccttcgtgtgtacagaaggccgtcttttcaatgtcgttggctgccattcgattctgatgattacccgacttcaaatggactttgagaatatactggcaccatgtagctcatcgagtagctcatcaatgactggaatggggaatttatcggcaagtcgctcgattgagagcccgataatcaacacaaaacctccaacttccatcttttttttgccaatgagacaaggctggagaaagggcttttactcgactgtgctattcccactcgaagcatttcgcggaccattttttttcaatctcaactttttgaatttgagcataatgataggggcggacggagatgggttcggtgcctggttttaatgtgatggtatggtcttgaaaccgctgtggtggaaacccaagtggcttctcaaacaccttctagtactagtctaaaagttgagtgatagggtagaaattggtggttgttcgccaaccttggtggttaaagcaccaaacggaacctaataagcctcagaccccttctctaccgttagcatcacagtttctagagaaataggagacttacacaaactgaggtctccctgtaaagtgatccatgaatccgccatttcaaatttcataaccatcgttttccaattgtcgtgcatattacccaatgtctccaaccatttgatacccaatattacgtttgcaccacctaattctagttgaagaaaattagtgatgactacgcggggtaagtgattattgatatccgattgcaggaaaggctcgacgaagggagggagatgcagatctagcttcacattagcacaaattccttcagttttgaccttgccaccggttccgagaagtatcccgtagcaagtggttgccgatatcagaatgcccacggtcgtaacaacctccatggaaacaaagttatgggtggccctactatctatcaacacctttacgggcgtctttgctgttgtgatttcgatgagggagttcaatgagagagtagcaagtgctcttcggtggccactgtttcattggaatctggtgaaggaggtgaatcttctttcggagattcagactcttcttcgtcagtggtaagtagaatttggagcaatttttgctcacattctttgcttggacaaaccttttgtcacatttgaagaaaaggcctcgtgacctcttctcttggtactcgacctccattagctgcttataagatgtggcggcttaggatcgaatactgatagccttcaacgccgacgatgccatggaacccactgaaggagaggatccagttggagagattggctaaaaatttcgtgacggagatggagtgtagttggtaagagcaggtgatattggcccaaaattatgtcttaacgtgttgggcttagcattgggcccagggtcatcaagtgatggccctcttcggtacgctgggccgtttccacgatttgggccaagtcttggggttgcaaaatgtgtagcgttgccttaatttcatctttgagtccttgaacgaaacacccctccaaaagatgatcgggcacatgtgggacctaagaattaaatcctcccattgaacacatagtccttaacagtggtggtctgaaccaccgaggacgtgattgggcagcgctagttctcccattggaaccacgacaaggcatcaccgtcgaggccaactatggttgtatcgaaaatcatcgatacagtcattttcgtaatcaaaaagtaccactcagtgcgatatgtccaaccgtcgggtgttgtgacaattaatatatgcaagtgcacacaatcgtcaaataagtaataaagtgataaatcaagtatcgtttccacaagaattgaaaattgaaaattaattcacaaaaactaattactcacaaattggtttcaacaaaaataaaatgaagtgatgagattatgtaaaaaaaaacaaagaacacaaactataagaagaaaacaagctagaattattatatatgttgggccgtttccatgatatgggccaagtcttggggttgcaaaatgtgtagggttgccttaatttcatctttgagcccttggacaaaacaccctttcaaaagacgatcaggcacatctgggtaccgagaagctaaaacctcccattgaacccaagtccttaacagtggtggtctgaaccaccgaaagtagctctttcgacaacgaacccattggaatcgcgcgaaattgaagaagcaccatgtgcttaagcattgcccaggacgtgattgggcagcgctggttctcccattggaatcacgacaaggcatcaccatcaaggccaactattgtcatatcgaacatcatcgattcaggcattttcgtaatcaaaagtaccattgtgcgatatatccatccgtcgggtgttgtgaaaattaatatacgcaagtgcacgcaatcgtcaaataagtaataaagtgataaatcgagtatcgtctccacagggattggaaattaattcacaggaactaattattcacaaattttcaacaaaataaaataaagcgatgagaatatgtaaaaaaaaaacaaagaacacaaactatgagaagaaaacaaggtagaattattgtaattgcgtaaaaatgcaaagttgatagaataatgcaaatgagtattattgtaaattgataatgtcaactaggaatttagaatgtcataatcttcttttcaaagtatttatgttataattctataaattaattaacatattcctaagctcaattaatgtcaagaatctcaatttaagcacaattttctaagtcatacaaggtaaataacatattcctatgccatttacaaatcacatttaaccaatatgataatcat

SEQ ID NO: 378066 - DNA, 4995 bp, Cannabis indica
taataataaaaaacaatgaaaagaatgaatgctaagcttaccagatgatacattaattttttgtggaaccatagcctctttgctatattcaagcgatgcccagtgaatgttgtcggctttagaaagacgaacttcgactttagttgacaacacctggtatctgcacttttctggtatgatctgttttacagtcaatatatctatatcaggaaaatagaagatgaagagcaaagtagagcacaatacgatattatttgcatttgaattagagtcctaaaatgtagtactcggtaaacgcataatgagttatctttaaatatataaccaattcaaacttcaagggcagacccactttgaaatcctatctttaaacttctccatttacgaaagtaacatttaagacaaatcattaaacattgtgtgtcttccatcacttcagacaaggaataaataaaatttataactgagcaaatgtaataccttcccaaacaatcgagactggaaatgataagcatcttcaccaggaatttctatagcaacacttagctgcaaagcaaaatgtcagcaactaaatcatatcaattcagggaacatttatagaaaaaactttgggaggatcaaaataacttacaatctgttctccgaattccacagcaacatttcttgctggtatgccttttgcaaatattgtcacaacaacttcatctggcttctggtagaactcatgtctgtttgacaaaacattgttagataacaatatatttgagaaataattttgtgaaactaaaaatgaaccatgcctgtggaaagacctgattcgaaaacagctgtaactgtctttatttcattagataggaggattgggatagttattactcgattcaaatttgtgtgtttcctgttttgatatttgatttgtttcattcattaggatttagacatcaacaatatttttgcaataaaagatattctatgtgtgtacatctctagtatcagagcgttacctaaaccttatacaatgacaagtggcggagcgttacatttaaattttaagtaaaaattcaagtagaaacctaaactttgttcgcttttaaccatgacaaaatatggtaggtccaccgacacgtagacttcagaaacaaagaatatttctataactatatgatgctcaacaccacatgatgtggcattgtaggttttgttgaattaaaatcacgtagaaaagagaccgaggacacatgtccgtgagtgatcatggcccaaatttattagacaacctcacttatggcggaggtaaaccatattaaattcaatcactcctaagatatcaatactctatccaaaaccaccattaactacataatttgttacaacaagcatgctttgactcaagcaatcatggtgcttcaaatggttgagccctacctattaggtcaaaatttgaataggcgaaaaattgcattcagtggtcagactgtgcgatagtgttcattagtggtcgtagcaagaacgattatctcacgggagcattcactcaactcaccaaacgtgaggaggagaatcaaaaggcaagggaaagtgtggacatcaagcctctattaaagaaaaactatcaaaaaggcaagtagaactttgaaattgagcctatggaagaagtgattaaaatccacgatcttggtttgattgctttaataagcacgaccaaatttggttattctcaatgtcaaatgaatcgtaccttataaaacaatctcttacaaggaaacaaatcattatggtatataaggttgatatcattgtgacatgagattatgaagaaataagacaattaagtcatttgctcaatggtttaaagttaaaaaactaagagacctcaaatatttcctaggaatggaagttgcttggtcaaagaaaggaatcgggtctcccaaaaagctagtaaaggataaaggcatgctcgtgtgaaaaatgagtgatagtcatatgtaatacactacaaagttgggaaccgttaaagaggtgctcttgttgaaaaagaacaatatagaagacataattttcacaacgttaaagaggtgacatccaattgaagaatacttggaggttatgtatcgaattctaggtaaccaagaaatgattccaaagtgaggattgtactttaaagagactttaaaatagaactgtaaagatgttttatgatggtagctcaacaagatctttatttgcgaagatcaacttcgggatattgcatacatgcataggagaatcctacacggcgaaacaagaagcaatttgttgtagctggaagctatgactcaaggaatatgtgaaggaatgtgatccaagaccgtctttaagaactattaattgctttagaataacctatgaacatgttgtatgacagtttaaaagctataaatctcaaagaatcaccaatttatcaaaaagaagaaagaagaatctcattggtacatgttccaactacctcccgatcaacaaatatcctcaccaatgctcttccaatgatgaattttaaaaatttaagatctaaactaaatatgattgatatttacaactcgacataaagagaagtgtggaaagatcgaatttacagttacagtaacaattgtaaccgtaaccgtgtcttattctatttcctaagaaggatttggtagttattacctaattctaagctatgtccttgttttgtaatttgagtcatttcatttactatgatttagacatttccttttacattttcgcagtagtccgattgtgtatagctatagactttcagcatagttaatcaataataaaaagaaggtattctctttgattgttcatctctctcactgttggattcaatgtactttaataacttaaatctggtctgtttgtagaagctgccatgtttcactgttaataaaaaagtacataatacacatcaatattttcccgtgaaatcataacataccagcaatcaaagcatcatttaccaagctaaaataggaacagatacaacacagatgtttaactttttatacagtcaacaaaaattccaaactttatcgactattttaaaacttgagcgaaccaaaaggaaagttgtaagataaacaaagaatgtggcagtaacctgaattttggctttgaagtcatgccaacctgattcggcaaagtacacctttctttagaatctcccaaagattcaacggacacatttgtagtacttgcttgcccatttggtgttgactgtttctttagagccatggtttcctctgaggaaacatccaaaattcatatcaatacaacacaagaagcagaaggaaaactcaaacaggtaaaaaatagtattttccaaagtcaaagaaactaaaagtaaaacctattaattgttaacacataacccagaatgtgtgctaatttaaaatgtttaatctgatgaaaaaaagtgaaacatgttatacacacacatggaaggtacatcagtaaagattgtactttacttcaaaattttataatgcaagtttattatataccaaaaaccaagaagggaagtgatgttccaagctaaaagaataaatgacatctacaaattaagcagagaatcaaaaaccagcattcaaatgactgcaagtgaactgaaatgtttgttgcagaggaaatcctaacagttacaatacctgcaatttgctgatcacattcactgatcaatttggcgaatcttgaatcgctttgggccaaggaggcaccaatttcaagtgcagcctttgcagtatgatattcttcaagtttcacgcatgcaatgctgcattaagaagcaatgcctcaagtcaacgattcaaataaacacatttctcagacaataagatttcaacatcaccaatacacatcctttacaagagcgcactgtaacttaacactagctcaagtgattgtgtgggtgagtgtatacatgtggtgcagagttaaaagtcttaagaacaagaataaaaaagcatatgatacacacataatttacaaagtaaaagatcatgatgaagtaattaacttcataaatcaaacttcacaaataagacgaaaattagtccaaacaatgaataatatgtaaatccctttttccccaaattcaaatcttcaccaaacaatgacaaaatttttttaaaaaaacatacagaccctttacgaagataagctttaaccagtgaccggtccagttcaattgccttattagcgtccccaacagcctctgtttgaaaaattcattactcaaaaaaagttaaaaacaaaaaacagtagcaaaaatcctcagcgaaactaataaatactcaaaatacataaatacaaatacacacaaacataaagatatgttttcatatatacatataaaaaaaacgaatctattcgctcatcgcactttctaccaactgataacaacacaaactcagtttaattttcactttgcatgaaaaagataaagagtaccagtgaagttgccgagcttgatattagcttgagcacgctcagcaaaaagatctgcatttcgagggtttaatttgatggattgagtataaagatcaacagcgagttcaaaattgtcgtcaacgaatgcttctctagccatttcggctaggttagtggccattgtaagtgctcagatagtgttctgagaaacctagttaaggggaaagaggaagaagaagaagaaaacggctaattgggtttttgggggttacgaatggagacaatgttgccttgacactgaagataagactaaaaaatagtttcgatttggagggaatctgactctgttcacctcttcttttagtctccatttgtggcccaactccataatgatttgtgggctttgtatggcctgcttcaggatttctggcccaattacctttttgggctgcaatatgcccatttaccaaaaaaaaataagtcgaggaatacctcttttttgtatctgaaaaatacttttatattatattt

SEQ ID NO: 378067 - DNA, 3037 bp, Cannabis indica
attttttatttatttttagatttggacatgtttataacactctccagacgcgtcttacaaaaactttgctcaatgcatttttggacccaaaacgggcattgactcagcattatggtgcaattcaagggctaacagctataggacccaatgtggtattttctcacgctctttgcaacttcgaaagaaaagttcatttgtttggtgtataattatgtatatatttaatctcttcttggttaaaattgctctgtatgtttaaatattcatcttgatgcattttgaagccccaattaaactgctactctttcgtaactttggccagtaactgcttatctgagataaattaggagaatgaagaaaactaagggagattataggtggttttttgaaagatagacaaatatgattccgattgtttcttcctagcaagaataggtttttggaatgtgaaagtttttttaaagacagcgtttggttgaaaggaatgagaatataggattatgaatgagaatgaaatagaattaaatgtaaaacgcaaaaaaattattaatattttttttcatcttgtattagaatgatctttccttacatcattccactccaaccaaacgccacctaagtaagtagcttgaattaaataccaccaatctgtccttgcagacctggttccttcactttaaattgttattgaagtcagaaagatgggaataatgaggtggcttctttggctggttttagtatttttttcccggtccatttccactcttcgattctcaacaattctatcaaattgttgtagtttttggggaattttgaccccctttttcaattttattattaattggacccgattcactttatttttctatccctgtttctagattggctattggtcaattatattttatttgaaattctgatgcatttcatgtcttcccttttatgtgattttgagctgtttgagttactctacaatcaggttcgacttcttatgctgccaaatcttgagccatatcttcggcttcttgaaccagagttacttctagagaaacaaaagaatgagatgaagagatatgaagcatggcgggtttatggagccttgctggtgagatctcctctgtagctgtgatttagtatgcaaaatttccaaaagcgaaaactaacaagaaatacacttttcagcatgcagcaggtcattgtatttatgatcgccttaagatatttccgtcgttgcattctcctgctgcccgtgctgtctggagagaaaatgcaagagtttttaccatcacgccaacgccaagtaaggtttctttgactttatgttcttggagatttcatatatatttttatagggatatttacagtataaaataccttattaaataactaaaagtaaaataaaaacttgttttttttttgacttttatttcttaatccaattcaattatatttctcaaatacaatatgaccagtcagtacatgttaaaattgtttctcaaatactcgtcatattaagaccagaatctaactgctatttttttaatcatcaagataaacggaaggcaatcatggatgttgtggagcagccgccgcctaagaaaatggctaccgatggccttatttgttcaccgtcattgaattcgtccccatctcacctgcagggtgaaacagctgttatagctaattcaggagaatccaatgaaggtccatcgtcctcagtgcctaatgagattgtttcagacaaaaaaggtcgaaagaatgaggtcaacgggcgacatttaaaaacatcagccatgcttgcacaggtctggaaggatgacttggactctggatctctcctggtaaaattgtttgagctctttggggaaagcatcctttccttcatcccagctcccgaaatgtctttgtttctgtaaccacacatggttttatatttttaggcttagctatacagattcttttgtagataagagttatggagatttcaaggacctacatttctgtctgtaactctaaatttttgttacaactttttcaatgaaaatcatattttccataggaatcacttttaacaattacacccaggaaagacagccagttgttcacttctatcaatcttccccaactaaatcacttggtggagatgcccaatattgataaaatttggctatggtattacgattcgggcaatggaatatgaacaataaagtaaaatacttaatcgatttgtatatgaatttcattacttcattttgttatgctgtatcctgtatgtgaagactgaagaggcttgattcattgactcattttttttatttattttgggaaatgatagaaaataatcaatggaggccaagttgaatcttggacatgtgtaaacttctcttgctacaatccagacattcatgatcgcttttgtgcagaattagtcaaaacgtgccttaccagatttttgttctcatttcttttactgtgaacttgcattactgattgtttgtatttgacattcttttaccattttggatacttggaaggcctttcaaactagaccagtaattccctgctgctcttggccagctaattaaattgagaatgcattgagatctgttaatgagcaatgcaagaagatacttggcaacaaacaactgcagttgttaatagttatcttgcctgatttttctggtgcatatggtgagcaacacaaccatgacttgtaactatgatgtttgaaatgcaattttcttaacatttagttttagctaaataaatgttacttgcctcttcttgcagggatgataaaacgagtttgtgaaactgatcttggaattgtttcacaatattgtgagcctaaacaagttgtaaagctcaataggcagtatttggagaatttatccctcaagattaataataaggtttaggtaatttgagcctattctgacatttacctatagtttaagttttcctaaccaattaacttttaaatcatgcataaaaaatcaaaattttcaaaaaaataagggataagttgagaaatacc

SEQ ID NO: 378068 - DNA, 3893 bp, Cannabis indica
aaaaaagaaacaaaaaatggaccgaatcctattaatctagagttaataaaccaccaaactctatgattggttcaatatttttggacaactaatagggacatataattgagcactataattattatacaccatatacttaattttatttatttttaacaaaaccctacatactttattggtatatatgaaaattgattttgatttcacttatttacatttaaattaatgaattatgtgaaatttgttagttaattagaccaatgataatatacttgtgggaggttgagaattattatgtcttagtatctgtcaccaatataagttagttagtatattgatgtaattttacatattttaatttaataattgttataaaaaattattaacactatctcaaatctcctaataataatattggattgaattggtatcttgctcaaactaataataatatttcccttgataaggaaaaaagaattaaatggaaattattggaggtacctttgaaaaataagtgtattgaacattcatttatattttcgacatttgagtattataattttattatatatacactgtaaatatttagcatattctttaaacttttggagaaatttaaaataatttttaatattaaaataaaatttaaatagtccgtattatatacacatatgaaacataccattaaaactttatattttgtatggtaaattattcaaaaatatgtagaatattttaaaataatgtatatcattatatacatcaagcgattttatgcaataaaggtatttttctttactttattcaaaggttcaaagcttaccacatatcttcatgagagggattatatttgatcttttgggaggttagcttgtcgtgacaatatcatctttattatgaagggaaccctcgaagtgcatatcgatgaccaaattaagagagaatgaagtataaagtctcaatattatctaagttatcaaagggatagagaaagaatctgcatcacacaattttttttttcaagcaaacaaaaatacactcatatccttgcctaggttgatcaaacttgtataatcaaagatattttttacttattgtaattattttaataatattttttttatgtattgttctaggattgataatagtgtgacccataatttagcgaagtcaatactgtctttgaatgatcattatatttggttttcttatcactttgattgtattgctgttgctgttttacaaacaaattcttatgattaatgatattgtctgacactctttttcctcttaaagtttctcccgttgaatttactcttgaggctttaattagaccgttttttctataataaaaactaattttaaaaaattgtttacgattcttataaaaatacataagtaacaaaaaaaaaattaatcgtaaaaaatttaaagatgtttttacaatgcaccccttaaaagatatgccaatgtactcccaatctgtttcaacatttgagagaatttttcacgctaattttatggttttctactttatagttattttagacattttttttaaattttgagagattaaaagtatttaaccgaaaacatagttcaaacactctgttacacgcgagactctttcatttttttgaatttcttaaagatgtcctaaataaatacaatcaaaaaaattaatttttttttgtaaataccgaaataaatagaaattcttcgatgaatttattttatggttgtagaattttttaaaatttaattaattgtgaaagtgtaaccgaaaattaaacttttatatcttcacctcaaatttctcaaaaaataattaataatattattttgttgtgagtaagttggttttgattttggtttgtgtaaaaaagagagaagactgtcctttcagtccctcgacgagtccgccactcttcgcctataatctccccaaaggacaagaactcctcttccttatatctaaatctcccaaagcttcaaactttacacccacccacatacccacctaccttccttcttcttcttccttcctcatccaccaaacccatctccattttcatccatggaagcttcaacagccctttcacgcataggcttagcaggtctagcagtcatgggtcagaacttggctctcaacatcgctgacaaaggtttcccaatctcagtctacaatcgtacaacttccaaagtcgatgaaaccatcgatcgtgctcagcaagaaggtaatctcccactcttgggtcagtacaatcctcgtgattttgttctttcaattcaaagacctagatctgttattattcttgttaaggctggtgctcctgtggaccagactatagctgctttgtctgaccatatggagcctggggatgctataattgatggtggtaatgagtggtatgagaatactgagaggagaattaaagaggtgaatgaaaaagggattctttatcttggtatgggggtttcaggtggtgaagagggagctcgtaatggaccttctcttatgcctggtgggtctcatcaggcttatttgaatgttcaagatattcttcataaggttgcagctcaagttgaggatggtccttgtgttacatatattggtgaaggtggttctggtaattttgttaaaatggttcataatgggattgagtatggtgacatgcaattgatttctgaggcttatgatgtgttgaagaatgttgggggtttgtcaaattctgaacttgctgagatttttgctgagtggaatagaggtgagcttgagagttttcttgttgagattactgctgatatttttaaggttaaggatgatggaggtgatggtgaattggttgataagattttggataagactggtatgaaaggtactggaaaatggactgttcaacaggctgctgagttgtctgtggctgctcctacgattgctgcttctttggattgtaggtatttgagtgggttgaaggaggagagagagaatgctgctaaggctttgaaagaagctggtttgaaagaggaaactgggtctgttgttatgactggtgttgataagaagaggcttattgatgatgttaggcaagctttgtatgcttctaagatttgtagttatgctcaagggatgaatttgttgagggctaagagtaatgagaaaggttggaatttgaacatgggagagttagctaggatttggaaaggtggttgtatcataagggctgtgtttttggataggattaagcaggcttatgtgaggaatcctaatcttgctagcttagttgttgacccggatttcgctagagagatggttcagcgccaagctgcgtggaggagagttgttgggttggctatatcggctggcattagcactcctggaatgtgtgctagtctttcctatttcgatacctacaggcgttccaggcttcctgcgaatcttgttcaggctcagagagacttgtttggtgctcatacctacgagcgaattgatcgaccgggtgcattccataccgagtggacaaagcttgctagaaagactgatgctggtgttggggcttttaactaagttttccatgtaatttggctagttgttgtctgtctctatttcgattcggcattggttatgttggaaaatgaatttgagttgtatctgttttaggcatagcatagctatcattgttagccttgaaatttccttattttcttcaatcttaataagaagtgcatgcctttcaatgagccaaaggtttccctttattttttctttaactttttttgtttgatccaaactttctgttttcaatggattttatgatgttggtataagaattggagtgaagtacaaaggactaagtttcttgtagtgttcacaagactagttctctctctct

SEQ ID NO: 378069 - DNA, 4989 bp, Cannabis indica
cccgaaggatgcaaaaaatatagaatatcaagtgatatcgtaggcaaagtatatggtttgtttgattgtttcacagtgtgaacgtaaacatgcactcatctgagtcggaaaatgcaaactgcagaagattttggtttggataatggcatttccgatggtgaaatttttacatctgtgctgcttatagaacccattattaaaccatacttttagttttaatcgcttcacacatttacagtatgttatgtatggttgttggagtaactacattgaattgacatgaaattttattttacttcaggttctgattcaagattaaggctgtgggacgttgaatctggtcgcaatacactagtgaacttcgaaactgtacggatgcaaaccagcaagccaatacagttagctacaagtcagaacccatcccttgtttttgttccatgcatgacaactgtgaaggtcatttactacaactgaattttcgattatgcatactgtaagcagtataagaatagtctcgaatactcatttttctgcaaattttatgtttgagttttgaattttggattttcaggcatttgatatgtggtcaggcacgacatccctgacattttgtggtcactatgaatcggtaaactgttgctggttcagttctcaagatcaggtaaaagcttagcattcttaatttaagtttgtttctttatgaagtagaagggacaatgaatcgaatgcatgtttctgatcgtcatgaatcagatcgatgaaatacattatctcagcacacagtattctccattttgagaaagagtagtagaagaaggaggaataagatataagacaaattaagtctgattcctaatttgttgaacaaaatgatatgtttcctccgaaaccttaccagaatattttgcacaatatttccatgcaggagttgtttacaggtggcaatgatagacaaattctcgtctggtcgccgtccagattgcttcctgataaaatggtaccaaacattcaaacaatacttctctattgtttgttctgtatcatagttttataattcattgttaatcgcttagcgaggatcatacaatgatacaattataatgttttggcatggaaatgcaggatgacggacctgttgaggataaggataattggagtgactgacattgctctttgcctctttcaccaaacaaagatcttcatctttgacattcaggcaatttaaaacatcatgcattccagtagaagtgtcatcattgaaattttccattagcatgtgaaaatagacacttcagcttttcaagttttatccttttcctggattttatgtaaatatataaccattctttctatgattccatgcttttttttcttctttttcgccacaagtcatcctagttcttagattaaacatacaactatggtttgtaaagctgaacacttgtaatatagaagttcgattgtgcatttgatatgttgatttatgcattcttctaaatatgattgtccttgtgaaagagtaaaatatgagaggcatgagtttcggttccgttgccttctaatacagatgcacattcatggtaagaacgatatgcatctggttgcctggggataattggaatcaatgaaatgaaccgtgcccttggggttggcaatatgtgtacacagattacacacacttctgtggcaagaaatttaaatcaatcatctttatttgagttgggttagacctataaaaaatgacttactacataagtatgtcaagtttgtgtgtttacatatatcattattctgttggcaaatcttatcaagagggagtctaaaatgtaaggtgcttagggtgaaatatcttaaagtgaaaaaaatttctagccagctttaaatccttggttttagaaatttctagctagaggacccctggttttagaaatgggttgtgatgttgtgcattcaatccctattattagaaatgggggagtggggattttgtgaacatttggaaagatacttgggagacatatctccctaacttccatcctatctccctttcctccatatgacttttgtttgtttttaatatttatgtgtgtacatatcgttacttctattttttttttttagataaatgtattttccatttataatagaaaaggactaaatctaaatacaatttcaaagaagatgagcataggcacaaagccgttacaaacttctaaaactcaaccaaaaaatctaaattgcttatagcaagtatataaataaataaataaaatcttagctagctctcaattaagtaaaatttagaatgcctcacaacaactagaagaaaacaaatgtttatgaggaagaatagtccaactatcaaaatgtcataaactcattttttttagttaggcactaattttgtagcaaactttctctgactctcactctgtatatataccttatttttgggtcaatgaataaactaagtatttcatttctaatatggtaccagtcgcttaaaaatccctctcacgatcgttgccatgactagaacaagagctactggttcaaggaactccgaccaaactcccatgctaaatatttcctcttccgtaccagatgctcctacaaatcctttgatcattcctttggtctctgctgtcatcgaagatattgctattacacagcccaacgtgacaacacgacctgtccatgaagatagctccagtccatacttcttgaattcttgtgaacatcctggcctcaccttagtcactcctctgttatcagacaagaattttcagtcatggcgtcgtgattttgaattcttcattgacgcgcgaaacaagatcgtcttcctcaaaggtaccttaccacaaccaccaatcgacgatccattacatcaccattggctttgatgtaaacatatggtgatgtcctggattctccactccatcacatctgacagtaaaagcagtattatgttcttggacacgactgttgagatgtggaaggaactcaattcgagatacgatcaaggaaaggtcctcacatttttgaactcagggaatttctaatcactctgcatcaaggcgatgattctgtaagttcttattttaccaaacttaaatgtatgtgggatgagatccaagaacttcatccatgcattccatgtacttgtgctgctttcgttgattatatggcgttcttgaatcaagaacaagttcttcaatttctaacaagattaaatgaatctttctatcctgttagagctcaaatcctccttattgatccctttccatccatgtctaaagttttctctatggttatccatgaacaatgacaacgtaaactcaaaactcctcaactcccctctctcattgcttctatccaagattctgctcaaacatcagctcttgctcaaaatctctcattatcagccgctaatgcaaatcaaggacacaataagaggatgaggccttactgcaacaactgtcacaaacatggtcatcttaaagaaaaatgcttctttctcattggatttacactagggtatggagataaaaagaaaactgaaaattactaatcaggcatatgcttttactaatcctctatctcttttggccaacttgactaaaccagaagatatctagactcttatttcactgttgagccaaaagcttcgactcacaacctccaactcagatgcttcacaaccatttgcatcaaatatttttggtaacattacacaaaccacaaactctttatggatagtcgacagtggtgctgctcaccacatatattgtgacatatcactcttttatcgattgcatgacatttccattgctacatctataaaattaccaaatggtttagacattaagatacataaatcaagagatataaaattttccaatcagcttcacttatattatgttctttatgttcctaagttacaattcaatttgtttagtgttcccactttcctccaaacattaacaacaacatattttcactaattcttgttgcattattcaggattcacagaataggaggattggaattgctaaacgtattgatcatctctatttcctgctgcatgattcctcatctactgttcataataaaactatctgcaccaattcttataatagtgctcattcatggcatggtagacttggacatccttctatgtctactacaagttttataaataattattacatttcaaagactctactattctttttccttgttctatatgtcatttagcaaaactattaaaaagttaccctttaattcaaatagcaattttgctaattttgcttttgtctcatccacatggatatttgggatcctttccacattcaaagtgttaaaggattttgttattttctcaccatagtggatggacatagtagattctattggatttatatgttgaaaacaaaatttgatgtacaataatatattcctcagttttatcacttggtgcatacacaatactctaccaatattaaagaaatttgatgtgataatgaaaaagaactgaacgtgaatcattttatgcttaaaagggtatccaaatccacaattcttgtgttgaaacacctcaacaaaacttagtagttagaagaaaataccaacacattttgaatgttgctaaggcattggcttttcaatcatcccttccactggtatattggccctacctaattaacactgttctctatcttatgaacatgactccaacacttctattacaccacaaaatttcttttgaactcttgcacaataagtagcctacttataatcacctaagaacttttggctgccttgcttatgcttcatctcttaccagcaagagacatgaatttttccctcgatcccatgcttgtatatgttgggttttatgccctaaataaaactccatttcaatgtaatccaattttattcaatgtcaataaagaaacagaagtatttttcattcatttgtatgttttg

SEQ ID NO: 378070 - DNA, 3859 bp, Cannabis indica
gggactactgactgtcacacagtattagttcactttcctgttctcttccttaaagccaatttcgaaatccactatacatcatggactttgaatttctcatctctcttttttcattaattttagccaattagatttctaagcgagttgagtgccaacccatactaatcaacatggtactcaaatctttgtggaatatcatgtagaatgttaaatgtcgcctattaaaggaaaagaagatttgagttcaatacttattattactttgcgatagaaaagaacaagtgttagagtactgaacagaagaagtcatttattttgttgccattaatgtaagaaatcttaaactattatgttatttgatcgttttgttaagttcatgttttaggatgttcgattatgtgttatgtccatattttcggccataaatatagacatgacatgtggatattggtctcgaaaaataaggaaggtcattaaatcaaagtaattatccagtctcgggataagtaatagctaacaagaaatattcatctcgcattatgttatacatcgctaacattacaacgataaaaatatgatgcataaagagatggtgtagagaggagtcgtcataccctttaacattcttccacattctaaagtatccgaatggattcttccccatcctcaactccgggtacactgatatattgctggcgtatgatcaaattggccttctgttaagaaaaccactttcgcattttcaaatcttccaatccattcttaattagccattactctatcaatctttgagtgtatcctcatttcgggttcttgcttgtatgaccatgtatagaaagaacttgtatatttgacatctttaagtctacaagcttctacacaatctctaaaggtcgttgacttacttggccttactgttttccccacttgctccttaggagttaggatgtcattaaagtctcccatgatcatccatggattcgacataccaactgccatctcagtccttcataattcctttctcccctcctcatcattaaatgcataaacaaatgtgacaaaaaaattttttgctgtcttgccggccacgccttcaaatgtatcatttgactagtacatagtaaaatattcaccaaaaacatagctgggttccagcttattattattcttcctcccttgtgccaatgattatttgttaagaaacaccaacccgaaaaaatgttactataaattttacccatgtttttactcttcattctagtttcaaaaatcccaaccaaacccatttgcattcttaagatcaatttcttaacctcaaatttcttattctgtttgttgagccccttcacattctaacttagaattctatccatgaagtataggaggaacgatccccctccagtgtcatctatatttccctgtcctttttaaacattctctttgcccctcaatatcctttccattatctatttcttcatcttggtcaatctctagaggtgtcaaaaattgaaaagaattagctatctctgcaatcggttctacaaatttagctaccttcccccttttaaccactttttgaaatccctcatggtccaccacttcctttagtgcatcttcccttttatcccctaccgttttctctacttcattccctaatctctttggaaacctacatcttcttagtcttatccttcttcctgcaaaccgaagtataatgccccatccctaaacaattgccacatacaattggcaaccattcgtacttcactacaacatctacagtgatatctcattggtgaaagagatcaagtcaagaaactcttagagtagttgaacctccaacaatattcttggaaagtttagtcttgctttgttcttagtaacctcatccaccataatcgggttaccaagttgttcaacaatcttgaacaatgacttctctccccaataccttaaatctagcccatggagttggatccaagtgaggaccttattaacatcatccttcttgtactcttgataaggttcccaagacctcatgataattggcttcttatcaaagaaaagaaagccaccattgagaatctcgtccctagtgtttaatgcctgaaaacgaataataaacacctctggtttgaggactcccactttatcaatacctttatctttccatattcttctagaaaaaccttcaaagggactaagtggaggattgacccccaacacatatcacaccatggctgatttccaatagaggatttcatcgtcaacgtcttccaaatcaatcttgactatcggtttcttagcaggcatagcagactcctcaaaatttctaataacatttgaatgtaaaatttggggggattgagtcttacgtgataacaatttgctttcacatctttttgaggttgccagaaaactagcgaagtcagacctgatgtcttgctgcactagttgagctatcgattcccttggcgacaatacctctgcaacatcatctattgtttgcaatcgcgtctcttcctcctccaaatccccttgcctatattccttaaaatcgtagtccgaaattgagagagcttgaaaactaattacaactgccatcgacttagttttgagaactaagtcagagtctgatggccctattttcttattcatcgcagccttccttttcccagaaacacctctattctcagttgtcttgctagtttcatgagaagcccactttcttgggcgacctcgtcctgccatagctctagttcgagaactgagatgatgccctagcagagctcctccattactccataaaacttttgttttgctttctaatgttctttgggaagaattagaatcctcagtagttggccatgccaattggtcagtctacgctaactgcttggatgcttggtcgacgtcaatgttggactgtcctagctgattcaataattctaacatagtatattgcacttctctatctccttaatcatatgaccagcttcattctccatatcaaacaacatgcgctaaccagctatccactttcttgccacatactgctctctaccttgccacgtcacttggggcgatttttgggataacaatcatcttccattactactagaaaaataggatttctttttggtttttaagttggtttatcttcggttaaaaaatttcttgctaccgaagaccattgaggcaaatatataggtccccaaaacaccgaagacgtatgggggacctatgtcttcagttaataacaaaagatataggtggcatatgtcttctatttcataataaccgaagacgtatgtaattttttttttaaaaatgatatttataccctaaacataagccactattaacactgccaccgctgagccccaaacctacgaaaccctaaaataaaaatccttaaacaaaattatttttcaatcaccaccgtttaacactaccatattttcgagcatcgccattaatttcgcaacaaaattattaattgtacataaataaatttataaactatgtgtatatattttattaagatataattattcttatatggaagtatattttcttaatacgagacttagaaaatgtataactaattacaatttagaggttattctgatttataactagcgtgaattgagacttaattttttcataacaaattagaagttatttttgaatagagtattcttagatagatgtactgtaaatatatttattttgaaaaatacaaaaagttaagtagagtgtgtgtgtcctatgggcttgtatgagtgtagtgggatttatttattttttgttaaataaaaaaattacatggattgaaatattagaatatttctaatta

SEQ ID NO: 378071 - DNA, 3199 bp, Cannabis indica
tggtgtttttgaggggagtttataaggtttgattgtattgcataatgtagttccatctgggtttgaaacataatagtgatttgaaagtaattttgacttttttctgggaaacctttacagctttatattgggaaaggtgttaaggaaagttgatactagataaactctgcagtgagtgtttgtgtttctcaagtttttctttgccagcaataaaattgaagtgtatttggatatcatctacaatttattgtttttttttttggatcatcccttctaaaagtatgtttctagattcaagaacaattattgggaccctttggttgaagcagatgatatttttaaaggttactgaaaactattttgactttgttctttggtcattgtaaatttattcaaagatttttatttcttttctattgacaatttttaattaccatgccggtactgatattctgtgattatctgtaatttctttcaggctttctgcttccatgctgataaagagttaatgagagaacctcgagtagttagggttggtcttattcaaaactctatagttcttccgactactgcctcatttttagaccaaaagagagccatctttcaaaagttaaagttgataatcgatgctgctggtgcttctggagtaaacatattatgcttacaagtaggtcataccatcatttgactttgtagtgaaaaaaatattttttttgatattctatattattctagaaaaagtacatgaactcctattagcttaattcaggaggcttggatgatgccctttgccttttgtacacgggagaagagatggtgtgagtttgccgaacctattgatggggaatcaacccaatttcttcaagttcttgccagaaaatacaacatggttattgtgagtcctattcttgagagagatattaatcatggagagactatttggaatacagctgtcataattggcaatcatggcaacataattggcaagcataggaaggtaaacatagtgaagttcatctacgtttgactacttttaggattttgcattctttcatagtttaatcaatatcaaaataccattgaacagaaccacataccaagagttggagacttcaatgagagcacatattacatggaaggatctactggacatcctgtgtttgaaactgcttatgggaagattgctgtaaatatatgctatgggaggcaccatcctttgaattggttatcttttggcttgaatggtgcagagattgtcttcaatccttcagctactgttggtgaactaagtgaaccgatgtggcccattgaggttaatttccttaactaaatttctctttgtgtggtattttccccttataaaaccaggacccaaaattgtggacgacaatgagaacggttctgttcaagagtgatcgactgggagacctcccagtcgaactgccagggccaaaaattgggaggtctccctttgagtccaactttcagtcttaaactaaattttatagaagttgcaggggcatattgtgccatttggagaatttctggatgtggcttcaatactgatagtagcattttgttaactcaagggtctgattgtgtgatcttttgctttctttgtgatttatttttagttcttaggtcatggtaggtgctgaattttgctgcctatctttcttccattttctttaggttttgatagcttcttcaattgttttcctttcaagttttctccatttcctaataatcaagcattgtcaaatgtctagtactatcacattggaggactacaaaccttacaactgttatttctcaaacacttcaaaccattcatcaagttcagattaatttcttcttaatatttactataaaaatctgaatgattttcttttataattttgatgagataaaaactgcaaatgaaatcatctcatgccttataattcacatatctacatttggacatgcatgtgtgtggttatcaatgaaccatattagttatttcccaacactagaattggacagctttgatgttgtcaaattcactgattttctctatgagaatttattttttatatttcaatgtatatactatgttcagtagttatctatatcccgctctagttttccttatttatgtaacttcattatagattaatatgatatctgatgatgttataggcccgtaatgctgcaatagcaaacagttactttgttgggtcaatcaaccgtgttgggactgaaacattccccaatccgttcacttcgggtgatgggaagccacaacatgctgacttcgggcacttctatggttccagttatttctcagctccagatgcttcatgcagtccatctctttcacgctgtagagacgggttattaatctcggacatggacctgaacctttgcaggcaactgaaggacaagtggggatttcgaatgacagctaggtatgagttgtatgaagagatgctcgatcattatttgagcccagactttgaaccccaggtcatttctgatcccttgttgcatagaaactcttcataagctgtttatgagatgcaactgaaaataagattatatggaccgaattcccgattaagaaaataagcatggtccttgtgtttatatttgttttaatgttttgatatttgaaaaagaaaagagaaaacaatcataaacaaaattgaaccagcttggtttgaaattaaaaaataacatgtatgaaagttgaatcccttcttttatccttgggtagcattttcatgattcttatacttcttgttcttttctttgtagtgtttaatggttgtgaccatattcatcatgaacatgtctttcatagaaaaaataatggtttttgttaattactatatggtcattgcacaaattaatagtttttttgacaaaaatattcttattaaatgcttttgttaaagactgtaaaataaaatagtagtgaaatagtgatttaataaagagaataggttaattagtatttttgccccctaaattttaatgggtaaataccattttggaccctgtattttgtaaaagttacagattagactctgtgttttgttaaataacaaaatggaccctgtattttctaaaatagtaaaaataggaccctgagcttaatttttgatagctttttttttaattacaactaacttgaagacaatgcttaatacgaaca

SEQ ID NO: 378072 - DNA, 4213 bp, Cannabis indica
tagctaatcatagggacacttgattcaaaatgctctaattccaaacaagggaaagctaaaaccccgtcattattattattttataggaaaatcactatatatacggttatttaatgatgttagagaccaacattggagaccaccattggagaattacattggagaccactaccttgctatgtctttctcttcttcggtgaatttttttcttttctttattttggtgagattatatacttttagagtacaaactcaaattgcaatcctaaatcagcatcgaaccattcgtcactgctactctccatctatggcattccagtccactccccttggttttgctaatttctcaaatcaaaattcaactcacaacccaaattgcaacttaaatcacaacccaaatctcaatcctatatcactataacctatttgatgtgctagtctttgttcatggcgttcaagaccactaggccttgcaagatattgttgccacctgcttaaggttttatctaaaattgaaacccaaatcacaatacaaatcgcaaccatctatttttatagtcgtttcaaccctaatcgtaactcaaattgtaaccatctaattttcttttcactgtgtgaaattccaatcgtgaatctctttcttttgaatactgtaactttacaaaaaataaatttaaatcgtatttttgcacaaatgattcactatagttgtatatatatataaagctactttttataattatatagaaaaagcgaacataaccctaatttttttttgccagaaaaaacttcattgaaaaagaaacaaaactagaaataaaacaagactaaagtttattaacaacaacgagtgttaactccctaaaataatgaaccagaaaaatttgaaaatcttgcccaattagccaaagcattggcaacactattatccttcttaggaatccaacaaaagtgacactcaatttgatctaataaagaaaataaagaaagacgaagaccatttacttctcatcctggaattcgacaaagcttagatgcctcacaaatgaccttgcaatttaacaaaaaaacgttctgaaatcacctaacttcctgagcaaaacaaactaccaaaagaccagctctgacttctacttctaaggctgaagaagcaggaaaaacatcagtatgaaggcccttaataatttcgtctgccccgactgctaccacaccaacaccaccaactccatgtttaaaagagccatcaaagaacacgttaatcgcatcatggtccaaaatattaggcaattctgaagtagcaagggttttaggcggctgaacataaaaaaaaactagaagctaggacctccacttctctaaaacgctggttgatgatatgattcaacacaggcgacatatgagtgataccatcatgaaacttgcaatttctagcccaccaaagcgattcacaaacggttacaccaaagatagtaaactcattccactgctcgcactgagtttttgggataagctcgaggtgaagcaatcaatgaacaatgtctttcgctgagttaaaaataaaattttgagtaataatgcccccacttactagagaaccaaactgccattgagaaagaacattcccaaaagaggtgaggaattgaatcaaaatgatattcacaaaggcaacactggaaaggcatacccaaaaaagtgcctatcctttcatttgagggaaaacaattggcagccatttttcacagtagtaacttctatctttcgagaatagggcccctaaatgtctttccaaaaaccagagtcgagtcccaaacgagtcctgataagggccttatacgcagaactgatactgaatcgaccattgctcgtacccttccacaccaaaaatatcatttatgcatgcatgaagcttactatgattaagaatcttgtccacctcatctggtttgaaaaagatagtaagtttatccctacaccagttaccctcaaatcaatatcaagccaatttttcactctgctctctgtagatgaggaaattggattgaaggctgctcgagatgagtcccagctatcccaaaaaagtcaggaatcataccaaatatccgtagataggtcattaccaataagcttgtcacatttattacgaacaaatgtcctaactccaaaaatgcctttagcaacataggagcagtcagatggaagggaagcattccagtaggtcctggagtggaaatactgtccttggaacaccttgacccacaacgaatcagacccaaaagcgattagccaacccaatttagataacaaatccctgttaaaatttgcactctttctaaaaaccagaccaccactgtactttggtttacacaaagagtcccaataggtaagagctaggaacctagactttttttctgcgccaatccaccaaaaattccttgtgggcttatcaatcttatgataaatggatttagagaccacaaaggctgacatgttataaacaagtatgaattgaactagacttcgagtaagaatagctcgccttgcttgagaaagcagtttaaaactctacccttgtaaatgctggttaactttctctaaaacaaagttaaagtcagaaatttgagagaaataaggggtttccaaagcatttgctgctgcctgttaagaaaccatagcccaagacattggaaattggctcttgttgggactcccttgtcccctttgagaaaaatatatttttcttcccattattaatcttctgactcaaccatcaacaataatctgagagaatcctcttaattctagtagcttcactaaagatcattgtgtcatatgaaaacatgaggtgagagatacacgaacaattacaattcactttgaaacctgagattctatgagcaacctcttccttagcaagcatccgagagagaaccccacttgcaatgatgaatagatacggggatcgatagaggatcccttgtcttaagccccacaaaggctgaaatgattttaaaggtcctccattgagtaacaccgagaaagaaacagacagtgagcaattaggtttcaaaagtgattcctaaacccaaagcacattaagaccttattcaagaaactcgactccagtctatcataagctttggacatgtccgacttgataccaacaaatttcttcttcctcttgtccttcgacattgaatgaataatctcctaggctaaaatggtatactacgcaacccaatgacctgaaacaaaaactaactggaaaggagagatcaaattcatgagggtaagcttaagctgatgtgccagaagcttagacactactcaccacattgcataagctaattaatgggacgataatcatcaaatttctcagcatttcttcgggataagaacaatgaaggaattattaacacccttagcaaactgacccaatcaaaaaactcctacacaaaattgatgacgtcacctcccatgatctcccaatgctcgtgatagaattttgctggcattccatcagagtcaagcgctttgagggggagaagagaccagccaacttctttgatttcctttactgaaggtggagagattaacctctcattcatctcctccgagataacagagagaataaaattaggaagattaggaggctccggaggataagaagactgaaaaatatctttaaaattatccaagaagtacaacttgatatccgctctatacaaccagtgttagtcatcctcggagattgctaagatatgattgtgtttcatatgaaccaaaatagataagtgaaagaatcttgagttttgatctccatggttcaactataattctcgagacttctgggccaaatagaaatttgtctttgagaaatctcgagaatatctagctgaataaaagcctcgagctcaaagttttgcgtcgaagggatacgatttttcactttcactaaataaccattcaaattaaaaagcaaaataaatttggctaaataaattgtactgcacatttgataataaggaagatataacttgaaacctgttaacgtggatcacgtggaaaatttcgaaccatttccatatgtatatgggagtcattttcaaaatttggtaaaaagagacatgtattatttgaggcctttagcacatagttgtcaagtcactatgtatatgttatattatttttaatataataatatgtagattaaaat

SEQ ID NO: 378073 - DNA, 1633 bp, Cannabis indica
acctttttcgaccaatgtgtactattttctagtgtttgggcttttgacctgtttcaaaatctacaaattttccaacgtaacgtgagcatggtgtattagagttagtcccacaatattgataatgtgtgaaaataaattgtgatatataagatgaatgagctactcctcccattgccaattagttttgagatggagcccaattcatcttatccctaaattctaacaaagtttaaacttatttaagtaattttcaagttttttttagtttcagtatgaaagttctctctacaaagggaacaatatgtctttgcaatctttataaattttcttcaaaatttcatatttttctgaattaaagtaaatttattatagtcaacaaacatatatttctctttttaaaaaaaaaaaaaaaaaacttaatatttcttcagtttcaaaaaaacttatatttttttaggtcctctagtctctagatttttcttaagtggaaagaaaataagtgtggacaaaaatataagtgtaaattactagagtaactaaattactcttactagtaattattaaaattaaaattaattatacaaacaaaataataattttcatttaagaaaattttatcccttcttatttatcaaacaacatagaagaaaataattttcttttctttccttcaaaatttgtccatccttcttattttcttttcttctaaccaaacatggtgtaaaaggtatttaaatggtgaaaaggtttgctttctttaagttttagaaaagctaatcattgctttctcaatatttttagctttttttttaggttttcttttactcgcgatcacatacttattaaaattatgaatgagaattactattatcacttcctattaagactgaatatttttaccggatttgacccgatccaacccgaccaactaggaaatttaaaaaaaaaaacgttcaaggcaagcaattcggtttcaacctggtggaccttttgggtgggtttcaagtttgattttctaggtgatcgaatttcgggttggactgagaaccaccgcacgaaccctccttcttcttttactcttacttgaactttaacaatattataagtttatactttgcattgcacctcctcaaatataataatattaactattcctaaaaagaaattacataatacaatatagattatacgaccatacacttcttctatggtttagttacatgtttataagtgttgtggtttagttatatgtttatatataattaaatatatttgtagaaaattaggtgagtgtaaagaaaaaagatattattactgggtcaactcacaaatttattatgcaatttagtttaattattatatcaaaattaatattatctgatagaaaatattttagatcagctactattgtgtgaaggtttatttataatttatttaccatttgaataattttgttacaaatagaataatcttacattatatcaaaattgatgcaatcaattttgaaaaaattacatagttatttttgataaaaaaattttatattttttatctttaattttttttttacattattacatattctataaaaatataagaaaacaaaaaaaaaaaaaatataaaaaaaaccaac

SEQ ID NO: 378074 - DNA, 2013 bp, Cannabis indica
atttcggtatctagaaaaaaaaagttagtccaaattttttttatggtcgtagacgttgtagttatttaagatttattacaaaattttgagaaattttgaaaaatttaacattgccgaaaataggattcaaaaagtctgttgcacacgtgacttttttttatcttatatacgtgtctgaaatagacggtttgaaaattgatttctaaattgtaaattattctgaatttctcaaaattttgcaatgtctttaataactataatgtacacaactataaaaaaaactagattaaaattttctatagatgtcgaaacagtgagggcttacattatatattatagggtgcttctacaatccacccctaatggatgcactgatgcaccctctacccgtttcgatatctagaaaaaatttcaatctattttttttcatattcgttatagttatttaattaagatatcctacaaatttttcacttatttcaactatatagaaagcagtattcaaacagtctatttcacacgcgtaatagtcacgcgtgatacattgtttgaattctgtttttgtcgtgttaattgatttttttttaaaatttactaggatgtcttaaaataactataacgtaccttaaataactataacgtacttaattttaaaaaaaaagtttgactaaaaaatttttgtagatactgaaatagatataaagtgcatttatattcttttaaaagatgtattatagaattttcttatattatttagaatagttccatgtccattattctatccttatagttgattataatgaccataaagcagtaataatagtacataatattgatagatattattctccatgcacatagtacttttatatacgtctatgtatttttgtgtacagtatacacatcctttatatatgtatagataatagattataatattattatgtttattaattttaaaaattgtcattatattaatttataaatccgacataaaacatatggcttgttgagagtgtgtgtgtgtgttcgtatttattggtttaattcatttgaaatgatgataagttagtccaacaagagtccgacacacatataatatgaacaaaataataatgaattatcttgagataaattaactcaaattaatgattaatattattccttaaaatttgttggaaaatatatgtatatattctgatattctccttgatcgcgagtgtagaaatgtaactttacttgctaacaacgaacttcgtaatattctgcgttataaatttttatgaagtaaaaagtagatatttgaaatttttattgtttatacaacataattattttaaaataatagaataaatactgtgcgtgcgtgtgtgaaaactttctgtatgtaatttaatgacgaaaaaaacgtaattatatgaataatatatatgtgcggcacatctgagacagagtaatattattggaacgaggagtggaaaatagggatctaataatatgtgcccttaattagtttaattaatcacatttggattggtgtacctgatgatcacatctttctctttctctctctccttaaaggtaaatatatatagtgaccttatatggttatatctaacttttctagaatccgaggttacctgcaaataggttaattttctttattttcttcttatgtggagaattaaagaagttatatatattattaatattactttgaaaagagaagtacgttaattaataaagcctacactttaagctcgcatcgtcaatgatactattttgtaaagtgatgaaatgtgaaatgattttaaatttaaaaattaagttagtaaatatttattcttttaaaaaaattataagaaaatgattaaatataataaattagttaatgaaaactgttgtcgagtgaatttcgcaacaccaaattatatagtattattaataatcaagaaaaaatttatgcggaaagacaagtgcgagtattcaacctagaatggcgagtactcgact

SEQ ID NO: 378075 - DNA, 6014 bp, Cannabis indica
gtagtttgtccaatttcattcgctactaccacatgtagtggtagggatgattttgccgacatatgtcctttagtttgggttaagggttcaaatcccaccacaacccctcttcgggagggattatacttgacctttttggatgctaacttgttgtggcaaggatagaaacgacccaatcaagaaagaatgagatatgagtctttatctctggttagtggttctcaagattgtttgaaaccgaagaggtggggaaaggatcaacaccacgagatcccctttctgttgaattaaaaaaacaaaagacccactatgttgcatcactatgtacaatgtttaggtgtaatttgtggggcacatattattcttattttgcacttgattttagtttgataatactttattaccaatattattttatttaacaaaaaaaattaaaattgaaacaggtgaaaaggaatacttagccgaaatatgcaccattggaagattacgacacaaaaacatattgaaactacaaggttggtgccatgaaaaccaacacttgctcttagtatacgactacatgcccaatggtagccttgatcgtttcataggaaaactcttccttgattgggaaactaggtacaaaatcttaacgggcctagcctcggccctactttacctacacgaggagtgtgaaagcccagtggtccacagagatgttaagcccaacaacatcatgttagactcaaactacactcctcatctaggggattttggcttggctaggttgataaaaaacgacaaggcttcaggtgtcgtttctaccatgctagctggaactcccgggtatttagcaccggagttgggatttaccggtaaagcgagcccggaatcggatgtgtatagctttggaatggtggtgttggagttggtttgtgggagaaggtcaaggggtatgaaaggggagaatagtttggttgatatggtgtggagtttagtaaggaaagatgagttgttggtgggtgttgatccactcttacaaggtagatatgtagaggaggaagtaaagaggttattggttattgggcttgcttgtctgcatccagattctgaacataggcccaatatgagaaaagtggtccaaatattattgaatccaaatgaacctctaatggacttgccagagaagaggcccaatatggtttgtgtatctttatctcatgtttcttcttcttcatcatcttcttctacaactatggttgatttggggcccaatagtgtctctgcatccagggctagggcagatgagattgtaatccattatgattgataattattgagaagaatttagtgcctcacatattggccaaaatttgtctttgtaaggattttgagagtctatactatattgctcaaagcatataaatataattaagcattttttttcaacccttaaataaaacacaagtataatatcttcttttaacataaaatagacaaaagttacttcaaaattaaacagagattataacaaccttactacaagtgcctacattttcattatgatatgattccaaagaataaacacaaatttcataattgttgtatctaagaaaaattggctctataattcctttgaattctataaaagaactgataaacaaaatcagctaaataattcttggtcatattttgtaatttctcaccttctggtagatgcactagtctgaggcattggcaaagcctttctaggaagctcgtttggatcttcgccgagagcctttttattcaacagttgaagcatccgacgggcttcttgaagttcatctcgggcactcggtccatgactttcccaagcatcaaccacctgcttctggaatccaattgccaatgtataactgcaaatcccaacatacaaccattttaatttacaaggccaatccatgtaataggaagactccttacataacataatacttacatatcagtgcatttatgagaaacaaagtgaacataccttttcatggcatcatatgcctttgcaaggttctgacatgccccgatcgagtctgcatggtgtggaccaagcgacacatccattatgtcctttgcaactgcaaacatttgtgcagctgactgaggtctgtctagttccaaataagctgcccctaagttgttgtaaatatatccaattccaaagtgtttggagccaaaactctctttcaacctctcagctgcactctccaagtaaggaatagcttgttggaccttgccggtcaacaaaagtagccatcctaatctagcagagacactgccttcggtatgctgctcttgcgggagcttctcaagaatagccaaagttctcttcaacagtgaaacagcgatttcgaactcattcatactctcatattgcattgatatttctgagtaggcatcagcaacatccaagggagaaactcgctctttcttttcaaggattccacaagcaatctccaaacatctctttgcatcagcagatttttcttggctactaagtgcttttcccattgaaataaataccaatgcccttatctcactttctttatctgtttgctgaacaacatccctcaaactattaatagcctcctcgtacttccctaatgcaatctgcatattagcagcatcaatctcagcacgaagcaaatcggaactaagtccccagttcttcaatactttttgtgatagtttattttgctccaacgccttctcatgctcctctaagccagtgtagatcaccccaagaagcctcctgtcatgagcaacctcaacagaattctgtcccaactctttcctatgtatctccaatgccttcatacaaaatggcaatgcttccttaaaactcaaaaccgaaacatatgcttccgccagatcccggtttgatttacccaattccagactgtcttgccccaaagtcgtctccttaattttcaaacaattcataagatctgcaagagcctcctctctccttcccatagctgtctttacatttgccgttgctagaaggactgcatgaaggactggtccaatatcctcaaagccgaaaccctcttcctttaacttacctagtatcctattggccctactaaggtatcctaaactatcattaaacctctttaagccataataaatcgaacccaataattgtaaagccatggcaactggcaaagaaggtcgaccatccttatccaaagcattgagggctctttcagcaaaagacaaagccttttcagggtcatcaccttcttggtcaagtttaaggccgattttcaaagaagccaacccaagctctgtttcactataagcagactccatgttcttaaatgcatatagcatttcctctggggtctttgcagactcaaaagcttcttcaaggtcagtcttttccttggcttttttctgtcttgaggacatttgaggtgatttctcaaccgttgtgtctatattccgagatggatttacttgaaattgcttgtttttatagaataagccgcgacttttagagcacggcttgaaatgattgggagagaccagcgaagatggagatgtacaagaagcatcagaaatgtaatctcttgacaaaataccagtaagggatttgattctgtggcgagttaagtgtgggaaaaaggagagtgaagctttcctcatggtgaatttagggttcactctaacctgtttgcttccttgtcaattaggatacactcacaagatctaagctcacaagattttttgttttttacaaagcaatataaatcacattaagaaatacatcaccaagatatcagcaatcggagcatggacctcttcaaaccaagatagttcagttcattgtctagactaagagcatgcttcgccaaaccatcgacagcagtataattgttgcgacccaaatgtgacaaagctgtccacgaaaattaagagaatagagctacaatatcagaattcataacacccaactcaatagcatataaatttttatgacaatcatatgagaatataatttaaaaatatagaaagtcaactaaataaagaaaattgttctgaaatataattaaaacctttgtaattcttttgtacacaaaacttccacatataaaattaaagatcatattatattctatcatatggattaaataccacatattatggcacaaaacatgtctcaaaaggcacaagacagaccacaatatatgacacaaaacaagctacaaaaactagcagcaaaactagctagagaaaacataagataagctacaaaacacgacacaaaatcagccaaaaccgccaaatacaaagccaatgtatatcaaaaccagacacgacttaaacataaatcagaccttcaaccaacctacacaaaggatatgccgaaaaaaaaaacagtacattccaacaatgatacaaaaatattaaatatatccagacccttatttatctatcactatttatcattttttttttttgtttgtttgaataaatgaaatgagttgacaagttcatattaataaacacagattttcaaaatattaagtataatggattgccccagtctgcactttctccttcaaattagtcccaaaactgaaagcattaactcataaggttaaatcatcattaaaatacagaaacacaagcagatcctcagacacactaaaatggctatgacaaataaacaaagaaagagaaaaacagattttatttctggaactgtaaaagaaaagcctaatagaccaaacaagagcatcaaaccgccttacaatgaccatgacaaacattcagctgtatgaccatgaatattgggcagaaccaatgaatattaaataaatttgatagacttttaccttgattaaccatttgtatagaagcaagaaactaacatactaccactcaactacaacctaatagaggaaaatacaagaaaaaagagagcacaaaattgtaaaagcaaaattgagtaagaaacttaaacacacaccaacaaaagaaggttagatacacattgctattaagaaataaaaatacaacctttaagccctaacaaaaaacgaaaggaaattgacagagttcatttgagatcccatggcatgcccttctggtaagatcaatcacaaactcctcccatatcattatttgttaccaaaagctcttctttttttaaatttcacttctccaatccaatgggaaattcagtaaagcttttatctttctcccataagaaaatgaatactcatataaaaaacaacaacaacagaagagagaggcagaggtcactagatttgtacaatatcttcaaatataaataaattaaggggttacataagatacctgatagccgagtagagatggagccgcagcagggagagataaagggttcaagggttttggagaattaaagggtttaagggtgtttgagtgagtttgagaaacacagaatagctgagaaagtgaagacaatggcggcacttggcctttgggtggttctcatatggtgaaaggcttaactaattaaatagatttttttttattaaaattgatgtataaataataaaaaaaaaatattgataattattattattattaacaaaatggagtcattgggtggttttaatgggttttgggttttcgaatttttattttggaatcttggaatcgaactcgcctgtatgaaaatcaagttttttgaatttcggatccggttggtcgagttcgggtgggatgggtcgggtttcgggttaggctatactttttttaaaaaaaaaaattcattttttaacaaaaaaaaaaattacaaaataatataattatacaatatctattctatataaagtgtgtctatataactgaattcttgcgtttatgagaaattcatggataattttttttttaaaataatttttctattcaaaaataatatattttttttattaagatgtattttaatattaatttttaaataaattaatattacttttaaattttaatcgggtttatga

SEQ ID NO: 378076 - DNA, 2424 bp, Cannabis indica
tttttttttattaaatttaaaacagaatttatactgacggaaattagaaaaaaaatacaattttataaatattgattatatatatcgctaaaaacttaaatctttaaatatttataccgctatttataacctatttgagtaatgtttgaaaggtataataaaattaagtatattttgaaaggatccatcaacaatctaacagaacggctctcatttttattactttatttgttaaatggaaaccaaagaaatgatgttttttaccatgcttgactagctaaaagttaatttttagtcaaaacattaacgtcaaacctcacaatagattttgctggaatatagggcacagtgcacaaaacaaagtaataccttttgagtttaagttcttaactatcattattaattttcacttaaaatttaggagaattgctaaaagtaaatctatatcgtattatattattattgatatatttaaatgtcgaattctatataaaaaataaattttaaaaatatcattaactttataaagagtgttagacgattctagctagtgcccaatagcaatggtcaaaacttaaatattaagcttaaaacttgtgtttcttgtctaatttccccacccaacattttctaaactattcataaactgaaattataaaaaaaaattaacataataataaaatataaaataaaacaatataaggccagagtacaacaaaacattattataaaactataactaattacattattataatgaagtatagctttcaactataaatattattatataatagtgttacctttcataattgtagggcccctcagcaaaagttcaccggtccggttaaccgacaaagcttcaccggtttcagggttcacaatcttggcctccatgctcggagacagcattccggcagttccgtaccgccgactttcttctagacagtccgttgaagctccgattcccgtggattcggttaagccataaccctgaagaatactcaccgttggatatttctccacgaacccttcgattacctctttactcagcggagctccacccgaaagaactgattgcagtgagctcagatcgtacttggcccttatgtgattcgcgttgttcaacagcgccaccagaatcggcggcacgagagggaggtaggtggctctgtacttgtcgatcgcggataacatttcgtggatctcgaacttggagagaatcacgatggttgatccagaggagagaaggcccattgcgaaggctgctaagccgtagatgtggaacataggaacggtacagatgaaggtgtgttctccatcttctgtaccgaatctgctgagaatagtttgaaccattgcgattagattcttgtgagaagaaaccacgcctttactcgcgccggtagtaccagaggagtagagtaaagtagctgtgtcttcctgattgactctgtacccgatccggttagtgctcggttcctttctcatcatttcccctaaagatcccactatattcatggatttatcaagcgaatttcggttctcatcgtcgattaataaaacagttgggagattagaaccggcgattttggaaacgagctgaggaatggtgaaggcgaggacaggtttggaatcggcgatctgtttagcgatttctcgggaagtgttgagtggattggtagtggtgatgatggcaccgagtgacatcacggcgagacagaccaccgggaagtaaatagagtttggggaaaggaggaggatgacgtcacctttcctgattcccatgacagagagagaagtagcgacggaatcaacggctcgccatagttgaggaaaagtgaggtggtgacctgtggcggcgtcgatgaaggcaatcttgccgttgtgagggcgggaggagatgaaggtggtgacgtcgacggaatggttgtgagggaggtgtatggggttgcgtttgctgtagaagatggagtttgatttacagtagccgcttctctcgtccacgactatgggtttggtagacttagatttctccatggctgatggctttcctttactattcactctgatatttttcagtatatacagaagagtgaaggccaacgatgtatttatataatatataatctctaaattttagttgtaatgtaatgttgacttgttgacttgttgattgtggatttccaaatcactgggattggctcacctcaccggccaataggataatgataattgttaattggtttggtggtcggtatatcatattttcatttatttattagatcagggaaatttaagtttttatgcatattttacctaaatttttttacttactaatatttttaatgtattgtaattttaatgttttctctaaaataccttctccaattacatcaactcttctcttcccatcatcttccc

SEQ ID NO: 378077 - DNA, 2196 bp, Cannabis indica
gaattcttacttgtagtctattggtaaaatcaacataagcagttcaccctctaattattaattcataattagagttgatcaaaataccattttacccttttaattatctcttgattccttacgtaccattaattcaatgtgaacagttaatctataacttattatagatttggatccaactgttagcactctcagaattaacactataagagaactaatattcgatccgttaggaaagcttagattttattattgtataacatgttctcagccactcatgttattaagctcccaaaatagaagttgtaagaattgtcttctatgagaatctttaatgagtgaatcaaagaactcaataaacacaaacaggagttcatgtatactcaggattcaggttgatctactaatgatcattattatgatatgatacgctattgtcatggtaaacaacatgttaattaaagatatttattacatatcggtccagtcatgtataatctaattatacacagtacatttactacatgtccatcttcatatgtgatttgaatcaaaattacacacactagaagtatagtgtatagtaaaccgtacttggtagttacatattaaagatttcccaatactttaataaactacttacttattttattcatatcgtataatcttaattctcttatacatccttataagattataccttctccatatgaataatgaatttttagatatttaataattatctcttataattaatacatcacttatcttataatcatattatatgtattgtctaatatataatccattaattacttgattttaagacataaatcccaacaccctttcccacatgagcttagatttgaattaagcttaattacagctactgctcacgttcgtgtccaacaagatgggtttgtggtccaaaacagaggttgtgaggtgtttaataatggcatctagccaagcaagcctccaatcaatagacacaagagctttgttgagccttgccctcttcagacaagtgacgttcgaagaacctgagcatttcttaaactaggtaaacttgaccccttgataccccaaattaattagccctgttcgatgaaccattctcctgagatcaaaggaataccttacgatgttgattgatttggaataattgacacaatcactatccattaaagtgccattgagatcacctaaaatggtaactgtcaggtcatactggagaataaaatctcctaattcattccaaaagaattctttctcaccaaagataggaggaccataggcgcaaatttggatccaaggcctatccggggggtcagaggaaataagggcaacaatttaatttttattagcaagttgtatgttacgatccactcctaatctccaacacaaaccaagaccactagctgagcccaaagggggggacataattcataccggaaaagtgaaggttagacattaaacatgtaaatttatcttgtgtgagtcttactttggagaggaccaagattttaggatttgactttcggataagatccttcagttgttgaacttttgctgcattctccagaccatgacagttccaagccagggccttcatttggattgtggtgacttttctgggcaagtcttcacagtcccaaaatgaaacacctcttgactggtgttctccattcccccattcgtatcatcaacctcccaaatagagcaaaatgacttcgactttgggttgcaatctataatcacaaagtgattattcaggtccacctttagatcaaagacatttctctcctaattggttctaatggccatttgtcttcttttcacagaacctttacttttcctatgaagaggttgaggcttcacggtgaaactcgtaaaagcttttgtcgaccaccctcttcttcttggcttgggagaatgagcttgagggttcaaattgactaaaccggaggcagatggtctccatctctttcgtttcatgcttattacttctgaggagcccgatgaaaagtttttagcaaccaaaagattggagaaaagttgatgttcaattttactaggtaaagggtgaggttcagtttctacgggagaaccattactctgggattggtccttaatagaagaaatggggaaagaggtaggatttggagcaatgataactgttggatatttatttta

SEQ ID NO: 378078 - DNA, 4820 bp, Cannabis indica
tttgaacactactagtatttgattatgttgttttttatcatggattgtgtcactgaccaagtagtctttaatcctggctatcttcttagggccttgacaagtaagggtctggatttactttgccaagccaaagtatgcctccacgacttagaggtagttttagtagcttatactaagcgttaaaatttctctgcataagttctttgtgctagtttgatgcattgtataatatgggtgcccccaagtgaccatgcagacaagtctcttggtaacttgctattcaccaagttttacagattacctgggtactgccttgtgggagtactgtagtacgcatgttgaactaatagaataactttgaaaagttaatctgtgaacaagtggttcatagacacaataaacataatatataaatatgcaattattcattaattggtctttgttgctgtacaacttacataattgtatttacaagcctatattacacaaatttagcttttagataccaagtggctacccctgctcacttgcaaaacataggccactattgaagaatagtgggagactacgcccaagaagggtcgtgggtgctaacgcttgttgtactctaatgttgagtaggtagaaccgctacgttggagtagagttttgtaagatggttattggtagtatttttggaggtgtttgttgaagtgtcttgctaccttttgacgtgtttgttgaagtgtcttgctaccttttgttggtagacctatagctttaggttggcttattctcttctttcttctacttcgtcaagggactccgccagtagggtgttgtttgtttgttggtcataggttattctacagtgagatagtggcactatctctataagcaacatcacctcttagccataagctaaggcaactggagtttacccagtggccatcttctcagttctccttgagggttttgttgacagcttcaacctgcccatttgcttgtggatagaccacgacagagaagcttttgatgatgccatgtctgttgcagaaattagtgaacatgtcactgttgaactgtttgccgttgtctgacataatcttctagggtaggtcgaacatgtatatgatgttcttgataaaaaaaagtcaagaaccttcttggaagttattgttgttggggtcttcattggctcagatgttgccttagccttccttttattgagttgtactgcctcgtggcacaggttctgtccacataagcatgccatctcatgaggacaaaaatttggataatagtataggccatggtttttaaccgtcggtaattccacttaaaaaaatatcaattattttaaaggaatgcttagaaactattcaaaatacatcatgagtatttaaaatcgtcgggaatatcaaatttttcccgacaattttaaatactcacttaattttttagcgaaggtcccccaaaaaaagagttttaagggttgtcaagaataatagtttttattgtagtggaagctgccatgttctctgaaaagttgaaaggaaatggctacaaaaggatccacccttatagagtttggaggtaactttagatttctaggactcctaacaattttatctaccttatctatgaattcactcatggggtacatagcgtgatctaaattcagaatgtacgtatcaaatcccccttggtccatttgggacatgagatgaagactggggtgtggtacatgcagaaaggtttattacctcttccagaagtgatagcccccagtgtcccctgatttggatatgctgcagcacgcctcatgtgaatcttgtcaacttctgttagaggatttgggtgagagagcatccaactagcttccaagagctggtcctctttagtggcctccgtgaggattttggttaagtcacgggcaatcacctctttgacctcttttggagcttggcattgtcccatgttgttgacactgtcaatactttgaaatgtcacaataagtccatgctcgcagagcaatggtgtagtcactaagccctaaacttttagttgagcttcggtgaaggccttatattacacaactttcttagccagttccttagtctctatactttgaggcacaggctttgccaatagaaataaagaaactcaaagatctagtcaacacctaaataaaactagaataagattgaaaaaaaaaatagatccaaaaaacaactgtaaaatttttacttggaattcgaaagctaacctagagggtaggaagcctattcactgggaaattagtggagaggaaccaatattccctgaggtcgtgggaatgcttggtttggcaagtaaggcagtgatcatccaaatacttatcgagcatttaaagcctaaacttcttgtagttagtcctcatcggttgaggcttcaccctgtagaagtatagaatttcctcctgagtaggcaccttaaacttattaattttacaaaaaatataccatctagctaaaagctcataagctggaggtattggctggaacagagaaatcctaatacgggcaagaaactccacaaagtaagttcttagcgagagatgtgctctgcttgagatatgggaccagctctaagcactgaacccatccgtgctcgcggatggagactcttttgcaattagtagcctatgcgacattaatcctagtacgttgagcagtctggcttcagtagcatacgtttctagaatcccgtgtcaacgaaagcaattttccttttggtccatcacccagatggatttgttgaatttttgagcgagaggagaaactttggccttccctttccctttggacttctcaggtgtcccagatagagtggcctctgggaaagtctcaagggcagcatccgagtgagtttcccctacaggatccactgcttaagttcccttagtggttgtttcctcgataaggacaaatgttttgtcgtccttaatttccatcccatcaagatggaactccatgctcaaatcaatcactggaatgatgaaaaaaaagggcaagcaattaaacactcaccattgaaatgacataatttgtatcgaggaaggcctcccctaaaatttcttggagaggtgcctaccggacctgtcactttcaaaaacctatttttcacgaacaactcatagcgatagctcaggagcctacggaaaagctactagaaaacaattttaagcaacaatctagaaaataatagcccctcgatgtcctaacaactcaaaattggtgtgaaggaagttccctagcctaaagtttgctcaaaaattcatcttgcctggtttttccctaattctagaatcttatgagcatgaaaatgtctacgggagcgcaaatagccgtactcaaaccattcaaaaaaatcagcacttcagggtaaaaaaaatttccacataatcctacctcagaaataatactctatgggcatcaatttaccactcaaacatgcaagatgtcctacacctagcttgaacttagcatttctatgagaaatagaaaatagtcaacaaagtgtcgggatacttgttatgtgagtaaggaaagagaggttgtcgtagaaatctgcccaaaagtgttgaacacaatcaattagatagtcgtagctggcctgaacgtcgaagctttcattgggtttggggttgaacgattcaaggttcatcaactctacttctggaaaatgggctgaatagaggtttagaaagattcgaataaagtagtagaagacctcttgcattgactaatggatcgacgttgagaaagaatttttttggaaaataagaggtcctgtttcaaaagttttaaaatagggtgttctgaaagtataaggtgatgaaaaagaagaaatgagttgggaaaatcaatttacaccagaatcctcacaatttgaaattgacggttcagatttcttcttctcaaagaacactttgatccaatggatgcgaagttgaaaagaggacatttaaaattttcccttgacatttatgattcatcattgtacacgtcgagtaccatacacattaaaggacgggtcatttcaattgtactgccatcattataactactaccaagaaacgtgccctcaacgtgcacgtgttgtgaacaattgcattagaggcatcgaatgtgtgtcacacctatgttacgtttaacttacaaccttttacttgatgaaagctcacaagttgtatccttgactccaacagttacgatgttccaagaacatagctccaagaaattgaagagtactacaagctcccagatctcagagagtcccaaaaggttatggggtaaatgtaatctgcatttctgaacatgtgacacgtggcatttaaaggaaggcattatttccataatctccctaatgaaaatcccccactatgatcttgtcaaggagaagcttcatggaaacgggaacaagtcaagactaaagaatatacgaaagttcatttggccctaccttagcttctcggatgcagaaggtgtgttgcctctcctagacccagaggggtcctagcatggaagcctgcctagctgatacctagacgggtagtcgaagggcctaatgcggatgtcaaccaccttcgagtgttgcggatgtataccttttatacaagtaaggtcactaagtgatagttatgcttttctcacaaatgatcaaatcttgtcccctacgtccaagcatggtagtgcgcactaggggtgtacataaatttttgtaaaccgcctaatgcgaacaacctgcccaaaccaaactgagataacccgacgaaaaaatgtaaaccgaaaaacccg

SEQ ID NO: 378079 - DNA, 8825 bp, Cannabis indica
tagtcaccactatttcagcttctcttagaatagatttccgaagtttatatttaagtcccttaagttcttcattagttttcttttcctgggcctgagcaatgctaagatctttatagatttgcttcttttgctcatagagttttcttagcttcctctgtacttcggcatcagacattaccttcagatcatctttcttgtgactgtcatcttccaaagacttcttgaggtcaatattttcatcacttaagttagcacgcttggcttcgtaaaatcgtatacgatcaactattttctctaaattagaccgcagtgttattgaagaagagacattctcattattctttgcatcattcaacttaatcttctcatctgctagacgatgatccactagtgtatcaataaagaatggtaaagaatttggatgaactgttttcaaatttccaacccttacaagatacggcttatacatcttcccatcactgcgataaaggccttgactagatattctcgacaccaactcatcaactgcagcattagactgagcacaaataagcacccttcgtctgacataagcatcgctagattttgaattcctttgcatgtcctcgtttaattgcttagccaaggcagcatcctgccaagcccttgcaacagcagcagtctgactaatcttagttgataaagaactactttttctcacactaccagcaagaaaattatctgcttgatctgacttttctgagggcgatgcaagcaaaccactggcaatagccaaaatagttcgagtcttaccagtacctatatatttttaacaaaagcaaaaaataagaagattatgtaacaaatcaattcaaacaacagtttaaggaaatcacaaacctggaggaccctggattaatgataattcgacatttttccttgaattgcgtggtccaattgcaacactgatagcatgaagctgactatcattaaaggacgacttcaacattagctgcagtggttgagatagcttactcagatcaacttttgaaatctcattagagctaggaccatcatcatttataggtttcaagatagttggaagcaaggggatctcctttattgaagataatgcctgaaattctcgaagctgaggagtaatgctcataatgcgactcgcatgccatttactgcgttcaaggagattccttctagcttgatttaaacgtgaagtaccattttgcatatagaatctgataagcaagatagttaaccttcttttatagtctctctcgcgcctctccacctgagaaacagaaaggtctacagattactttagagcaatactactgtccatattttaataggtgataccccattttaaagttttctccaaagaaaaatagcattaactataataaaaagaaaattaaaagaaaaccagggtgggataccggcatcctccatatatgaatgtaaaacttgactgttggaaaaaacctaacagcatttaaatttaaccacaagccatccaccaaatggcacgtactctgtccatattaaattacaaagtgttccattatttacatgtgactctacttgtttgatattattacccctaaagaagtgctgccactaattttataacattcatatcctcaaaatggaaatactcttgagtttcaaacaaaaaaaaaatagaattactctgccaaagtcactgtgggaaaaaaaacagcaagcactgatattactaggaaaattcaaactataaagcagacaagaaaggacaactggccaatttcatctaaaaatttacttttaaataattacactgattgatgttgtagagatcaataagagaaattgcgtataaaacagataattgacatccacataatgttgctaggtttccctactttactaaaggtacttatgaaaaatacctttccaaccatatgaaaatcatgagatgatttttccggatgctcttttgtaaacaaaacaaggtcattttctgagaagctttttgatgatgtagggtcatcgttatcatgcgcaaagcgaacaagatgaaaatcatcaactctttcaactgcaagcactgataaaacaccgaagcacatctcctcccatgaaggaatttcttgaaaagagctttgtaactgcgctttgaactcctccaaaaccaatggccgaaaaatgctgatatactcctcaggtgattgaaaacaaacaggaacttccttcaactttccaaatgtgcatcgactgtcttcacttgctgatgttaatcctattgttgcaaaataatctatctctagtataggcttataccattcatcaagtcttggtggcttaaatcttcttgctcgagcctccaacctctgaagatgacctgaattgtttttattaggagtactaagatgtataagttgcctttttggaacaaaaatgtttggttttgccaatgatgatggctgacgtttcacagaatctagagcagattccagtggatcatcttctgtatcacatactattttttgtaatatagtatcgttagtctttgcactctcacaagctttatttgacttgttgaagctaacagcaccatctgatgacttcttcaaattaactcttccgtgagattctaaagaattgtctatattacatgtcgagattctctctttctgcttattatctacacctaattttgggatggcaacagatcctagcttccccgtgcgtttactagagtttatcttagatgccgaaccatcggtaacatctgcacgctggctatccttcaacatatcctttgaagtgtcattgccacaaactctgtcactaattaggccaacatttgaagtggtttcatgaacatgactagttactgttttgtagtccaacttgcactgacctgtactagtatcagataacatgaactcactcggtgaatcttctttttcatcatcagaaagaacaatcaaatcatatctgtcctttttatcatttattgtagatgagtctaggagttgaagctctgtatccttgattggccaaggttggacatctacagtaggctctttcatccttagaaataatctttcagaactgtagctctttttaatattatctgaagcctccttagataaagaaactgagaggcgggatacttgctcagttaactcatccatggaaacactttctgaattgaaaaaacatagcatgttggtaaaagatgtaaatgaaggtaatgaaaaattgccattttttgtttatgtttaaaacaaaataagagtgctcaccacatgatatgagttcttcaatggtcttgattgtcaatgcaataccattatgacatgaacccttcagcaacttcagcaaggaagcaactgctcgtttccagtatacaactacaactttaagtgatgactttccccaatccacaagatcatgaagccaagagaagtcaactgcacttttcaatattccacaggagccagactgctctatgagtgaaggccaaagcctttcaaagacaacagggaggatttcaagtaagcgaacacaagtcatctgaaattacagagagctaataatcataagaataactccataataggattaacactaaaccctttataaaataaaacacaagttctatatcaattgtctgcacaaacctatatgaatcgtatgcacgtaagagagacaaatgcactactatgaagctattatttttctcaatcagataaactagaaattgcatgtcatatcagtttaataaaagctgaagaaaaaaatcgataataagtgcaaaagcagcactaatacctgacaaatactgtaaccgatagatgccttcccttcaatcaagcacctcttaatacatggccaggccatttccgatagtaagcaacaaaacttttcttgtaaccttttctccttttcaatcaatttttcatccacacttgccggaaaagaattgaacactggctgcctgagaaatccaccgtgagtcgaaaattttgtcttactcatgcagtcagatgatttgtccggcatatctatattaagtaattcgccttgatctagtaatttgcgaagaacaaataaaaagtgttgtaacatctgaaactttagtatgacagcatccacttggacctgaaaaacattaaacaaaactgtaaataaaatccagacaagatgaaactaaagtaacatcccttgagaattacattcttcctaaaatagaagggatacgtggcttcattcccaataagagacaaagagccatccgaaaagttgatgaaaataactagtaaattctacaggcctacaaaaggaattacacagaacagagttaaatataaaagaccaaaacacatccaagacttgataaatgtccatgctatggaaaggtggttattagttttagactatacaaccttttacaacttggtccttgaaagtttcaattacagtaaaaaaaaaaaggaagaagaaacaactttgcattaatataatgaagaacataaaaaagttaaaatcaaaaaagatttcaagtacataaaacaaaagaaaatacaaaagtgcagcctttttaatacaaaatactttccaaatctatggtaagatctaggaaagataatccttcaaagccctgagctttatatacccatgttttacttgtaagtttgtaacccaaaatttgacattcttccacaacccttccactgcagcctctttatcttcaaatattcagctatcccttacaacccaaaaaataggatatccacaatgtaattaagtagtccaacttctaattttctagaagttaagtcctaaagtctaacaaatgtgctcctcgaatgttattgttgccatcataatgtgttggggagtcaaattatggtctatgggcagcaaaattttctccaatttatttcaaacaaaatttaacctccattaataactaaaactaactgctaggaaattaaaattttgaagagttaattgctaaaattagaatgctaaggaccaaatcataacaaatagtatcgtctaaagagcaatagtgccaataccaaaaagaggaagaaaaaaaaacataccaatttcacagcatgtctcaaacctaagaaaacagcagataatgaaggcccagaagaacaaagaaacttgaggccgcaagcaagaccctttgtgtcagaaacatgttccaagatgtactttccaaactgcctcacagcctgaacataaacaaataaaataccttaaatggagaattttatttacgtggaagagagcattatgtaaactataatattttggaaaaatgctttgattaatgatttaatttgtttgatttcagttccttttattctgtatttcttttcatctaagaggataccttatcattttctctctgttagtcacttttcctttatgaataacatgtgtttcttcaaaaaaaaaataataattttacataattacatcattagaatccaaaagggtaaggatcaagctttcgcccatccttggttcccaagtccactgcttccgaagttcaccctgccccacctgaactaagaaatgttctgttaacctgtatcacaccgcagaaattttacactaaagataagtaaactgcataaattaaatggattatataacttgaattaccagagttcttgtacaaaagagccatagaaagaaatcaaatatgaacatttatgataatgtacatcaacgatattaaacaagtgaaacacttgacctgatgaatgctcgaattagggaaagtgacattgttgacactttaattgagtttttctgttctttcacatccccgccatcatcagaaccagtaggaagcttccacccaaatgttgtagaaatttcagaggacaaaagccatgttctaactggaactgccaactctgaatttaattcagactctaccatagagaaacgagactgagcccaaaaaacagccttccaaaatgatgggggaagaaccaagggattgatatcagcaaggacgtcaatccataacattggaatgcacatccattctccaaaatccagagatacaattttgctctgtttgctgaagtcactccaagaactatcatacttctcctcaacatcctcggaaaataagagtctaatattgtcgtcctcatcatcattcaattcattagagaaacctctcccagggcttggtggcgggcaggaacttagtaatgaacttattaggacagcagcatcagatacaagaatagtttgtatgagatctatggcaggttgtctaagagaattgtgaagtgaagaatccttcagagatgaaactagaggagggcccctgtccaatgacaatgaaatgagtccgaaaatactggtgcacaattcttaacatattcaatcaatgaaaaaggtgacagatacagacaattatcaagctaagccattgatgtagaccactgagggctacttaaaagtccttaagaacaataaaatgcataagacagctacagtcagaaaagtagcgagcagggcataaattcagcctttcgtatgttgattaatttaaaaagagaaagaaaacatcaagatcgattgtcaacatgagccatgatgaatgttacacccttttgctttgcagagagaaggaacaaataaccaaaagatttatacacgttaacaatttttgtcacccacttcaagaataattacattttctttaaatactctgaatgaatagtgaatacaaccttttctcatttctagatctttctccctggctataaaattgtttcctgtgggaatttctgaatattctcattgattgataaaatgagttacaacctattttatacacaagaaaaagatattccgtctaattctgttgtgaatagaattagctacaaacaagaaaaaaagactaaaactaataaaactatacaaataaataataataaaataaaataaaataacaataatacaaaatacgtattattcctatttctgatatttctacactcccactcaaactgagttgtatatgttatacaaacccggtttggaattgaaatcgtcaaagcttctaggtagggcctttgttaggatgtccccaatttgttttcttgtgggaatgaagttaagttgaataatctttctcggagatgaagtgtctgtcaatctccaaatgttttgttctgtcatgatgaattgggttcttagcgatactgattgcagcttgattttcgctatacaatttgaatgatgtaggaacctcaacgtttagttcaattaatagtcttttaatccacattccctcacaaatacccaatgatagtgcacgatattctaattctacactacttcaagagaccattgactgtttcctgctgcaccaagttactaaattaccccaaacataggtgcaatagccactgattgaatgtctatcagttaattttcctacccaactggcatttgtgtagacttctatgtcttagttgttatgtttcctgaagagtaaaccgaggcctggtgtcatttttacgtatttctcaagatacgatgaacagcttataaatgatcctcacaaggactatgcatatattgacttactaaactgagagagaaagcgatattcgatctagtgtgagagagatagatcaactttcctactaatctttgataactccccctctctactggaattgggagggtctactgattgctcccaatcattccaatttcgtttaaaagatctaggatattccgttgacaaatgacctttggatcggacgacctccattccaagaatatatttcgaagttcttagatcttttacctcaaattctgaagcaaaagatctcttaagatttgagatctcaactgaatcatcttcggttatgattatgtcatcgacgtagacaatgagaacagccagttttcctattggagagttttttacgaaggtgtgatcgacttggcattgagtgaaacccacttttacaactgactttgcaaacctgtcaaaccatgctcgaggtgattggttcaagccataaagagatttttggagtttgcagacaaatcgcccgctaaattttcttcacgcttggtggaatctccatatagactactttgaattctctattcaagaatgcattttttacatccatctagtataacggccaatcacaattcacattaaaagatatcaaaattctaactgtattgagttaggccagaggaccaaacatctgttgataatcaacaccataagattgactgaaccccttagcaaccaaaggagatttgaacttgttgatactcccatataaattgtacttgacaacaaaattccacttacatccgactgtctgttttccaagggtaactcagcaagaatccgtgtgcccctttttctcaagggcattgatttcctcatcaacgacaagtcggcaaccttccatttgggaccttttaaagcccatcaatgcttgtaggaatttgaacaagatcaagagatgagacaaaggatcgatatcaacatacttctcgataggatgattggtgcatgttctaatacctagatattagaggagttaccactagacaagaaggtaatagggtgcaaatgggtgtttacaataaaatataatgcaaacgaatctattgagaggtacaaagctcggttagttgccaagggttttactcaaatttatggaattaactacactgaaacattcgccacggttgtcaaactcaatactaccaaagtattgttgtcactaccaattaacttggattgggaattgcat

SEQ ID NO: 378080 - DNA, 1951 bp, Cannabis indica
aaaaaagaaaaaaatctattggtctaattacttgaccagctggcatgccacgtttggtgtttacatctctttctaatctacactgaaaagatttttatttttattttcttttgtcgaaaaaaagagattttttttttctgtttctttgtataaatttgaatacatattaatattattattgatgatttaaaaaataaaaattacaaatggggtatttggatcacatttgtttttccttaatgagaaaagatctcagagtgacgtggcctttttcccatcaataccaaactatccagacaatctagccagagcgcctctctctcttccctcttgcactttttctctctccttatggcctttttctccgttctctcctcaccacatccaccacctcttcacttttactaaaatgcactgcggaaacactacgcaccctctttgtctatgcccttcatccaatcaccatccctcctttccaaggcgcacattagcgagggtcggtatcgcatttatttactcgtagaaaaataaaaattatttaaaataacaaaacacaaatatctcaaaatatcaataaacaactaactttatcatcgggttgcttgatatttgtaaagcttgtacatatatattttcttcggaggaaaagacttcgtaggattggttggatggcccgaatgttttgcgctgtgtcggagggattcgctcactgctaacctgcgccgctcgccggagagcgatctgtctccggccgtcgaatcttcgattgaggtctctcttttgtggacagtttcgatcgatagaggagttcgagtttatttaattgctctataaataatatatttagtttttcatttactggaagggcgaatggattggggtaagggagtgagcatggagcttaatggggctggaaatggtttggagtgtgagtgagtgctaggacgtatttggtcttctttaatggaggttctgtttcgtagctcagttttgaaaaccctaatcatgagttggagggccacagatgatgagagcgggaagagaagacggattttggatctttaatggaggttctggttcgtagttcagtgtttgcaatcgaggagagttatatattgttgatcgtgtgaattggagcagtattggtgttgtttattgagttgatatggagcgtaagcagctgaatttgaacaaagactgtgatgttgttggcggcggcgatggcctcggtggtggtgctggccctggtgatggatttatcgataggagtaaagtgaggatattgctttgcgatagtgagacaaatagttcaaaagaggtcttaccacttcttttgaaatgctcttatcagggtatatatcaattttactcttttttttcttctctctgaacaagaaaagtttactctttgattgcctggccgttatgaagtaagaaaattaaatttgtaattattagaatctatgtaggaaattattgacaagctctacttatttagttgcaattactatatgtttgccttctgtggaggatcattgatgctaatagattattattttcaaattgggaaagaaaatatttgtcatgcttgttagcagggctcatacttagtatttttgtttcgtcctcgaatagatagttatagctaattgcatcttattgaaagatacaagcgtatttatatatggttattttctattttttagcaaaatcaactgatttgttggcatatggaattgttaaagagtggcatatttagtatttttgttggcatacttagtatttttgtttcatcctcgaatagatagttattgctggcatattttcttagatttgtgtagagagtggaaaacattgatgtcgtttcgctgtaactgttttcggttttgttttcttgtgtttgtgccctatcttttgttaccacggttttcctccgccataagtgagggtt

SEQ ID NO: 378081 - DNA, 5229 bp, Cannabis indica
tctggtaacttatcttacctctgcaaatccttttctattgtatggataacattgttgcttaaatccctactagagtcttatcatattatcttactaccatcacttttcgggtgcaggtataagaatgctctaggaggtttgtgggtggttgttattctctttacttgctacatcctgactgagattctaagaatttcaagtagcacctggttgagtcattggactgatcaagggattgctgataattataatcctggcttctacaatctgatatatgcacttctatcatttggtcaggtaagggaataacagacaatgattggttctttttaacagcttaagttttaaaattattttcattgtgttatatttttgggagaaggtcagtctaagacatttgacctctggtctctttttcaatataaaaaaaagccccattatgctatactaaggccaagcaatcttgagcacaatttggtcataaattttcaaattttcacatagttgctccttgggcttctcattttgaatatcactgtctgttcactattggccgaagattgatactttggtggcaaaagatgtctcaaggtttttctagaagcctgttgaagttcatatagagtacagggattttatagtaggatggcttgtttgcccacccactaattggagaattcattgttttgtgttaaaattctgcttgaatggtatatttatcatcattgtttgctggtttcaggttattgtaatgctgggaaattcgtattggttaattatttcaagtctttatgctgccagaaggctgcatgaggccatgcttggctctatattaagagctccaatggttttctttcacactaatccccttggacggattatcaatagatttgcaaaggatctcggtgatattgatcggaatgttgctccatttgtgaatatgtttctgaatcaagtttcacaattgctttccacattcattttgattggatttgtcagcaccatgtccttgtgggctataatgccactcttggttttgttttatgcggcatatctctattatcaggtaaaaggaagcatcattatttttgtctatcattaatttggaataatgttctacctaatttgttgcattatttctcctataatcattgtagaaatccctaacacatggacttactataatgctttaggcaaatgtagcttttctaaccacatagtacttttgtgaagttacatatcttcttacattagtgatgttttgctatttgtatagagcatggctcgtgaagttaagcggctagactcaataagcagatctcctgtttatgcacaatttggagaagcattgaatggcctatcaactattcgtgcttacaaagcttatgatcggatgtcagacattaatggaagatctgttgacaacaatatcagattcaccttggtcaatatgagtggaaaccgctggcttgctatccgtttggaaacattgggaggcctcatgatatggtttactgcaacttttgctgtcatgcagaacgggagggcagaaaaccagcaagaatttgcttcaactatgggtcttcttcttagctatgctctaaacattactagtttattgactggagtactgagacttgcaagtctggcggagaatagcttaaatgctgtagagcgggttgggacatatatagatctgccatctgaagctccatctattatagagagtaaccgcccccctcctgggtggccttcatctgggtccattagatttgaggatgttgttctacgttacaggcctgaacttcctccagttttacatgggctgtcattcgcaatatcaccaagtgataaagtaggaattgttggaaggactggtgcagggaagtctagcatgcttaatgctctattccggattgtagaactagaaagaggaagaattttgattgatgactgcgatattggaaaacttgggctcacagatctacggaaagttcttggaatcataccacagtcacccgttcttttctcaggtaaaaagaaaataaaaaagtaattgatttatacgagatctggtatcttctgtttttgtttatgctcataattatacaatacttaataaaactagttcgtatcttataaaaagcatgtgggacccaactaaaaattcgggattccttcgtggggtgtctaatttctgtcaatgttgttatctcagtagtaatctttcattttgatgataatatgatttgtattgtcaatattgtaacaatggtcaacttaatttactatttatttgtttctaggaactgtgagattcaaccttgacccctttaacgaacataatgacgctgacctttgggaagctttagaaagggcacatttaaaggatgcaattaggaggaattcttttggactggatgctgaggtatgtgctcaagtttgctttttactggattttgtgctccttttatggcttatcttttcaaaattgatgtttgcaattataaacccaagcactatgccatattagctgtccttttaggcctttctatcttttagattggctactacttgatgaacttctggacattggtcagagcctcagaggaaaaatgataggttgtataactcactcggtagaaaattagaacagtatgagtttattttcgtaacctatcattctctcttctcatgcttgtcccataatatttatttatatgaaaatatgagcatgtattgtaagattcatctagtttgttagatgtttgctgagcaattatagagtattcaaagtgaattagtgaattatctcacatgctagatttcgtatttcacacatatatctaacttttttgaatcaaatgaagtttactgttgtgatacttgttgaaaaaagaagctcaatggtgtgaccacaagattaatgtccatgctttatcagtaatagttttatttattattattattactattgtatttgttcactagactaaactgccttgtgatatattaaggtatcggaggctggtgagaatttcagtgttgggcagaggcaactattaagtcttgctcgagcattgttgagaagatcaaagatactggttcttgatgaagcaactgcagctgttgatgtccgaactgatgctcttattcaaaaaactattcgagaagaatttaaatcatgtactatgctgattattgctcacagattaaataccataattgattgtgaccgaatcattctgcttgatgctggccgggtatgtaaaatttgctcttgttttatgtacttatactctgaaagagaggatggattcttgatgttatttgtgttttctacattatattccgaaaaaggttaactttgaaaaagaaaaaataataataataaattaataaatgatgtaattctatgtgggtaaactgtttttcaggttttagaatatgactcccctgaggaactgctgtcaagagagaatagtgctttctcaaaaatggttcaaagtacaggagctgcgaatgctcaatatttacgaagcctagtacgtgaaagggaagatgcaaatcggctgggaagagaagagagtgtacggttagatggacagaggaaatggatagcttcttctcggtggactgctgctgcccaatttgccctttctgtgagtcttagttcatcacataacgatcttcaaagattggaaatcgaagatgaggacaatattcttaaaaaaacaaaggacgcagtaatcacgctgcagggagttttgggagggaaacatgacaaagctatcgaagagtctctagatcactatcaggtctctagagatggatggtggtctgctctttaccgagttgttgaaggtattttatgactgttattcatttatgccgaattggattcagttctttacatttattttgcatgtaagctttaaattttcaaagggaacttcactacaagtagtctaaaatatctgaacttgcaaataactttgttttgaggtatagtttagttatctggattattgtaactggacaaacgtgttcacattaaaccatcatacaatttggggagttgaaaacttgcatggggcatttcggttgcatgggagaatttcaggcatttagattcttcgttagacctagtaacaaaacttctaatcttcgttttccggtcaaaagaattgtagttctggttaattctgaatgcttgttcttgataattttcttttctggccccaggtcttgctgtgatgagcaggttagctcggaacaggcttcaaaactcagaatttagtttcgatgacaggtcaatcgactgggacaatgttgaaatgtaggacaatagtgcctgccttgttcaatgatgaaatttttgtagctttaattgatatgtgcctgttctaataatctttccctttgtgaaaactttgttcttctatgaattactaactgaaaggtaatgttgtaccttagccgaaaaccctcttcaaccctgatttaaaggctattgttttcttgtctatgtaccacgttgtattaacttaccttattataatgcagtttttgatatttggcatggcctctcaaagttcgtttctatattgtgttcttgtaaattaattttcatttaatttttattaaatgtagtaaaaaaggtaacaaacaactattgtgtgtcaaatttgataggctcaatttaagcatctttttgcaacactattaaaattacatttaagatatgtcagaatgttaatattttactgctaaatgaaatctaacggttagatactttaaataccattctatttcttttaaacaaaagattcagagtaaacaccattatttcttttaaagaccatattttcttttaaacaaaagattattaaacaccatccttttcttttaaaggaaggaattacctttcaaaggaaaaaactaaaagatagaataaaactaaaaaaaggaaataaattgaatgcttaaaaaaaatatgatagtgacataaagagttggtaattaagtataagaaaataggtatagtttataataaaagtggttatattaaatttaataaggtatataagtaattatttgttttataatgtatccatgtaaatgtttatagtcataatttagtggtttcacatttattttcataaaaaggaggtcctaagttcgaatctcgcgtccccaatataaaaaaaatgtatctatgtaaatttt

SEQ ID NO: 378082 - DNA, 3090 bp, Cannabis indica
aactcccaaccaattgaaaatccttatagtaaccttcttagacaacacacactcaaaaaagagatgagaatgtgtctcattaaccattccacgaaccagacatataagagaatccattagaataccaaatctcaccatgttatctcttgtaagaaggtgagaatgaaccacttgccaaagaacaaacctatgcttgggaaggctaagtctacatcaaatgaacttgtagtacggcaaagggtgctgctgcaagaggctgttgtaaagcttggctgccttaaatctccctttagttccagcaactaacacactctccttgtcaaaccaatttcttaagtggcaaatttttctctagtaccaactagaattaggattaagtctatgatcccaaaagcaatctccctttaagtaaatgttattaacccatttcacccaaaggatatcatgcttattggaaagagcccaaataaactttactgaaatatctcagtttcatttggctccatctttgaaccctaggcccctaaaagattttgggaggcaaactttctcccaagaagctaggtgaatttttcggtttatttcctttaagcccccaaaggaaaccacgacaaagcctctccactctttagtcaccctttgaggaaggataaaaaatactcatccagtagttccttataaggtcaaggaggactgaatgaatgagttgggctcttcctgcaaaagacaaatgcctattaacctaagtatgtaatctattcttaatctttttaatgattaagtcacaatcttccatttttcactttgttggtctcataaggactccaagatactttaaaggaaactcaccttcttaaaattgaatatcttggagaatggttgccttatcatccaaatgaacacccccgtaaaatacttgggactttctgacattagcattcagacctgtcaccttactgaacctgatgagagcatatttaaggactctaactaattgcctatccctttgaaaaaaaggattaggtcgtcaacaaagtagaggctaacaatgcccaagctcttgcacatacggtgaaaccaaaaatcctcatttcgggctgctagctttagagttctagttaagtattctattactaacacaacagtaaaggtgatatcgggcctccctgtctaagacccttctcacctttaaaacccttctaaactcttccattcatcatcaaaagataagaggtatctttcaaacaaatcataatctagcttatgaacctagctgtgaaacaaaaagctcctaaaagatctttaagaaatctccaatcaactgtattatacgccttgctcaagtctatttttataacgcatcgaggggaagcattttttctcccataattcttgattaagtcctgaaaaatgaggataatatgagctattgatttttgtttaataaaagttccttcgttctgctgaaccagaaaaggtaataccccagaaagccttgaataaagaagcttagagatgtatttgtacaaggtagtataacaagcaatatgcctataatcaatagctttggaaggagaatcattcttaggcacaagagaaatagtagattcattaagctctgaaggaatgaaacctgtttcaaaaaattgatggacagcttgacaaatctcttctccaatttttggccacatcactttaaaaaataacctgagccgaatccagccggaccagggctcttctcattaggaatattaaacaaagcctgtttaatttctttaacagtaaatggtttaatcaattgaacttgttgatcaagacttaatctgcttcctgtctcaatacaactcaagtcaatttttgtaagatcaacttttgatacaagcatgacaataagtagtattttcatccccttcctaagccagtttattttactcttctgcatcaaaaagctatgatacaatttagcttgaactccatactgttcaacaacccttttttcctcttcttgcaaaatagcctccctaggatgagcttgagcaatcaattgaccctccttatagtccccttttgccttgtgaaactgagattcaatgtccccaaccatgtgtttgttgaactttttcagcacatgtttcaacctcataagtttcaagaaaacagccttcaagccctgcaagtcataggtttatcccaattatccagcaccatatttttctaagtccgggtgttcagcctagaaattaaaaaaatctaaatggtttagctcctatatccctgagagcaatagtctttaccaaataagaactatggtccgagactgtttcccagtgaaaataggatgtagtattaggaaaattgtccaaccaattctcatttttaagacaatggtctattcgagaatgagctttgacatcttgattgttggtccaagtaaaccttgagccagaattcattaacaggtcagtcaaatacaaagcaagccatttatttgaatcctccatctcagctctagacactggttgccctccattcctgtcatcagtataaaaaactaaattaatgtctccaagtaaaatcaagggttttactggaaacttcaacccagtaaggccttgccacaactccttcctttcctctataaaattaagaccataggcaaacgttgcacaaaaagctacttcctaccccaccattttaacacaacagtaggcatattgtttggtctcctcaagcacaatgacttgcacaaacaccttcttccataataacaagattctcccttctaaagccgaactagagtaatgcttccaaccatggaatctagagtctatcatctctaccattttattcccctttatttttgtttccaaaatcgcacaaagacctacattattaatacgacaacaatctaaaatagtttcttggttattattgctattcatttctctaatgttccaacttaaaatattgcaacactccatatcaattcgtaaaatacgaagtacctcctttctcctcatcaggttgcttgaaacgtccaggcttcaagcctccattgggtccttacacccacggaatgaatggctctta

SEQ ID NO: 378083 - DNA, 8436 bp, Cannabis indica
ttttttttaagaagaataaaaactagctaaaaattttgcaaaacactccaacaaaaaaccatcatagtcatgaacaggccggccacatgcataggcaggttagaccaacacctagggtccactcattttaggagcccaaattaaaaaatatacatatttttttattaatttttaaaaatatcatttatctttatagtaaggacctaaaaaattttttgtctataacacatttcaactcaagaccgactctcatcatgaaccaaagcgtgaaaactaataatatcattttcaattcaaatagcatcattcacatttaattttaaccaataataattgtaaagattataaacattattggttattaacttatattatcattatccaatcatttgttttggaatatgggctattattactattattttattgaaaggaggaatatgggatattattattagtctttatatatatataactattttgttgaaattattaacaaattacaattacataataaatataattagcatataatatacattgtaagaaaattgttaaacttaaaggcctctagtttggtgatctaaagctcaaacaagacccacatttgaccttgttcatcatcatcatcatcaatatcttcttgtagaaataataaatacattaatttggtttgaccaatcaaataattttagattgatattcttatcaactcaaaatgaattttgaaaatgcagtagtgttcttttaattcttcataaactcttcttgttcaaccgttatggaccaacttatcaactaccaactactacccacctaagaaaatatgtacatatacatttcttttgaaaaattaaaatttatacatatatgggttattattattattattattattattttattgaaaggaggaatatgggatattattattagtctttcccttttattgagaggaggaatatgttatttttaatattttattattaaatttagttattgtattctatcataaaccttttatatttttttacataaactttttacgtttatttttttgttggtttatataataaaatcaataataaagctattattattttatatatattaataagaatattaaattttgtatcaaattttgtaattttaaattaaaatacaatactaaaaattggtgcaaatatatcacaaaattattactaatgttaaatataacataatttttacatattctatgggtgagttgaaggttaattgtgatgctgctctttttttaagggagaagagtcatggcttggggtggattgctagaaatcatgctggtttgtgctttgctgctgttgccatcgaccccattgttgctgaagcaatgtcgatgaaggaggcgctgagctgggttaaatctaactgggaagaaggaggcgtcgttgaagagttttgtcctacagcggtggttatggagtcaaactgtcttttattggttaatactatcaatagtaaaagccaagttctttctcctcctagtcttattatttcgggttgtattaatcttatacggtccatttctatttttcatgtttcagttcagtttgttaagcgatctggatcaaaccaagcgactaattggttagctcgttcttctggttcatgtcttgatcgtatttccagtagggggtctatcccttctggtttgaaagcttattttgttagctgatttactttaatgaaagttacaatctttgtttaaaaaaaaaaaagatgcaaattgacacaacaaataattattactaatgataattcaaaaattgtattaaagtaagtcattaatattaaatgacaataatgtaaataaaatatatgtattaattgtatgctaaatttggagcaatactatattttgtgtcaaatttagtctaacttttagtactcgttaaattttacacaagttttagcacaccataaaaaaaaagttgcaccacttatttcgtatccattgaatatgctcttacgatgaaacctgaactattagtattatcaaatcatactttcttaattttgtgtccctataattatctatctaatgatattttgaatagataatagaacttagtatagcttatatgcatgtaaaaaaaaatgaaaatgcatagaaattaggattgtgacaagtgattggcttataataataataatagtaccataccatatctcaacatgggctccatttccatggtgaccctttaataaagatcattctgcatgacaaacaagaccatttcatatagagagttgtcacaatttagaagtaaagtaactaaaagaattatggactcttccattttctaattaagccatggaattaaaatgataaacacataaacacgtttagtacgtcgtattgtattgtattatattgtattgttagattgtattgtattctattatattgtattagtattatttaatactaatactatatttggtattgacttgtattgacttgtattaatagattatgtaaagttataatatatttcaatacacttgaccccaatacaaactacgggtcaaatctgggtccaagtccgggtccgagtccggggtctaggtttggggttcaggtccgggtttaggttccagtccaagtatgggtcccaggtctgagtttgggtccggctccatgttcggattcaggtccaggtccaagtccgagacgaggtctggggccagattcgagtccaggtcagagtctgggtccgggtctccatcttaagtccggcaatcgggtctggtctcgagtccgagtcgtgggtctgggtctgggtccagatcccgagtctcgagtccgggtctaggtccaagtccgagtcccagggtccgagtcggagattggtgttgacccctaatcctttgtaaatattatgatgcaagctaatacagaccattttttgtgaattgaataatacaatatacatacattgtattaaaaaatttagtcgtaattaatacaatacattagtttatccaaacatagtattatttattatttaatacaatacgacccttatacaacataccaaacaaatccaaaatgaccaatatagtcaccctatagtcatatatggtatctatattcactaatcttttatgcctttttatttttatttttatttttatttttgaaacactattcttttatgccttggatcacaagttatacgtatgaccaattatattagaatagactaattatatcttattttgaaactatagataattaattaatccattctaataaattatttgaaaattttgcaacaaaaatccttatatagctcattttgttgcattttaatcactaattacatcttttttttttgtggcaaaaatttttatattgtttattttgttgcaattaaactcttatctaaatttttgacagtaaaaattcttatgtagttcatcattagtagcaaaaatttcaaccgttatatatttgatacaatattagtctcttaaactgaaaacaacaaatgaactaatattataacaaaatgacttttgccactaaagatgaattacataatataaattacccctaaaaagattatctagggatttaagtacaattaaatgaacaatataagaatttttactactaaaatttatctataaaaatttaagtataacaaatacttatatagcaaatatctcctattataatagggttaatataacttagtgtcacactctcctaccttttgcaaaaaaggtaatatcttttaaatattaacatcaactttctatctacataaataaatatcataattaaaagcaacaataataataactcatggtccaccatacatgactatacttgtgattgtatgaattttgatatcttattcaattgaaatataaatctgtttagacaattttgtctaaaagaaaattacattaaatgtaggagttttttggtagtgtcaaaaccgtaatgaagtttatattatataaatggttacttcaaagtaataaataatctagtattgataatgacttattaggacctatttctctctttcattagagaaattaactaaccctctcatattttaggtaaaaaaaaaaaacaaataagtcactatttgaaagaatattacactaagagccaaagcaaaaaaaaacaaaaaacaaaacctcacaagtcaatatcttgaaggtttggtttcaccagatgatgggagatttctcatcattacctctttttgtttttcttccttccctttacttgcttttctaaacttttaagcctctggctgataaccgaggttgaagaaattcttcggtcagtaagctttgttggttcagcagttgtcgagatttgttcctgtgtcattgctggaaattgtttcgtctgtgaaactgacgcaggttgtttcgtcggtgaaactgccgtagattgtttcaatgatgaaaacaaagatgcaaaggtagttggggttgattgttgggaagtgcttgcctccacaactggtacttcaggaataccaagaaacttcttcacctcgggtcttttaagcgctgcccaaaattttcacaaacagaaccggtcttttagtgtgcacaacaatgaaagcttcccacaatacagaatacataagatgcaagaaaatcgctctttattgccccaaaagtggcttgaaaaggacttaccaagaccataaaaaagcgaaaagatgttggatgtaatccagtaacagaatatagcctgcatagtcaaaatgggagtaaattcatcattctgtccttaatgtaacactcttcatcaagtcataaaattagtaaactcgggagtaggacatttctgcacatggctcaagacaaggtggttaaagcttgaaaaggataccgacccaataaaatgtacttgaaaatttacctgtggaaaactagctgtgaatggaatcgtcgcaactgccaaaccccttgaaacatttttcatagtaccagcaataggatttccttccaaaccttcttgcatattgcactggcgaaatgtacgaatttagttagttaaactcgttaagagtcccctaaattacatgttaataggagttaacagaattcgaataagtaagacatccacctctactgtaattaaaaacgacaatcctgtcaaaactggaagtacgtataaggcgtctggaattgtgaggtcaacaaaccagaacgctccaccgcttttaaaggatggcactttttctgccatattatttatctggaaaagatgcaaagttatcagagatatttagacaccaccaactcaaatagtttcatcattcaggtaatcttaagggagcaagatgtatcttactgcaaggaagaaactgatgaagacaggaccttgaatgaagagaccttttagtggagtaaagggactaacaccatacctacaatgcccaaagaaacaacaaaagttatatcattataaataaactgtaaatttgttcaaattttcctattcttatattcagtaagctacgattcaggattcaaataatatagaagtaaagattcaaagcccagagttgttgggcttatacactaagcctttagcaataagctacacatgaaaactagtcacttactcatgaaaaatcttctgcattctcttttgaccctcaatggtacttatgttctgaaaaacgaaaaaaaaaattattaaatggcaatatcttgaagcatgtaaaactaaagttcacagcagaaatataagccagagacttaaagcttaatcgctagtaggttatcagtggtcagagaatacaaaaaactattaacatctagataacccttaaacctttctaagaaaacgaaaactttagtatggtttggacatatcaacaaaaatgaaaaataataataatgaacaataaataaatctaacatcagacttgtatatgagttgtgaagtaggaaatactaactttcgtaaaaaacatgccaactactaaaaaaaagtgaggttgtttgagcttaattagtaaaacatcttaccccctcctgcatttgttgcttaacatcctccaggtgaggcctcataatctgcaaacatcccacccacaattataatcacaataggtatgcagccataaatacaagaacaaaaacaaacttgcagcagacttttcttcggtttaatccaaagctagactagagtatgactaaatttaaataaagaagatttgtgttgtcttctgaagcaagtaaccaactgtatctatgaggaattcaacacggtcataaccatatttggggaccaggaaattatagcaattgctatttaggtactcaaacctcatggaagcaaaccatatgtctaaccatttgagttttgggagaaatacatgcttaataagactacaaaagcacagagcgagaaaactttggacgataattaaagatgtgtaaaacataaacagacagcaaaaagattgccatcaaaagaaacttgaagcaaaacacaatcatacacctttgagtttacaacatacttatatttttaagctaggctccctatctaacaaaacaataattgaccgcgaaactatagaaattgctatgtatttacctcgagtttacaataataaagtaggaagaaaactggcaataaacatgaaaataagttcataagaaaatgtggcatgaaccaacaacaaacataaacttacagatagcttagaggtagctttaagttgatttattaaaagtggaatagttgcccctcggatcataagcgttgttacagcaattgcagcccacctgaaaatatatacagatttcaaatttcaatatcatcaccaaaatagaaaaaacaaaaaatgatagccttaaattgaagaaaaaccaggagatattgcacctgtgcaaatatgtacagatcaaatggaaccaaaaaaatatacacacatgaaaaaaaggaacttccacagcaaaccacgatcatcacatactgttctcttaactctctctaacaagtaaactaaaatctcaacttaagacaattagtcataggggcgacaatttgtgtcacgacacgcgaatttgacacacatgaggttttgtgggtttaacacgacacaagtattatgcgagtcgtattcgtgttttatcaatttttcgtgttacgaattgtactcatgttagccatataaaataaattgaaaaagtccacatgacacaatgacacaaaaacattaatttagcttacaacgccaacacaacataaacgtgggttcaacaagacacaaaattatgtgagttgtattgtgtctgtgttttataaatttggcaatttttctgtaaatttaagatctcaacacgacacaaattcaacatgccttcagacatttttttcatcagcaatttcaatttttaataccctattaccataacagaacaagaattaattccaaactcatatataaaagaagaaagtcatctcaccaattcaaaccaccataagtatgaacagcatcaatgagatactgcaacaactgaacaggcaagtaagaatcagcagcagcaatggcaacttcatcaaccgcagggacctgcgaagccgcaacctgtacagccgcatcattgagaacctctgccacgtcactcactatcccaaagctaaccgaaccttcatcaacattcgtcgacatataacggtgaaaagcaaaaccagagctagatgatatcaaagctttcgaaaatcttcgatcttgacaaaacccaccaaaacccccacacccaattttactaactccatttccaaaaaaccttttctgtgaagaaaattctccattaacgggctgaggcttccgatcgtcgtcacggagaatatgaaaaacagagggatggaatttccgagctacgatagtggctctcgtcgagagactacgacgataagccattgctgtaattgtaaattcaaattatttaaggaaatttcagatcttgttaaaccctaacataaccctaaaacctcagcttaaaatcctgattcaatgaaaagtagtaatagttgcagaagatttttacctgaacgaggaagagggaagcaagttcgagtcttggggcttcgaatgagtagatgagtgaggaatcggaagctgacgagttgggcaactcagtccgattgtattggaagaaggctgtactcgccggtaaaaggctttagggctggtcttgatttctaagctcaggcccaactaaattcttggcccatttgtggtccactattattggaataatttcataaatacacaccaaaaaaaggattatttcacaaatacacaaaaataactaaaagaaattacaaaactacagttatataaaatttaaatatttttacgatttatatgattttatttacagaaaata

SEQ ID NO: 378084 - DNA, 4144 bp, Cannabis indica
aagaaaaaaaaaatcaaatcatgacatattaatattcaggaggtagacaaaaatacagaattcagtaatttttaatctgcgaagagacacagtaagcgccagaataatagattcaggttctgacagaattaagagatagtagtatagtagaatagtgggtgtttctttttaattaagatcaagaaaaagatatccaaaaaagcatagccacagattataaaagaaagataattttgaaccacaacaaatatacatttatctaaataaaatgaaaaagtagttttaagtaccttttcccccatagctatgaggttctcagatctgagcctcagccgaaatggtttgtgggaattatttaatttagagtagtagtgggagagtggtgctacttctatgaggaggggttttaaagtgtaggaagagaggaaaaagctggtacaagtatcttaagaggatataaactataccaaattggtgttaaagaagacgcaagcattgcattgataacaaaataaagaagccaatgggaagtgaacacgtgtcgtttggtgttgaaattcatgctatcattgacattgtcgtgacattaggagggggatgctaagttttttgattgctgcctcttcaatctttcacatctgcatgtgcaatgccctgatagacccacctcaccttccgcttaaaaatttaataatattttatgaaaaaaatgttataggacattttaatagtatcttaaattacaactaagaaaataacttaaattataataaaaaatcttataataatctaacatataaattattttaaaaaattaaaccgtaaatttaaaaaaaaaaattaaaaaaataatatatagaataatttctcatattttttgtgtgatttattttattaataagaaatgctataataaagttgtataatgaaaatagaaaataaaaatatatacttttaagtaaaaattatactttcataaaattaagattgttaatataatgcagttagttaaaattagtaatagtattttatttgattaatgaaatcctaaggtacccaaagtttggtcaatagcattaatgggccatgacatattgacatgtacccccacatggcaaacctttccacgtgtcttccatatgtatcgccactggagtcggaaaaagatttggtattagcttaatttggtttatgtttgaaagaggtgagctgtgaaactttgatttattgtggttgttatggtgatggtggtgatggtggggaattggggatgatgatgcgtatgtatgtatgcaaaactaattaggaattttgtcctttgtgttgggttacacccaagtgtcggcccaaaatattaaaatggtggaacattgttacattacacagacgtggggacattaacttcaaattacactattttccatgttaaagtgaaagatgtcaatactacttcaacaaacaacacaaaataataataataatataataataaataaaaattacgtatatgtcaaagttcaagggaaatttttaacggcaaaaaaagttcaaggggcatgattaggtatatgtcaaagttcggggggaaaaattgctaattagcctaaactgtttgtaccattctctctcattacaataaaattcgaattcattcacttccaaaaaattacctttacctgtcttcctttaatttttattgtaacctttcgatcaatatgtatcaatttttagtattacggtttttgatctatttttaaaaatctataaatttctcaatgtatgtatccacaaatttttaaatttagatttagtcttgtgaaattttttcaaatgtgacgtttagtcatgtaatctcttaaaagttattcgttatatccactttttgcaggcctaaacatgaaataaaatgtcaaatacatcttttataaataattagccataaagttcttatttatcttaaaaacaataaacactatcatctatattcattttctaaaaatttaaaatcaaaatgaaaaataatgccaaatatgttcatatatatttgtttttttattttcactatcgattaaaaaaaatcaaagtgtaattttcaacaatattaacactctgaattggttgtcgatgtggcacaagacaatcatactgtttttttggtaatgtaaatgattagatcccgagtggaagtaaaagaattttggtcgaacagttgaaagtaaatgattttgtttatcttttattttaattaataaattttggtagagaaaatattaggcggcctcaatcatggctatggcacgaaggtttctagtctataattatgggcctttcatttgatatcaatccaatctgaatgggacaaactgcacggaagttgcaccttccacttcggcttcataaacaatttatttattttttttataattctatattattctttggtggttagacaccttattttttctccttcttcttattaatttattaaagaaaaaagaaagggaagaaaaaaaaatcattttgtttgcattagcgcaatgggaatctgagagggccacatacacagttcacttctacaatttatgagagggtatctttgtctatctgctgtacaattatacttcttcttctccttcaattggttttgcatattgctattaaaatttcaatttggctctatatatagaaacctatttgacattgatttgactattttgttaatataccaaactttttcaatccacagtataaataaatttgggaagatcaatttactaaaatcttgaaaataattttagctggaaaaaaaaaaaaatcacaagataaacttatatatgactcaactctcacatgatatgaagtcaaattatatatgtctatttttggttgcttaaccccaaaacagacagagacgagttgttatttgagtgcatgttgacgacgggaatctatatttattactacatatttgattttagttttcgtttatgtatatggcattttgtgttcatcaaatagttaattcagtttaattctcacgatctaattcaattaaatatgcacataagtatgaattaaattgaattaaaaaaagtacaaattgaatattaatttacatcgtaaaatttaattaaatctatacatatttataaaaaatttaaaaaattatataaataattaaaattttaaaatataaaaaaataatttaaaaatttaacacatatgatataaatatatttcaaaactcaataactcaaacaatgacgaacccagaatttttattttgtgggggcttatttatcattaaaaaatatttatacctatattataatcactcttactagatttatttaattttgtgggggcttttctactattttagtctacaattatcaaattaaaaaaaaatacatttaattttttaaaatgcaatatttttgttagtgggagctatagcccccatataagcactactgggtctgtgaactcaaatatacattccattcatatatattttacattaaatatttcttcataatacaatttttttttcttcttttgaatttgttatttgttattttgtttattttaaattattgttggaagcataaaacaacactaatttactttattttgttgttagttatataaattttttttataaatattaaataatttaatattaaaaagtaactcatcttaaatatatgatctaatccatatttttctgaattgaattggattagatttaagtatttgtgcaatgaattggatcaaaaatataaactctacaatgtgaatcgaatacactataaaaaatagtacggattagataaaaagaatactcctaactattaatttctctatcccattctgcttggtttgtgttagactatttgatgttaattaagctcaagtagtaactctatgtaattataataagagggcatcatcccatctgttataaaaacgaccaaactctgaatacttcagaagtgtcatcgttctttatatgatctgttaattattacttagaagagctgaaaaccctgtagaaattgaacttattcaaataattatgatgtgttggaactttgtatgaaattatgtaaaaaaagaaaaagtgaagtgtgtgagtaggagt

SEQ ID NO: 378085 - DNA, 5363 bp, Cannabis indica
agagagagagagttgaaaattgtgtacaagatcactagaaagttaaaaacataggtgaggtgaccgtaattgcatgcaagagtttcaatatttgtaggcttttctcatttcatttcattactaaactatttatctattagttttatcaagaaaattaacagatcagtgtaaacaaactctgtttgattggaaaaactcttagatataatatataataacattactgatcaacaatagcgcacatattaagaaaggtggcaacttttaatgggttggtatgcaaatcatatacattaaataagaaccaatgaaattcaaaattaaataagtgacaccattgttttttattatgattatttatacattaaactcttgttcatatatattatatttcctaccataacaaaattatacttaaataatagtaatgagaataaatagatttttttcctcctaaactataccacaatttcaccgtataaaaaaaccaacttgacgtgttgagaaattgatatgtaactatttcactctctaaactatcattactgtagagttgtgctctctcaataattgtaaaattgtgttccctaaattattattgaattgtcgaattattacaactacaaaatcatatccttaagttttggataaaaaaatatgatttggtattgtaataatttaagaagaaatatatattctaatgataataacgacaatgtaatctcaattttataatgttacttgaatattttatattattattagtattagttatcatatttactacattaataactttttatccttttctttttattatacttaacagatatatttcttagtactataataatgctaatgtaaatcaaaagaccgtatcaactaaatctctaggcttttatgtcaagattagtttagtgggtttgttgtggggtacgttattattgaagtacaagtacagaagaggactgtttaaagcttcaaccaacccaacccactacacaacaacagtactaccatagcatagcagtcttaaatctcaattctcaaacaaagggattttggaccatttgcagcagcagtagcatgcttcttctcaaagttgtcttttagtgtctttgcatttactccttttattatttcaattggttaatatatctttagaagaaccaaaccaaagctctcttatactatatagtaatactaatagtacaaatatcctttatgatgataaacatatataatgttattgattgctatgtaggatgacatagactgatatgtactcctcaatttgacagaaatttgggacccagatatttattccaaaggatcacagaagggaaaaaaaaaagtttcactgaagctgttaatggtaggcaaaaggatttcttcctcatttttcttttgtaatataaataaattataaaatataattataaaaaagctcaagttgtcgcaatactccaaccccattattggttctagcatctgggactctttttatccttttagataagcaaccaatttgtagtcatcaataagtataggatggcttgagagttcctaaagatttggttgcatttttctctgcatttgattgtgatgtctttatagttggaagcagaagcaagcaagaaagagatagagatttaaaaagctggaccaaaaacagtctgatatgagagcatagatcagagatgagactatataggggcatgtggtacaagtagctaagcttcatcaaaatacacaaccaccatggaccaccttgctgataccttgtgcctctttgccttaaatcttttttactttaaaagttgtgcaaagtgtagtacacaagtttttgtactctttcttcctgaaaatcagaaggagacaaaataaaatatttatagaaaaaaggttcaaaacagtggctaccagtattgactaaatgatctgaagctcagagaagtagctccagctagtttctctacaatctacatactagttagagtagttaagtcatagctctgttgcttcaatattcatagacaatttctatttatgatggcagttcagaaagagtgggagaacctaaatcttgtataagaaccgggccttaatgctgatctttgtggactttagattccccagattttactgaaactttaattgaggtgtacgagtttggaaaaagaaatacaagggtttagcatgtaagccaaagtgatcaccaaatcccaatttatgaagatgagaatacagttctaccatccaaacaagtgacagagaaaaatctcttatagtaagtgtgacattatataagttagaagattaggaaaatactaaggggatatcacatgctaatttggaatgaccctataatattaaattctcatgtaatcccacaactttattagtttttgtggtattaagcaccatatccatatatactctatagcaatgctcctaaaaaaaaaagaaaggaaaggaaaggggaaaaaaaaagactaaaatattatcataaaaggattgcatacccagaatggatctatgttcatgtctaaattgtcattcctaactaaaatgaggcctcaagagagtcttctccgtgatcgcctgcttcttgctggtgtgcaccagccgtgtccatctcccatctttgcttggttcttcctgtactctcttgatctcaaaactccctcaagaatgttaatgtcttcgcaaatttcatgcctagatagtgatgccatgccaggaagtatatctctctggaaatctttcaatctcctgccccttcttatcttgaaaccataatcctttgtctctgtagcatttacatcggaagactttgatgacacacaaaagtcgtcattgctgcattccttaagattcagagtgaatagttcaaacgaatcacaagaatattgtggcatttctctctcagcagcttctatgtcaattgatgatgcatctttcacagaacaatcttgataaacagctgagctctccaatgagaagtggatgagtgactcagctgccatttggatggaaacatcaacttcatctgattcttctttgctgaggaggcactcatgagtgagttcactgctgtcagaaggccttgggttcttgtttcccgaaagcctatcagttggtaagggattcaaaacctcaatttcggattgcatagtctctgcattactggattcattatcgccaaagaggcaaggtatgcatggtggtgaggacaaatttccatgtgcatctcggatcacatccttactatgatctgaataagtaaataaatcactttctgattttcccttttcatggttcactgctaaggtagctatacatgtatgagtttggctctttgagttctccaacatatcatttatatttacatcatgagaatcattcttgttgcagtcaagctctaactcttcacaaggaccacggatcacttcactgccactcaactcatgaaatttggtatgtttagcacacatctctgttctttcactactgctatttaaatccaccaatgcaaaatttccagaatcatcaggatgagtaattccagaagtttcatcagagcaattgttacattctttaggacaagctttagaactagaattgccctcctctaccgctactacgagagtaagtgatgagctagctgttgaaggattagcagtcagcatgggatcatttgaagagttacaagagtcatcatcatcacaacagattttgttgaggtccacttcccatttcccatgtgtacttatttgctccatcttggttgatggttttctgttcaaatctgcataaaggatcaacaagcaggtttaaagatgcgccaaaactagtgtctcagaatttcaaaatggtatcgatattatgcatacactacagctagtttcgttatgtaaaaacgattatataccttgatcaaaacagctcctttcagggtcatctagaaatgtactattctctacagtctcatttgattgatctttcttcagactacttgtgatgattagatcagtcatggtaacaccgttaggaagtacatttcctgaatcctcattcgatgttgttgcactcgattcttctaaatcaataaaattctcagagtagggatgtacattgacatcaaaccaagtgttcttgccacttttatgtctcctgatatcttcttcgaccctcagggaaagcttcaaatcctctgaacctgtaatattaccgtgacaaagagaataatacataagccaaattgattttcgcaagtgatcagtatagttctacattttaggtgatgatcttacttaccaacagtacttatgtattgcttggactgaagaagtccatggtcaccaagaggttgcatcagtgtcttttgcatcccataaatgcgatggagttcatgaacctgaggacatatcagtagtttgggcttaggcatcctccttagatacacacattgtgaattgcaaaaattagagaccaaataaagagtgttgttctgttcatacctggtttcgaaatacaatttcctgcttgagcatagtttccctgaaaacttctactagtgaatcagtatacacacgaggcgaatcagtacacatgtcaaccgaattcagatcaaaatctcgttgaaacaacatccttttctggaaaagaaaactgaacaagagcttttgtgtttaagcagcacaccagctcttggaaaatattcccactcaaatcttcatttggtacatcagcacatctctctctttctctcttcaagcaatgctaatacactaccaaactatataggaaaggtccttttgttaataaacctgaaacaaaaatgtctttataagctacaatctcagaccagaaacatcaacattccacatgtttcatagtattttcctaaaattcatttgtgtatataagttatgttatcaccactttcactttgcaaacatttacatttgatcttataaaacaaattattaatgaataataaagtaactccaatcaattttgaggtcacagaacacaattttataaagcacgaacaaattaaatctagaaatgagaatttaactcagtttagaaaagtacccaatggaaaaatattaaaaatctccaataataatcataataatactagattgctaaaaatcaatctcctcatttgagtcacaatttaaacttctgcccaagaaggattatttcataatacatatatactgccaaaggaaatattgctattactatcatgttcatttatatataattaatgcctaataaagaaaagaaaaaggctactggttgataataaagctgaaatattttaaatatatatatatataataagaata

SEQ ID NO: 378086 - DNA, 1399 bp, Cannabis indica
ttttatcaagaaaataaatttctattaattacaacatgcatacaatcaaaccaaaactcccaaactggcagcagcaaattcgttaacatattgaaaggattttggggggttgtccaatatatccatttcaattaaaattcgagcaaactgaaccctagagaaatctttagtgtgtcggtctaccatgattggttttccaacagtactaactaacacactgaggtttttattttcccaatattgaagacctaggccaaataatcgaatccagaggagcacagatcttactattttaacagagtttaattttgatgtccacggacgagtaataactggcttcctatcgaactgcacaactctagcatccagcacttcgtttcttgttgcttcatcattgaaacgaaccattaccatccccctggtcattctagctatttggacgattccaaggtgcccccatgtcctcttaatgaatccctcaaatacagtcatgggagggttagctcccaatatcatacaaattatagcagcattctacaattcagcttgctctttaatttcctccagatccacttgagcaattctttgaccattcttgatcataagttcagtgtaggttaatttggcatcagtatactgaatcttctctttaggaaacgaagtccacaaattttttgtcgattcattgtatttgccctaattcacttcttcttcttgctccatctccgtttgtttagcccaactaatactcaccgaaggagtgagatattcagcaaggattggtgaagatccaactccttgttccacttcctctgtttcagcagctccatgaaactcagtaatttccttgttcaaacccgtggaaagcctatcctcttcatcagtttgttcggtttggacaactgctcgattcgccggtctgcctggtcttcgcacaattctcttcttcttcgccaagggagaaggagagaacatagagaaaatcctatttttggcaaaattatttatttttttttgttttgatgttttatacgccaatatactgcctttaattaaaaaaaaaaaagaattgtcattttttgggcttccacgtgtctttccaagattaaacctttacaaattttaaaagttttttcatataaaaggttttatgttgatatatacataaacgtacatattttctctctaatttatatatataattttgatttaattgagttgtcaccttttttttatttacttatatattttcttacttaaaattgataatgataaagatgagacccatatgttctctctccatgttcatcctattttctattatctctctccatgttcatcctcttcttcttcttcatagggtttctttctctccttttttttttcaaaaatccataca

SEQ ID NO: 378087 - DNA, 7499 bp, Cannabis indica
tttgtagtttgcttccttagttaatgtcattattttgtggcaatttagttttgttgccatatttatcataagatgactcaatttttccattattttaaaaatatacctttttaaaaaagtaaaaaaatactttaaacgtataatatataattttttttttttttgcatcttctgtattattctaaaaaaaaaaaaaaaattcctttgaaaattatatatattttttattaattttaaaaaatcttatatttttttttctaaataatgtccaaaaatatattttatcctataatctaactatatttcagggttgtcctgtctccaccaccatgccataaacttttttatttttttttgtaagaaagtgactcccatgccatgccattaactaattaacagcattaagtaactaaagattgcaaaagcataaaaatcaatatatacaaataaataataatatcttcatctgaagatagattataattttttaaaaaaaaaaaagtgagagagaagaagatagatggctctacatatatttttagcatattactgccagttgtccacgtggtggtgggtacaattactttttctaacaacacggttccacaagctcttggtgttttttgcaagaacttcaaacaatttgtacagtgttatctgacaagccatggttgtcaaatttgtagtttagcagatttgaaaatcgtagtcacgttccatcttcggcctggattttttaattaccgttcgtttcacacgtcgtaattaataaaattcttttaaattaactacccacaaatccgtataattaatatattcaattcttgattcatatatttcttttactatcttatcatgacgtactataataaaggctttaatatatataatctaatttttagtagcacaatttgtgcagttacaggattttggtacgaaagcacagacgccaaagggcttgttggggagctgacagtcgataccaaagcagcacggcatagagacgcaagtggcgccggcgcagcacttgcagagcaagcacagctggaacggagccaatctccgcctatagctgccgactcctattgccgccgacatgtttatgaatcgatacgcagtcggaccagcaggaaccattggctccgtcgtttctagttgcggcggcttcagttctgagattgcatggagtcctgcatgttggttacatatacgtatttattatgattacagaacatatatatatgtatgtagaagaagaatgtttaattaattgattggtgtattttttgtacctggaattatgatcaattgaacaatgaagagaactaatagaaccactgattttgtgaaattgttcatttttgggagagaggaagacgagtgcgttggggacaaaatttctgaatgaaatttgagtggttgtaaggaattgagagaaaagattattgttattgagaaagtaggacaagtaatatcggaactgttattggccactcaactcaaagctgtttttccaattatatatctatatataaagacaaggttgtaatgtgggtttccgggtcgagattatgatcgcaacaagttacaaaacccgaaccgtatattttgttaacgggtccattcgctaagagataaaaataagcgaaaaaaaaagtatgtcgtttaagttcttaacatctttattctcttgtaatgttcagaagagtgattcttcagtttaatgaggagttgatcaaatgctttttctttacattccgcttttaataattaaagcgacgaacgagtctgaaccagattttgcactcagtgaggaaatttgacagtacttgagtacaccgcgtaacatgtactcgattaatttattaattttctggaccatttttttttaccaatcggatcatctagaaattttggtctatggaaataaataaataattgtgcctattgtgctagagtttgggtggggctctccttctcctaccatggatttctcttcttctcctatgctctccaaggaagagccttctaataagtaatgctctcaaatcctcccgttcatggatgatttattgaataaaacgtgacatcatacggttgggaagttaatgaaaatgggtatacagaaattgggaggctttgtttggtcgaacgtctctgcacgcaaagccattttgtcattctttactcaagaacatattgtgtcgcctgtggaatttaggggaacaagaatcggagcttaaaattaagaagcttcaccgactgcgatcttcttggcactttcttaaaaacaaagttttacaatggaacgtgttctgggtcgaataccatgggtactcaacactggcttttttatccttgaccgaatgaaggaaatttaaatgagttgggatcacgtactgatgaggttttcgatagggcgggtgttgaatctccttgttcatgccataacaaagcttaatatggaaagttggttggcatggcaggggagttctttgaggtgcaagactctaatcctcatcgaattactctgaatgggtatttttcgtttcaaagtttggagctccattcgatccaagatatttctaggattcccatttcaaagtgttggaaggaaggtttggctcaatttcaatatgataaattttcctatatatgctaaaattatggatttgtcgatcatgatctacaattatgcggtacggggtgagccatgattgccaatagggatggacaggatgtctctgtctatggttcttggttaaaggtcgacttcacagggagagggacctagagctagtaggaactaagcattccaataaacgagtagaccatcaaactcgtctaaccatatggctcaccgcgagaacaaggccaccactagcctcaaatcaactgacccactaggcaccaagccgccccaatctaattctattaattaccaacatgaactaataactgctgggaataattatcttacagataagaaggtacagtccctatggggctcttcatctcatggccacaatacggaaatacatggagaacagttgagcattccttcagtgaataattcaactttgaacaacagtggaacctaagatgggagctctcgaaagtgccaagggaaggagcatatactatcagaagagttgtgggccaaggattcttgtatgtgcaaggctcgaactatggcaacaattttgcccgagtcatcatcttcagggatcttgcaagatatgcctattaatttttctttgggattccctctatgaactatggatattaaagagaaaagatgcaaagcaacgccaaagcgtctgggtaagagcagaagtgttactgctaaaactactagtttggagggggctggattggtagtgcccaacgcgaccctaaacgcagtgcaacacacagaatgcttttttttggatcagattcaacttttatagatgacctttcatgggcgaactttgctgggaagagtcgccaaccccaatgaattcccttttatataatgtccaagggctagaaaatccttggaaagttaatgcccttttggctcatgttcaagactacaagcttggaattctatttttgtccaaaacttgttcgcaaagttcttaccttgaagtgttaagaaaaaagttggagtttgatggttgtttctgtgtgaatgctaaaggaaaaagtggggctcttgccctactttggaagagctatcgtttgatgctagtgtctagtcttttaatgactttcatatgatgcctttatcagtatgtttaccgatctcagctgacgctttatgaaattctatggggatcatgacccaaatcaatgaagacactcttagattatacttcgaaggcttgttgatcgcttcaatggtccttggatgtgtgtgagaatttaataaaattttgaggccttcggagaagaaaagtggggtggattttgctccacatcgaatgaaataattcaaaaatgccactaattattgtccttttggggaaatagactttgagagtagctcttttacctggtgcaatggtagggagaaggggctaatttttgagcggttggaccgtgtctttgggaacccagattggtggaataaattcacctgtgtccaaagtcaaacatctacacagatggtattcagatcatagtcccatgttgttagtcttccacactgtccctcctgatcataaatgactacatggggctctcgtttccattacgaagaagcatgatctgataatatagaatatcgagacttaattttaagagtttaggttcagggggtggctattagtacttcgacgaacttggttcatttgttcgataaatgcgggcatcgtctgggcagctggaataagcggcagaaaagggatagttaggccaaaacaaaggatatcaagggaagaatgttctctctttctacttgcaccactgttgaggccttcgtagggctgcagacacttgaaaaagctctcaatatacaacatagaaaagaggaaatgttttagaaacagaggattcatgcaacctggttagcccatggaggtcaaaatatatgttattttcatcactgtgctttttcccgtagaaagaaaaatgagattaaaggtatttttgacaccaatttgggttggcaaacttcgaagacagatttagagatttagaaggtattatttgtgatcattttcaaagcctctttacacaagttagcatcaagcggcccgtattaacctcctccaacagattatccctcttcggctaagtcaaatacaaaatgagaagcttttttaagactttaccaaagaggatatcaaagtagcccttacgcaaattgatactttgaaagctcaaggtgtggatggatttcccgacttttctatgaccaacattgggacattactggtgaggatgttactcaaatttgcttggatgtgctcaattatattttggactatagctatataaatcacgccctgttatgccttatccctaaagctactcatcccacctttgttgtggagtttcaccccattagtttatgcaacgtgagctataaaattatctcaaagtcgttgctaatgattgaaagataacttgcatgaagttatttcagataatcaaagtgcttttatcctagggaacctaattcaagataattccattctttgctttgcgagtctccactggttgaaaaaaagtggggtttggtaattggcagaaaatggccctcaaactcgatatgtcaaaggcctatgaccgggtagaattgtcattcctcgaagcaataatgatttgtttaggttacaattttaggtgggtctccaaaatcatgaaatgtgttcagacagtgtctttttctgtccttattaatatagatactgtggtaatattcaaccccaaagggggttaaggcaaggcgaccctcactcccctatctctttcttatttattccaaaggtttctcttgtcttattcaggaagtcaaacgggcagatatgcttcatggggctaggtttggtcattatggtccataaatctctcactaattcttcgctgatgacagttttgtgtttctcaaggccaataccgaagaaggggtcatttttaaaacttgctagatgaatattcaactttgtcgagacaaaaaattaattttgacaagtctaaactttgtgtgggtaaaaatgttaatgaggcttaagggcaattattggctgcttctttaggggtgaaactagtggattgtcatactcgggatgccagcttatattggtcatcaaaaaaaaaaagtctttgaatctattctctccaagattagaaataagcttcaaggctggaaggctcatttatcctcgcaagctgacagagaggttctgctcaaagcagttatccaagctataccattttatataatgagttatttttggctacctaaggagttaatccaggatatctactccgtgatggcttaatttttatggggctcctcaacaaataaacaaaaaaatgcattgggggtagctgggataagctttgtaaacccaaggcagctggtggaatggcctttcgggatcactctaagttcaaccaagatatgttagcaaaacagtgttggaagatcatctctcaacccttctcaatgttgattcgggttcttaaggagtgttactttgttaatgggacttttctggaggctaaatcaagtggtcattgctcttttatgtagataagcattctttagggccataaatatttgttgaaaggtgttcgttggagagtcaaatcaggtcgaacaatgcgtgtaaatgaagacaaatggctcccttggctaatgattttttctctcaaaccccagccaatattcctccaaacactactataaaatgtttaaaattgatgacagttcgtagaatgagcagggtgtagtagatactttccatcaagatgatatccttctggtgtttgaccttgctactggtagtctcagtgtggaggatgacatcacttggcactattttaagaacggtatctgaactagtaagagcgagaataatatgacggttgtctctccattcaaagtaagcagctcttctaatcaagcaatgaaataatggtggcatactgtttggcatcttgaggttctcccaaaagtaaaaaatttcctttggcgcttgtgtacagggtggctgcctttgggggtatatcttaatgagataggaatgcaagtagattcccaatatttttagtgtggttatagtgaagagacggtggctcaatatttgtggttttgtcgtgccacaactctgatttagcaaaactttaacttttagcagtttttccctactcgctacaacaatgtgttagacttttttttcaacatcctcaaccaaactacaatttaacaactttctccttctatcctagttggtttggaatcgttgaaacaagaaaaggctgaatcagttgcattattcaatggaaagatggataagttaggcacaaatggccttggtggattttcaagagtagggtaatatctctgtacagattgacactactggtagcctgcttcttccaaaatggacttcgcctcttatgggttacttgtgtgttaattgtgatgcagtagtgcctcatcttgagaattgctgggggttggggtgataattagggactcgtctggccatgtccttgctagtgaaacgcataagcagagagggagattctcggtggagatggctgaaagtttagccattcattttggtctccagttggcatagtgtcttaagttgcaactgattattcttcagttagattccctcgttgttatcaactatattcaacaagtttctccatatgtcaatgactggagtgtcggcattgatgagctcttgtcctttgattatgctaaaggttgttctggctttatccatgtaaaaaaaaaggaaaagtatagtaaatggccccaaatcatagga

SEQ ID NO: 378088 - DNA, 3781 bp, Cannabis indica
attcaggggacatttttaacgatattgaaaattcaaggaatataatttggtatatgtcggaacaaaaatcctaattacaaaattatcaaaatatatcattatcccaattatgtcacttcatttcattggagatcctctctggtctatctgcaccaccatccttttctggaaaaccaattttaaatcttcctcaattggggtcgacgctacgtaccacagccggagtatttgacgatgcttactgccatcgtcggagcttgaagcttgcttttatcgccagatctgagctaccacaactcggagtttgacgacgcttactgccatctacagagttcgaagcttgcttctatggccaaacctcgacgctaacgggtggagtttaaatgccgatttggtggacagattaacaccatctgtagagaaagagagagctacatacatggtctgtattttttttcacaggttggggattgcttttcctttagttttcttttgaaattttagtgtgaaatagagatagaattttattaggttgactgcaattcgggagtggttcgaattattatcttaaattccgtagttgttagtctcccttgggccactctctcgatcatatttcacctttctgaaaactaatactaatattggtttgacagcgaaaaagagaagctgaaagacgaaccactgaatcgggtgatgaacctccgaatgacctggtaacgtaatctccttcttccattgatcgatttacttttgatttcctcctcttagtcttatacttacatgtactgattttttcttttgccaacactcaccaattgtttgtcaaaattactcaaccaaatagagatacttcattttccttttcttcattgcctccatttattttgagaaaaacttggggatagagatttgataaccttcaaagaagaattcagtttgtgttatttttttctcctccttaaactggattaacatatatgtatcatcaaaagaggctgagactgaacttttgtcattttcaaaataaaaacttgccattactctgcgattttcttgattgattgtagttgtagctatgcttacggaaatccaaatgggattaaaaaaaattggagataaatcggatttcttttcagtatgttatttcaaatttaaggcaatgtcttctaatgtataatgaagagaataatattaaggaaaaaggtttggagaggaatgaggactattttttttttattaaactaatctactagtcatgtgaagagtactattataattttgtttcttaaatggtacagtaaacacatgaatagatggagaaggggacactttctttacttttattccttttatggtcatggactgatttgaaacatttggtgtctcggatcaattctcataaaattcatgttttgtttttgtccagttaaattaggtgagtcagctttggtttggcgttgctgctgtattttagaaggaactcatttcatagactttggatatttaacacagtcagctatgcaaataatttccagtcatctatacttttgttgtcctaacaggtattttttatcgtctattttgtcatttacctatgtacacagtgagtttctctggtcatcttttgttaaatgccgtgtcaataatgcagaaaaagaagcataaaaccggatgggtggtttaaaatgcaaatcccatgttcacctcaacgggttaaaagtattgcttttcttcgaagacctcaggattgtaagtttttaatgcagaatactagactgttttctgttccgaacacaaatgatgggcacccatctgtctccaagctagaagactcgaacactaatcattcccccaactctgaagtggaatccttgcttcaccattggtcccctccccggtttttgtggaggggattatcagttcttgttattgcagggcaggtactagtaaggattttaacaggaaagatccattggcggaatactcttcaacagttagagagagttgggcctaaatcacttggggtctgtctcctaacttcagcttttgttggaatggccttcactatccaatttgttagggaatttaccaggttgggattaagcagatctgttggtggagtactagctttggcattcgcaagggagttgagtcctgtggttacgtcgatagtggtcgcaggacgtattggaagtgcttttgctgcagagttgggaacaatgcaagtatccgagcaaactgacacattgagagttcttgggactaaccctgttgattaccttgtgaccccaagggtgattgctgcctctgttgctttgccatttttgacattaatgtgcttcatagtaggtatggcatcaagcggttttcttgctgatgctgtttatggtgtcagtatcaacattatcttggattcagctcgaagagctcttaagccatgggacattattagtgcaatgattaagtcacaggtgtttggtgctattatttctattgtgagctgtgcttggggggttaccaccatgggaggtgccaagggtgtcggggagtccacaacctcatcagttgtcatctccctagttggtatcttcattgcagacttcgttctatcctacttctttttccagggagtaggagattcattgaagaattgtgtgtaagcaagtttcattgtctaatagtgtgttctctgtttgtttatgggtatattcaaattagatccgattagagcagggaatgaatcaagtttttgcacgatcaattgcatgccttttggtaattctcataattttgttgccattctcttctctcttttgtgattatacacgtttaggaataagccttttttagttcgtgaaatggatgttgtccaaatttttttctgcttaagtgaaaactatagccattctttattgagcatcctctagaatctagtagcttctacgaaaaaacccttttttttttcctgagaaatttttgtagtgttcgttactcgttatagattggaagatatgccacatgttttctaaatcctctttttgggaagaataaccttaaggccacctaaaggtgttaagtactaaaagatgtagtatactaataggggaattttatttgcaccccattattaaaaaaaatataaacttatttttttaaaaaattatttttaaaattttttcctcacattattttatgttaatttgaatactcattttgattttattttcataattttttctaactcatgtatatattttttttatttttttctaagaaaatttcatataattttttattttaatttttttatcataatatttaaaatataatttaattttatttgataggtataatttttaagaatataaaatagaaaaaaaaagtttaaaaaatttagtataattaaagatataatttttatataaaataaaaattattaaaatggggtgtctttaaaaatttttggggtgtaaataaaattttccatactaatattagtgtttttaatattttataaatttttaatttaataaatagtatgagaattccttaaccaattataaagtattatataagtggtgtagtgttagttacttaaaagatgcatgctctagtagcatctttagtaaatattttcttttatttttagtttttttattcattttactcgtgaaagttatgacaattcttcattttagaatggatgtaaacttgggtgttcacaaagtatccaattcaatccaatccgcacgatccaatccaatccgcaaaatgcgga

SEQ ID NO: 378089 - DNA, 4783 bp, Cannabis indica
tgccaattgcagatttcattcgtccatcctcacccttctcccgcttcagtaactcccaagtgaagtggatagtccccagccctggacatacatttcagcaacaagtagacgatacgcctgaaccatgacaactgggttgcttgcttcatcgaaaacacaaaattatggaaatccaacttccggcaaatccttgcaaactcaaatgcagattcaacctgttcgatggtgaatgccaagccaagtatcaccattaaatttgttgtacaagaaaacaagaataagaaaaaaaaatatttaccattccccttggagaatctccatagtagctcatgatacgatctgaaagactcccatggtttgtcccgatacgcattgctctaccatatttcttacatttctcaaccaatggagaaaaaacctggtgtgaagtgagaaagaaccgattttgtttcagaaatagaaacaacacatatccatgtctcatacaaccgagaaatgaacatcacaagttcaatcggggcaatcacatgtatgctaaaagaaagcttcaatgaatttatggacaaatgatttatttacataaacaatgatcacaaatcgattatgaatggatttaacctgctcaatatgctcaagttctttctgatagtcgtcgtctgtgtactcaagcgtctcaaactgagcccgtctgtcagctgtaacaaactgcttagacgaatccagaagaaatgcctttatttactacacaaataaatcaactgaatcacaaagcctttaccgaaatttccaggattgacacgaattttatcgaagcattcagcaactcttaatgcaactgggggagcaaaatgaatatctgccacaagaggtatattataactgcacatacaacaaatgagatggtaacataatcaatccttcaaattatatgtaccttaaagtttcgaaaaccaataagcaaagaataaacataacttactcttctgcacaagtgaattttttatttcgaaacaagcatctgcttcttttcttccctgaactgttatccgaacaatatcagctcccttatcagctattctcatcacctataaattgaatagacacagtaatgtaaaccgcctctatataaaaagtgattacttcccacctttgaactattgacaaggttaaactcttctaaaattcgttatactcatgtttctactaacccgaaattccagaagaattcaccaccaccaccaaaaaaaaaaatagaaaaaaaaatggattaacaagaactaactaactaccccttcaaaagtgagctaaatgtcatactaataaattctaattagtatcaaacttatgcttgtgcagttgagccaatgaataattgtaatatttttcgattagagaaattataaaacctcttcaactgttccagcaacatccttggtatcattcgtcgtcatcgtttgaattcttatgggatgctcactgccaagagccacatttcccaccatcacagttcgtgttttcctcctaacagttttgtgtaaggactcacagtacttctgtctaggaactacatccaaacgatttttcatcagaaaaacaaaacaagcaacaaacacagacctaccgaatttatttcgaagttgtttattacttccattttcaacataacaaacacttaaaagtcagttattaagcttagatttatgcagatatatcctcttgtcacaaatgttctgttgttcttctaaggcctcatgagtttaaataatcaacaaagactgaaagatcaaagaaattagtacctaatagagggcttccttttgatgcaggctgaagttcagcaatatctgaaccaggattcgaatttcggataactgaaactcttgttctagatgaaccaaccctctttaaatcagaaagcctcacaaaatcagaacttttagcaaagctcaagccagagtctctgcttttcagatatgaaattgatgctggtacagctccagaagccatttccacaaactcaaaagctcaccttcaaaattccataacacaagctcaatatgatagctaagaaaatctagcaaattaaactaaaaagctgaaactgaaaatccatgttattgtttttaataactaataacactacataacagtaatgacaatcatataaagaagctaactttatgttaaattatacaaaaccaatcatcattttcatttcccttcccactttttcttctcaattttcccagcaaccaaacagtagtagagcctcaacccattaactaaatacaccttcatagctaattatagtaaaaacaagaaatacctgaaattcaacccaagagacactaaaattgaaggattaacagtagaaaggtggaatttttacaaaagggtttacctgaaaatcaaatattcagattgaaaaagccctttaaaagcgacccagaagcctctggaggagagggagctggtggtgatgatcctagagagagaaagagaaagaaagaaagaaagagtttttgagaatggattaaaaaaaaatgattttgaaaggattttcatgtgttcataaataaatttgataattccttaacaaaaaaattaataataaatttgataattttaagaaatatattttaggattgggatttgggtgagacttacttaaaaggacaaaaacattttatttggcatctttattattattatttattatccctttttttaattattatttattatcctttatttacactcagtttatgcaaaaaaaacccaaaaaattaaataattgatgctgccgttgttcgttggcagtttttttattttctcatttggtccttctcttttttcaattttatatttttaaccaaacatttccaagtatttctgttttcagtcccttaaatgaaagctgttgacaattttcttttcatctctaatggtagtatttttaagatattaaaaacttccacatcatttaaaattacaatattttattttaaatctcatccacatcacatttaaaatatttcaacggtaagctcctctcaaaatacaatgcaccctttaaaaggggttcatcaatgcactctttacctatttccgcatctgagagaattttttagcctaatttttttcttacattgtatttatttaaattatcctgcaaaatattgagagatttgaaaaaatataacacacaaaaaatagggttcaaacagtctgttgcatgcgagactcttttattttatacgcgtacgaagtagactatttgaacttgaactatattttcagcgtgttaaattttttagaatttctcaaaattttgtaggatatcttaaaataactacgaccataaaaaattagactaaaaaattattctaaataccgaaacaaatagagagtgcatcctttgaatccttttaggggagtatttctatattattatttcatatatattatattaaataattaaatttatttaatatatattgcataattatattttctttcacaaaataataagaagggtgtatacacatttggtatcctatgtttaatctaaatacaagtttgataccctgtatttttaataatagttatttaatatcctatattttaaaaacatacacatttagtaccttaaactcaaaattttttgataaaattttatcaatacaattaaactgtcttcaattttacaaattttcgattcaaatttaattatttaattacatataactgagaaccgtttggtcaaagtaataaaattatattgattaaattttactttggggtaccaaatatgtattattttaaaatataagatacaaaataagtattattgataacatgaggtaccaaatgtgttttaagaaaaaaaataaagtactaaatgagtatatttcctaataagaaagagaaaatataaaagatatcatataaagatattcttttttggtattctttttcactctaattgtaagtaattattaaaaaatgctaaaagtatatctatcatcaaacattctttaaagcatctctattagagatgaatagagatgctcttacaataatacttaaaattattcttaaaatattatacagttattggtgtaattaagttttagacaatgcacctgaaagaacttttttttttcttgaaaaaaatgctaaaagtatcactaccgaacatatattattattattattattattattattattattattattattattattattgtaactaagtattaaattttatataatttaatttaataattattatatagaacttgtaattattttctattgttttttctatctttacataatatacaaatttttattttattttttcattacattattggtgacataaaattcaacatcattatttaagaaacgtgtattaaatttaatattttgacatatatttaaaagaaaaaatattccaagcaaagacggagctacattgtagtttatggggccttgcccccaaatattttacaaattttttataatgaaaattttataaatttatcttattttttttttaaaaaaaaaaaaataagtttaataagcctttcttaaatttagttttgtcatattggccccttgatttttttttttttaaattaaagttagagtaattttgttatgattttacaaatactcattattatttcttttaaaaaaattatatacattaaaagaaagcaaaaaagacattccatcgtagagtatttaatatctatactattattgttgt

SEQ ID NO: 378090 - DNA, 2874 bp, Cannabis indica
caaggacaagctcctcatcaatctcacggaatatcttcttcacattcaatgtcaagttcagcactgcttgattccagtgattttgagtattctgctctagagccgggacgacaagtggtagaattgcttgccggttttgagtggtgagattaagaacgctctcattgttccacaacaagtgggctcgttcggccacctgaaaaaggaggggtagtaggtagttatagtcaccacaacaatgaaggaagtagttattcacatcatttagttgttacccaccaagaaaacgaaaatcctgaaaagtcacaaccaggcgatacaaaagagcaaaatgtctagatatctgtcaaacaagacttatacctgataatgtttgctgttgaggcagtaagctattcgtcgaaatagtgggatcataatcttttggaactcaaccatattgatcaactccaaaatctcttccatctcacctaagaacatcaactccttctggctatttgttatcggccagtatttcaataggcctttgatcacactaccggccaacttttgatccttgtctatgaactgtaaaaacacaatatgttagctgttggtgataaatacccactgatttttggtttgtgtaaaggaataagagccctccacaaaaagattttgtgctcctcctttaatggagtggcaaatccactaattacactgccaaaaatctccaacagctcagcaataccgttatgccgttcagtttcaaagacaaaccggtagatgatattgctgacaactttacggatataaggcctatgtaccataaattttccatagatcctgtgaagaattgttttcaaacaatctctttctcttggatcctcagaatcaaataggtcaagtaatcttgaaataaaagaatgatcaatatatttctttgccaactttgtgtcaagtgagttactgctggaaaacctaagaagcagatcatacacaagttgtagatgagaccaagcaggatcaaacattggttcttcatcttctgtctcaccaccaccaatgatagaacgatacttaggtgggaatactctaaagaggtttgctgcacacattttacacattgctgaaattgtaggttccgtgaactttgctgaaccagaattaacaaaatcaacaagctctaacaatgtttcccgtttaacatcttgcttggctgtgtcactgtaatcaatgatctcgcaacagaggttcagcttactgataaataaattctgcttctgttgatttgagacatctttaaaggataaatgaggttctactgcctctgctccagctgcaatactcgttgggaataccgcagaagagactcgtttaacaacacttaacttgctggaaagagaactcccacctattgtacacgggaatccattgcccaacttgctattgctgcctgaatcactccctgcagcatctagagtgtctgatttcggtaccttccgtgggagtttgctcagaatttgtttcagcatggtagcaaatagcaatgctgctttctgggtcaataagtttgcagttaattcaatggccaaaaacactagaatatcaaataaaattgatgagaaagtagtatatcattcttcaactgatcatcaactacaaataacagacaaataaaaatcatgtgcgtgagccgttgtttgtataaaaattaagcaaaagaattcatttaatagcaatatattacttcccgttctaaaaagacaaccaaaaacactacttaacatgcgagcattcaggaataagagtgcctagactcagttatcaaccaagggaaagaaaaaaaaaatgaatcatcatgattaatatcaaaagcactacgctttattacaatgatatgtaagtaaattaaaatatagtgggggataatttctcaacattacaagatatctttaggaaaatgggtctgcaaccaaacccgctatatacaaatcttggtgcttgggtttggatattacaaacccagatcaaaattataactcaagccagtaaaatttaaagcaaaaagttaccccaatttagaacacttcaagacgagattagaagaaaagtcaatgagacaccatacttagctatgacaacaagcctagatttaagtcaaagtagtcaaattggtcaacagaaacccagatctgggaccaaaactaggagcaagatagaacagacaccgaaggatctagttctaaacaaaacccaagataaaactgtctatatgtgtagatatacatcaaaaataaatgatgaaaaaagctaacccagtatccacaacaatgcatatgcttaaactttcaagttcaaaaccagaaaaaagtaaatctatgcaagttagctaaagtacacagtcagagagaaagagagagagaatgaagtgaaaatacctgattttgaacaactgggtatgagtgaatcacaaggaaaaggcttttaggaaatgagaaaggcaagagaagaaggtcatgataacctcaaaaactcactccataatgttttttcctttttgaaagagaaagaagcattattagttttcttttcttttacttttaaataaacccaaaaacagtagtacacaacacacagtatggcctctcagcctccttagatagagattataagaccgtgtttggggtgaactgggtgtgaaggttcctctctttcgctctgatattgatctactttgagtccatggaaggagatcaataagagaacctcgattaaagagaataagcggtgtggcattttctgagaattgcaggtactaccagtccaccaacataacataaccaaaaatttaaacaaaacaaaattaaaaaatttaaagaaaagtacaatatt

SEQ ID NO: 378091 - DNA, 3522 bp, Cannabis indica
acatacaaacaacaaatgaaagaaaacattaggaactataacgtaccaaaaggaaaaaaaagtaaaacgaagaataaatgaatcgaggaaggagattattaaagtaaagtacaaaaaaaaaaaaaaaaaaaaacataacgaaaagcgatagtgggaagaaaaatgcaatggcattggcactttgttaagaaaaaaagttcgttattgttaattctttttagttagggaatagtgttttgttagttgctttttacagttgtaaaagttgccaagtttgttagttcaagttggtttgagttagtagctcatttgagctcttctttctatatagtttgtaattagtttcttccattgaatcagaaggaattcaattcattcacacttttaacatggtatcagaatagtgactctcgatttccagaaaaaaaactattatcttcttcgtcctttctcattgaagctccgttgctatggcaagtctttcgtccagtaccactgctcatcaacaagcatttagagaattcgttacgttcaaacactcattgtctgttaaactcaacgacaacaatgattctttgtcttgaactctgctcctccaaagtatgaaactgagcaggatcacgctgccaataacctctctcctacttatttagactgggaagctcaagatcaactcctcctctcaaggatgttgtctctccatgaacgatcagatgaacaccagaatgatcggacacgaaatgctgctaaagcttggatggcgcttcgagaattcttcatagctcaaaccagttccaagatcagtcaatttaagactcaacttcataatactaaaaaaaattcgttaacaatcagtgaatatatattaaagattaagtccatcgttgatatgctcaaagctgttcgacataactttcctgtttctgatcatgtcaaggctattttcaatggccttgggctagaatatgatgttttttacacttcctttaatatcaggaaagaacaagttagcattgctgaacttgaagccttactcatggcacaagatttcaagataaaaaaatctaccaaagaactcgacattttcaatgccgaagctaacttggctcaaaatggccttaaattgctactttggtaacaattgaggaggtaattacaatcctagaggtggattcaataataattttccaccccatgtcctacaacaatagagatgatgccagttcctcctcaaactgtggtggtggtcgtggctctgtttgtagaggaaaatggaattctcagcaatataaattttgatatgtttattagttgtgccacaaaccagatcatgtggtgatccaatgctactattgatttgataaatcttttcaaggccttgcttccactagttcaccctcccttcccactggccagatgcaggctatgatagctacaccagatactcttaatgactcaaactggtatgtagactctggtgctacaaaccacctcactccaaatgcacgaaaccttatgaacaacactgaataccttgttagggagaaagttcttgaaggcaatgattcaggtttgaatattcatcatatcattcattcttcatttaaacctcctttgcattctaagactttgactttgaaaaaaatcttacatgtgccttatatcactaaaaatctcctaagtgtatcacagtttacacatgataatgatgtcatctttgaatctcatgctaactcctactatgtcaaagatcaggtgtccaggaagatactgctaattggcaagctccataagggtctctgtatcttcaatcatactcaagttggagactccactcacagcaccattcctcattcttcgccccaacattcaactgcttttctttctatgcaaattgtactctaattttcaattgtggcatagaagattgggacatccctttgctcctattgtacaaaaaataatggctacttgtaatgtgccttcaagtaataaaactgttttttattttatcaagcttgttgtatgggaaaatctcacaaatcgtcattatccttatcaaatacagtttatacacaaccattacaactcatacacattgatctttggagaccaactccttaaacatcctctaatgggtagtactacattagctttgttgatgcctttagcaggtacaattggctctatctcttataaatcaaatctgaagcctttgtcacattccagatattcaaaaaacaggttgaattgtagctctcttcgccaataaaagctttacattctgagtgtggtgctgagtttaagcccgctagatactttgtatagtgtggtattatttacactcagtcatgtcctcacacccatgagcaaaatagtgttgttgagaggaaacacaaacactttgttgagtctggtctgtctctactttctcatgctcaaatgcctttaaaattttgggatgaggaatttcaaactgaaatctatcttatcaacagagttccttcccccaaactgcaatttgtctcttccctctatcttttattttataggcatctaactatggctcacttaaggtgtttggttgtgcctgttaccttaacctcaggccttataatagacacatattacaatttaggtcaactcagtataccttcttggggtatagccttgtccataagggttataagtgcctcatcacaaatggaagagtctacctgtccagggatgtcactttcaatgagttttcctttccctttgccactcccacaaatagctccaccacttcatcctcttctttcatccccgtgtctgcatctccacctattctttctacaaacacattaccccctccaaacaccacctctcaatttgaccaatatcatgatgtgtctcacaccaacatgtctactatttccagtgctaacaatgactctagtccatgtttaccatttgacacgcagaattcaacatgttctccattaagcattgatcactctgctatggccattgatgataatcctagtgctgaagcatccctaaatactgcttccacatcaacaaattttggaccttctagcagtgctcttactattgtagttaatcaacatcatatggtaaccagggctaagaatggcattcacagacccaaagtctatctcacatccttgattctagctaaacatgctaatgtcttactatcagttcattggaactcagttatgcaagaagagactagagaactcattagaaacaagacctggacattggtcatatgcctgagagacaaattgttggctgcaaatgggtctacaagatcaaggagaaccctgaaaggtcggtcaataaatacaacgctagattggtagtcaagggctaccatcaataacttggttttgactatttagagacctttagtcttatggtgaagcctgtcaccatcagaatagttctaaccataacacttttttcatagatggtctatgataattatttgtggagagaagaataacaaataaaaaa

SEQ ID NO: 378092 - DNA, 945 bp, Cannabis indica
aaaaaaaaaatatcctctttctcattcaattgaatgttaccgcactgctcctctaactcaccagccacgcggctagtagaagccataatccacaaagaccaattacgaaataaaaaccaataaaatgatcgagaaaacatatcaatagacaatactttttagttttagtattaaataaatttcttgtccatgtgaaaattaattgttaatatgaagagcttcttagtcatcaacaccatcaccaggtatgtatagtttaatttcgttggttttaccttttaatatatctttggaggatattacgatattaccttttactgtacctgaaccttcttggttccgttatatgctgagttagttattaactaactcagctcctacttcttgtatatatataggcctcatttcatttgtactgtgcactgataattcatataataaaagaactactcaaaagccattcaagcttttctatactctgatttttcctcatagaggaaatgcagaggataaaatataaaaggtgaaattttgacgaccatgaccttgcaccaaatgaataaaaggaattatacaactctttcatgatcggggtctccttttgtattccgtttttcgcagagcattttttaattcgtttattattatttagtgttcggtatttgaggaagggaaaataatcattcactcatcctcttcttttcaaaccaatcttttccggttcttcctcccaagtttaatttgtaattttctgatagatctctgtagctagtctttaatataatttcttttttttaaagaaaattgcgctcgcacaccatgaccttcaaatattcacgtcataatggatatatttattttgagtaataatgtgtactctgaaagtctgaatctcatataaattgatttaaagaaaaaaaaaaaaaaaaaaaacaaaaaacgtaa

SEQ ID NO: 378093 - DNA, 3252 bp, Cannabis indica
ccaacggttgagatcatcactctctttcttcctttttctctatccttctggttctcagattttcctttagcaatatttcttttctcataatgggtgtctggtctaaaccctctccttcaccttacgtaaatcgctaatcggataccttgagatttcttctatgtctaatctgagtcgggcctgactcagctatggagagggttgccaactcatgttaaagtcagcctttaccttctcgttttgaagacccatcatcacactttttgacccaggttttggtttattttcattcaagaattcatttcctaataattttttccaagctgctataatatcctagattcttaagctgggatttatcgattattaccgggaaatatattcttgagtgactgtaattgagtattgaaacctagcttgtactttttttttttttttttttttattttctgcattctggctagggtttcgattgggttctgctgaatttgtgtccatgtaagggttttcgaatctgggattcctcaattttgtgactgttgcattagctgtgttacgattcgttctttctttgggatattaaaagtagggttttttgatttgggattattcaaatttagatcgttttagatgtttcgagattgtcatattacaccattttggaagaataaggtgttttaggatgtgggtctcttcaatttatcggtgaagcgcttcttttcttgttcaatttttcttttttcttttgttttccttttatacttagttatttgagctgctgataccgtaaggttttctttttaacacctgggctttgacatattgtgatgggtgaagagacttctgatgcgatgaaccttgacttgaaccttagtcctggtcccgagcccactttaggctcagtgtcaaatgttcccatgactttagatgagaggattgataatcctcttcatagatttagggaagcggtaaggattggggccagacagcggtccagatggcgacgacttcaaataccaccggaggcccataacctttcaatggaattgaaccacctaatggttaattctagtaatgcaactacattgcaggcaggtgaaggtagtgttgatgcagttgaaagaacaaatcacatgcccaaaacatgtgaaattaacaatgggattttggaagaagatgcatcagagaataagaatgatattgaaaagggtaatgcaagtgatgggagcttttttgattgtaacatctgtttggacttgtctaggaaccctgttgttacatgttgcggtcatttgttttgttggtcatgcctttatcgatggttacatttacattctgaagcaaaggaatgcccagtttgcaagggggaagtaacactgaagaatgtgaccccaatttatggccgtgggaaccataagctcgagccagaagaggactctagtcttaagattcctgctagaccccatgcacggcgggttgagagcttgagacaaaccattcagaggagtgctttaagttttccagtggaagagatgattcgacgccttgggagtagatttgatttgactagggattttagtcagcctcacgagcctgagagtgttcgggaaactgcggaaagagcaagcttgctaaataggtttctgacaacccgagggttacgcagggagcaaaatccagtggaaccaactgaggaggttgttatggacttgaaccaatcaaacatggttggtcctgaggtggtagagaatcgccgtcttcagtcccttttccttcgaagaacacaatcacaaagggcagcattttcctctctttcatctgcattgttctttgaggcctttaggaaccaccctaccagtaggaaccaggagcagcagcctcctgcagttgatgatagagattctttctctagcattgctgctggaataaattcagagtcccaaatcgatactgctgcagaaattgaatcagcagtatctctttcaacgtcatcttctagaagaagaaatgaggcttcaagggtttcagatttggatactggagattcaagggcacctcgaaggagacggctgaactaaaagcctgtgtctgatcctttagtgtaaccggagaaggtttatgtattaaatctggaagctttatcattacccacttaattacataactattgtctcagccatagttatggagctctttctactttatgcttccagtatttggttcaaattagctagtcctgttctaaggactatatgctttcaatttgtaagaatcaagtttgtgtacaacacatgggctggttcatcgttttcagtgtacataatctcatgaactaaacatgtatgaacttgttatattttctgaaatttcttaataatctcaatttagtaaatgcttcatgccccttgtgaagtaaatgcagcagtctatcagtatcggatgatcattcgctattgatggataaactgcaggcgatttgattatgtgctttaaattattattgttcatggataattatgatctgggattgattgtgaaatcaaaaatatccaaaggagaattgggtatgtgattgtaatccattgtcttatttgatgaattttatatatggaggattatgttaataaatgtagtcattattatgctccactttcatggtggtatcataaaacaagctatgtctacttgatctgttctggttttttttttttttgaacaagatcattgttctactttcgcatgaagtcgtggattgtgaaaaatacattgtagttgtagttcaaatacttatgaaaattgtaaataacttaattgtgcacttctaaaaaattcaagtaacaattgcttcaaaattcaaattttgtttttaataccataaaatcatgtttttaacataatgatttatttgtaatttttttaataaagcgtgatttctgatctaactacaatatgttgaacacatttttgagtgattagtgcttagggctagtttagtatagttgtgttgtggaagaaaaaagaaaactttggaaaaaagttgagataagtgtttggtaaatataaattttaaattgttgagttattaagaacattataacaataataatgttataatctagttgattataatcacaaatgtataaaaaaaattaggttaattaggattttttcctctgaattttgacatgtaccaaatcatgacccttaaatttttaaagtcgttaaaaatgctcttgaactattgagattgtt

SEQ ID NO: 378094 - DNA, 1848 bp, Cannabis indica
ttgatcataaaatcaaaactcttcactctgattgggaaagtgagtacaaaagctagtgccatttttgaactctttgagaattcacttcagccatccttgcgcacatacacatccataaaatagaaaatatgaaagaaaacaccatcatattgtagaaatgggcctcacgttattaatacaagcctttatgccactccattattggtgcgaagcctttagcacttcaggctttctcatgaaccatctttccactcctctcattaatctctcaaagaagtcctatttaaatttaaacccaaacttaacttcttgcgtgtgtttagttatgcctcttttccctatctcagagattataatcaacacaagcttgatttcaggtccacaaaatatgcctttcttggatatagtcctagccacaaagggtacaagtgcttgcaccctttaggacatatttacattgcctatagtgttacttttaatgaaagtgaatttcccttcacttcaactttcaaagttgaacatttcaaaaatcctaaaataaacacttgctcaagttaaattcaatacagccaatggtcttctcctttttctcattttgtgcagaaaaataattgcttataaagcactgaagttgataatggccactcctcaacaacccatgagttatctcctgcattatccacctcaagttcaacacctttgactagtcaagataaaactcaaaattcatctaatatccctcattgtcacagatttcagatcactcatactcagctatacctcttgaaatcaacctgcccatctcaacctcacatatttctcaactcactcaaacctctccaataccttatcctacaaagaacattgaccatcccatgataacccgatccaaggtagggatcttcaagcctaaactttttctagctgccacatctcaaaaatcagttatcactctttctgaagacatagtacatacctcagttgatcaagctttgaatgatccaaagtggaaatcatccatggaccatgaatacattgctctcaagaaaaataaaacctagtatcttgttcctagataaccacatgtgcatgttgttcacaataaatgggtgtttcgagaaaaatacaactcagatagaacaataaatcattacaaggcgtgccttgtagccaagggattcaaacaacaaccaggcattgacttttttgagacgttcaaccctgtagttaagccatctacaattcgtgtaattctctccttggttgtaacacatggttgggagatctagcaaatagatattaataatgcatttttaaatggcacccttaaagaggaagtttttatggaacaaccacctgggtttgtcgattctcaatatcctatggctgtatgcaaactcaataaaaaattttatggcttgaaacaagcccctcgattatggtttgataaactcaaggggtctcttctcgatcttagatttaaaaactcaattgctgatacatctttgttcttctacaacaatggcaatgcttttatgtttgtcttagtttatgtggatgacattcttcttacaggcaataatgccaaacaagtcattgtcattatttctaaacttcagcagctctttgccttaaaatccctcaaattagtcacatacttccttggttttgagataactcgagggcatcatggcttacacttatctcaaaccaaatacaccattaatctcttgaaaaagaccaacatgctcaatgttaaaccatgtcccacacctatgagtcaaagaaacaaattaagccttcaagatagtgttgcttttgaacatcaaacatctgaatgcactaacc

SEQ ID NO: 378095 - DNA, 3683 bp, Cannabis indica
ggtgatagaaaatgtgataaaaaaatctaatagtaatttttgaaattttataactaaataatgggtgttttacttatttggtatgttttgtttttatttaaatacaattttgaaatcatacatatttattattctgaactcaaatttgatcaatcaaattatctttaattatatgaattttaaatttaaatttaattatttaattacatataattgatgctaatttagttaaattgattagatttcattttaaagtactaaatatgtatgatgttaaaatacaagttagcatatgagtattattgaaaacataaggtatcaaatttatttttcgagaaaatacagagcactaaacaagtatattcccctaactacaacttttgattatttttctcataataacaatgccaaaaagtgatataccttttacaaacttcactaaaaaatgctttatttcacagaaaaaatgttgcagcttgtgcaaagcattatgtgggagatggtggaacaactaaaggcatcaatgagaataacactgtgatagacagacatggattgcttagcattcacatggcaggttactacaactcaatcatcaagggtgtttcaactgttatgatttcttactcgagctggaacgggcaaaagatgcacgctaatcaagaactcatcaccggtttcctcaagaaaactcttcggttcagggtaagaccagaccacattgagcttcttcaaccatgtttgttgtcaacattaagaaatctaaatgtttggtgtcttgttttcagggttttgtcatctcagattggcaaggtattgataggattaccacaccagaacatgctaactacacttactccattaatgcaggaattactgctggcattgacatggtaactaacttccattcctttgtgttttggatttgaagtcttacttacctttagttcttactcttgttgtttgaacatgtctttacagatcatggttccatacaactacaccgagttcatcgatggtttaacataccaggtgaaaaataagtttatcccaatgagtagaattgatgatgcagtgaagagaatcttgagagttaagtttcaaatgggtttgtttgagtatccattagctgatcaaagccttgtccacgagctcggtagtcaggttagttaaaaccaaaactaaacaccgaaaatgctgatgaaatttggcgatgattttgttattcaaaactaacttctttactatggtgcaggcacatagggagttagctagagaagctgtgagaaaatctcttgttttgttgaagaatggaaagtacggtgagaagccattgttaccgcttccaaagaaatcgtcgaagattttgattgcaggtactcatgctgacaatttgggttatcaatgtggtggttggaccattgaatggcaaggtgttagtggcaacaatgtcacatccggcaccactatcctcaccgccataaagaagacaatcgatccaacaactaaagtggtgttcaaggaaaacccagataccaactttgtcaaatcaaacgaatttgattacgccattgttgtggtgggagaaactccatatgctgagacattcggtgacagtttgaacttgacaattcctcaacctggaccgagcatcataacaaacgtgtgtggttctataaaatgtgttgttgttgttatctctggccgccctgttgttattcagccttatatttcatcaatagatgctcttgttgctgcttggctacctggaaccgaaggccaaggtgttgctgatgtcttattcggggattatggtttcaccggaaagctttcccgaacatggttcaagactgttgatcaactccccatgaacatcggagatcctcattatgacccactcttctcacttggatttggccttgctacaaagccaaccaagaccaattaagagagaaacaatcataatcatccttgagagttagcacagcatatttatcacaagtttaatggatgtagagtcaattgatatcttattggtgattgttgagagtgtaataaaatttggtgcctgaggaataattttgttcatgtagagaacaatttcagattaatagagaaaagatgtcaaaattcatgtatgtttaatcatttatgactaatctaaatggttgtttcaaatttcttctagccaaacaagttgttcatcctcgcaactaatccatgtgcaaccactacatatcattagttttttttttcttctttctctccactaaattaaaaacaccaaatttattgcacagcttgaactaaatccatatggctatttgcagacaattgtaaatatattacaagtagaagcctttccttgtaagacaagttatattcaatgtactatcacaaatacaaatttacatagcacaactccttcaaaagtggaggtcctctgcatgaaaagatcatctgtttttggagtgttgtttcatttcaatgttatggtttaagttgttcaaggagttcagctgttcttggtgagtaaagggtgatagattatagtaaaaacttcatacaatattacaatgtaaatgtgtggatcttcattgggttcaaagaatacaattcaaaaaacattcaaacatcataagcagaggtatgagaagttttattcattacaacaagtgagatttttttattaatataaagtaaagagctatatgaaataacataagttaaaaaacataaaaaaaggtatatttaaaaaacatcaaccatgaaaaggaaccataccagttatatcaacttctacattttaggatttttcaacaagatcaggctttgcaggttcagcttccttcatctgtgtcagtatttccgccttctgttcaagaagaacttctattttcgcattgatcttctctaacttactgtttagcttgccaacatccttcttctcttcctttcctttcttttctttcttattctttccttcttctttgtcttcctttccgctcttttccttcttcttcttacctccttcttcatcgtcttcctttcctttcttttctttcttcttctttccttctttctcatcttccttttccttatcgacttttgtgtgtttttgccttcatatctccatctcctccaatctccaactctttcaaactttcttctatatcaacatccctagaggtaactacaacatcttgttcattttcttctttctttttcttcttctcatcgtctttcttcttttccgtcttcccttcttttcgatcatgctcatctttcactccatcacttttcttcttttcctttttatctttactcttcttatcgcctttctctttgccttcctcatgctcctcatcttctttcttatccttcttcttcttcttttctttctcaccagtactttcttttccctcaccctctccatccttgtccttcttttttgtgtcttcattcttcaccttcttcttgtcttctttctcatcatctttgttttctattgatttttcatcttctttctttcctttcttgtctttcttctttttcttttcttcttcttcttcatctgcattcgtatcatctttattcttttccttcttctctttcttcttccctttgtcttcatcttcttcagcattcgtatcatcttttttcttttccttcttctctttctt

SEQ ID NO: 378096 - DNA, 1715 bp, Cannabis indica
ataagttatgtatttattatttattttttttgtaaaagaatgtatttaatattcttaatagggtagttgtgtacaatataataaatatacaaatagctaaccctaaagtctaatataaaaaatagaattactaaaaaaaaaaaaaagtcttatataaaaaaagtcttatgaaaattgaaaaaagttaataggtatttttaacgtattaatcatcccctataataaatattacgtacagactaatgtgtctatttttcaactcgtcacattttttttttttatgaaaaatgtcacttctttttgtagaacaatgtcactctattctttgaaaataagtaatacataatttatagagtaatttatggtataaatatttaaatttaactcatagttacaaataaatatctaaatttaatttttagacagaaacgatagtaatatgaagcttcacaacactagaggaaaatgatgaggaggtctgatttgctcaaaaattcttccagtttgaaagctttgaaaatttaaagtagaatgtaaagtaagaagtttgaagacgattatagcccaaggtcacgatccgaggcattaaatgatcctatggcgtttctcatttctcaagaagcacactttaaatccaatgattggagatgattcataacaagcacatttatgaagggacgtttagtactcgagcatcttcttgacaccctgcatttatgactctctagagattaatattagggaagcgaatcgacatcatcaaaatcgaggtgaaaaggcacgatgatagacagaccaatccctatataacacgtgacttattcgtatgaatgaggcctcttcgcttgccactgacgtcatacctcagaccctccgacagcgaactaaatggtcaaagaattaatgcaagtcccacctcaaaatttatgagctagaacttaggggtaaatagtgagcctatttatttaccaaaatacgtggcgaatgtatgaggctccacatggctaaagggccccaatcgtgaagggattaacactcattacagaataactttttacttggactcgctaagtgtaagacgcgtccgagagcagtttttccatcacaagataaatggtcaaggaatcactctttagccatttgggaggcgataagctcccggattagaggccatccgggactcaattatttgcatcatagattctgaagtgaatcactgtagatgactaattcagcacatgattaacatcattaagaagctatattattttagcaactcgtttacatacgcaaaaaagtgacgactatgcattgcactgccacatcagccacacatgggacaaattttgtctcaccaaacgcctacctcgtatgctaggtagtgcctagagatctaagcgagatgtacctttctctcctctgaccttctttctttttgctataaatacttgggattgtaatgaaaaggggacttctgaacttacataaaaaggtgagctcttatattgtaagctgaatattccctaatcaagggtacattctcaccataagtacaagtgactcgtgaattacggttcattaatactagaactacgtaaaaaaattatactccatatttttcaaccattattacttatactaaggtgccgtttggtaacacttttattttctaattttttaatcacaaaatgaaagtaaaatttttgttttcaaaa

SEQ ID NO: 378097 - DNA, 7803 bp, Cannabis indica
aaaaaaatatactaatcaaccatatatttttgcttatgataactagcaataaaactaatttaaagaaaagatgctaactttttattattattagttgtagtagtggactagttatcctgtgcaagttagttactttaatggtgcttcaagttttgtttttctaaacttgcctcaaattcaacttcaaaacaaaaacctccagctatatggttaaattttctaatgaatgaaatgttgacattttcttcactttgcatacttctttagcttttccaaaagtatcatgattaaaataatttgctgatattcaccctaataataataacacagaaggaaagatcaaacagtttacagttgcctttggcaattttttttgtttttccttgagttaagttactgctctctaattgtttttcttatttgcttaattagatcaatgctataaccacatgataatactcattatatacaagttgacaaccaaccaatttcaaaagaaagtactatacactcaataccctttgttcaccacaatgagaaattactacaattgagagttcttttaccacataatatgaatgatcaaagaacaagtactgcaaatctacaccgaattttagcgagcatcgattggactagtaatttggacaatatcttctccttctaatgtactattccaagaggcttctgcagagtgagaaaatgattcagtaagaacagagaggctaaacacaacatcagccatgcttggctagcagaagccttctcttctgtgcaagcctttgccaacgatatcaagttcagtgcaccttctataggatagaatttctccaacttaggatcgatccattctttagccttatccactctcttctctgtatcttccaagatgacccttgcttctttccacaacatgatgatctcaccgcttgctcttgttgccatagattttctccccgagagcagctccaacaggacaacaccaaaggcgaaaacatcagattttgtcattgtttctgctgtagctgggctagccattgaaaaatttgctatctttgccttaaaccttgagtctaggagtatgttacttgttcttatgtccctgtgaactatgctcggctgagtgtgttcgtgcatgtactgaaggccatgggaaacgtctaatgctatgcttaatctctgactccatgtgagaaatcccgatgagctcgaaccactgcttaaacatttggggtttaaccatttatcaagtgaaccatttttagcatactcatatacaaagaagcattctccatctttgtccaaagagattcccatcagtttcaccaaatttccatggttgactttctgcaaaatgttgagttcttcagtgacattttgtttggcttttttcacagccaacaagctcccatgaatcatggctctatatacagatcctccaatcctatactgctcatcgaaattcattgtagcctctatgattgtttcgatttcatacatgattagcttgccaagatagcctgaaactccaggaagaagtttatccttggtctgaagcttagaattatcacttttggtggttcggatcagatcactagactcgagagatgagtcctcacggttgagcttcttcttttttcggtagaaaccaagagtgtaaagtagaaaagtagctaaaaacagaacaagaagagtacctgctaagcttataacagttatgaggaaccacctgcctttaagttggtttcttggctgagactgagaagaataaggaggttgggagagagatggcaaccgagacaccgggatcaacaccgctgagccaacagcatctgtgaagttccggtagttattttcagttacaatgtcaacctctgtggcattaaacttggcaccaacaccaacaatgtcatcttctggttgccaaacgtaagatataagatatttgatatcattttccaaatgggattttaaagggcatccacaatacaatgggaaaacaactttagtgccaatctgcaagaggtttggattaagttcaggattcatatctctaaccaaaggccacttagtgagattttcaaatgaataggttgaaactaagtaatagctttcacccatggtgatattatgggtgatattggcaaagtaatagcttccattacaactgcaggagagtggtattagcaaaagctggcctggaatcagtttgatctgctctggaagcagattactagcctctgaaatcgacaaagaacttaccccaaacagattggctatactattcagatcaatatagtttggagactgagcaaagtaagcagcataggtctgacatgaggatggtgagttagcagagcatgaaaagtttgtacctgaggtgagtggtgactgagctgaaacatgggttatgaagacaagtaggagataaagcaatagcgccataacggtgagcttcgatggttaagctttgaagtaactagttatgtcatataaagcttgatgaacaaaacttattgtagattcttactataatttaaggaaaaagctgaaaaacattgtaagggcctttatatcctatattaaataaggcttattgtgaatatattatatagtgaccttttgtctctagctatgttctgagtgattattctatcctagttttcttcaccatcttatgtgaaaaaagaaaaaaaagtagtggattgtttttgttattatgcacaactaaatacgtcaatacttgattttttatatgattttttctgtgttatatattctcttttgatatgactctgtcaaagtagtggaatagtttaatcaaagtagggacggcaggagccaagaagatgtcacacacctatattttgtacatataaagtcaattgagctaacattaaaaaaaccaaatagtttagtggttttcatgattgattgtctgagaatattcggtttgttcctatactaggaactaaattataatatccaacacttaacggtgtaaggacgctaaactaagtacttaaaaatgtttagtgcaggctctaaaaacgctcatagattggacttttgaatgaatccagtgtgaatggcactctttccaagtgtccggatctatgtagacaaacaaattactccaatacaaattttaaaagactctgaattgagattgactcttctgtccagataaaaatgagattcaatagcagtagtttaaaggcaaaatttaacagtaataaaataaagaattctctcaactgtagtataactagcttttactgattgctacactttattagaatctcaaggttaaagacagaaaactcaagtgaatctaggttgggttcaagatacttcaacaaaattaaattttgaccaatagtgtataattcacaaccttatttccttaccaactaattcataatatttccctaaactgttttttacctatctttttcatcaaatcttatgaaaaacctctttggtttcaatatttagcatttctatgttgactaaggctaaaggttctattttcaagtattatatacacaacatgatctgtatgtgatgtatgatttaataaataaattattggttaatgatgacataacagttctaagttttttataatgataggagagtagttagatgctgaagtgtaccaaaaaaaaaatgatagaaaacttcacacacaacatgctacaaaagagtgacaccttagacatgtatcttccattatcaatcttttgcttcaatagataataacacataaaattataatatataagaaccttaaaatacgtttgttaccatgtcaatcattgtttatgcaaagcttttggagtaaatgtcaaaaactctagtgaaatcagcagagctcaccgtccaaatgtgaccacgcaatctaagtggaaggacatcacttatttcctcacaactctcttctacagcggcagcctctcttcgcttgccttctttccaaaggctctgtacaagcagctcctttgtgggaaagtctggcgtcaaatttaagtttctcatgtcttcgaaaactctccaagcgagagcagctctttcacacttgcaataagcttggattagtactttgaacatataagcgtctggcttaattccactctgcttaaccatctgaaaaagtttctgtactgttttgatatcaccatgtactgcaaagtgatgcatcaacccagagaatgtctgaatatcgggacaaatctcttgcaagatcatctcctccagtacatccaacgcatcagaattcctcctacatttagtcaatgtccgcaagagagatgaatataaaagcaacatgttgaactttgatatggttccacataaatctctatgatcatgaaagaccttcaaagcagcatcagcattcttcgagatgccgtaaaagtcaatgattaatctgattgtacagaagggtagtctcataccttccttccttattttaaatatgagtttatcaaccaattcagcacatccatggcgagctaaaagggtcattgtcctttgtactgtgtaaatatcatgagtaaatcccggttgacaagcaacccaacagaagaatttccaagccgtctctggtgaattgatattcctaagaatcttgcaaaataatctacttgtccacacaaatttcgcttcctctaaagcctttacctcctcagggttccatttttgtaaggcactagccaaagctctgggatctatccaaggctttaactgaacctcaacactatcaccctcaacaacaagactagagtcctcacttccatcgtcctcatcctcatcactactctccacacaacactcgatattcttgatttgctcgttcggaagcatttccttaagaaatttctcagtctcctcgacaaaaccagcctctttcatgcgttctaacgacaaattcatagctcgaccaggtaatattccatcaacctgcatttcctcaagtaaagtctttaccttatcaaattgtttgacaccagtaaacccttctgccaaaagtgaatactggttcaaagtacgtttgatcctcatcaaaggcaacaccttgaaaacctccattgctgaacacaacatcccagaattcacaagatgctcaatcatgatagtgtatgttctacaattaggaatggccccttcatcaaccaacctatagaaaaccttcacagcttcagagtcatcacccatttgtgcataaagccgcataacaatgttataagactctgtacatactttatcattcgaaactctatactcatcccacacctgaaggacagactccaaatctccaacagcagcataccattgcataagattcataaaacttatacgtacataaccaaagtttccatctttaatagagtttatcaaagacttgagttccacacttctgcgggacttggccaagactgtagccaatgaatgcaacgtattctggttatgtgaaaactgttgaagcctctcgagagagtcaatgaaggacagagcagagtcagccgaaggagcagacctgagggcgtgagtaacaacaaaagagtcaagaacacgatcacttaagagtggttcaagcgagttcttcgaagggttagaccggagagctagccggatagaatcaatgagtttggcacggtataggtagtgtgagaccttattcggaaatgggtctcgggcgtaatagcgagtctgctggttaaagtagttgatgttgctaaacaagcgagggagttgagcataacgcattgccatgaatactagcaggagtgtcacgcagtcaaaacatcaaacacttggtgtgcaccggaaagaaaatgagaacagtcagatcaaatacataagccagttatggcttcggatgctataattgcttttaccgccattggaggagcatcagttgttggatttgggcatatgaacataaatgagagtctgaatatggagtatatatatgagttgcggccttgcgggcaatagctgtgcagtgcagctttctcagtgtccacgaataaggagctatgctttccacttatgctttgcaaatagattattattattattattattattattattattatggcatggttagtttattgtaatgggaattgtaatagaattattattaccattatattgtttgcttttatttttaaacatttgtaatagttttacattgtaatggtcattacactatgtattgtaatccccattacatcataaaactaatgtaatgatgattacattcttagaaaatatctcttttgctcttttttttattttttttaaattttaaatattaaaataataaaactaaagatattttatcaatatagaacttattttatttgattacaatatcattacagggctaaaccaaatatcataataccatttctattacaattctaattccattacattaccattcatattacaattaccattcccatatttatagcactacataacattatcaaacgtaagggccaatttaacaaaatcatgtgctatggattacaatatttgaaaccaaatacagtcaagttattacaaatagataagatatcaactaaaacaaacccaaactcaactaagagagtgtttttagtagtcaaagcaatgcaaactctgttacaatcagactcaacttcaataagattgaaccccaaccttctgcaaaggaaaagaccattataacagtcagaggcaagaccaatgcttaaacaagggctaccgttgatgccaagcaatgaccagaatggttcgttatcacaagttcacaacactacaaccagccattctatctcctacggctaggtcatcatcaatgttaagcttcaaatgaccaaagactggcgttgtctagcctggtagagctcgaagactgcccatagaaagagattcagcccgatcggcacaacaaggcttcgaaatgttggcttcccaatagcaaaaagcatagtcaagagcccaaccaagaacaccctcctctgaaagaatgcaatgctcatgaattactttttcctcatgtaagcagaaccaacataaaatgtaatgctctgcaaatagttagcgatattttataataattattaacttaaaattatataggatcacattttcaattacacttaaaacgatatgatactttaagtggttttaagcatcactattgacttaacaattaacaatttaaatttttattttttttaaaatggtacaaaataatactcttagggctcgtttggtacgccgtataagggtcgtattgtattaaatgataaataacactatgtttggattaagcaatgtattgtattaagggtaaatggcggcaaaacccccaatactttcgttttagtttcattaaacccccacaacccaaatttctgcgggtaaacccccaatactcgggttctgttagcaatttaacactttcgtccaaatttagctgttaactgccatgttggattgtccacgtggacacaatatacacgtggcacaatttttattggtccacctaaaaaattattttaaaaaaaataaaaaataaaaaaaattatttgaaaattaaaaaaaaattataaataaaaaattaaataatttttttttctttcttttttttttccttttcttttctttttcctttttcttttctttttttctttttcttttctttgctaacagtctttcttcgatccccctctctctcagcactcgatccccacctctctcaatctcaaccatcactctcgctctatcactctgcccaga

SEQ ID NO: 378098 - DNA, 2544 bp, Cannabis indica
gagaatttgatacgcgtgtgaggtgtgctaagagccctagctagcaataagataggaaactaattttaaaactctacacactagtttctaagatggcagaggagaccatccaaatgatttcttttccttgaaattttaagaagaaatagtagacatttcaagcattaataattggagctatttgtataattttcacaaggtgatgaaccgagctagaacaattttaaagttctcattaagttgtactaactcttatgtcaaaaaccaacctttagtagatttaacagacttaatatgtgttttttgtaaggaaattgcaaggacaagagaaaatacatactttcaagtaattgctgagggagacatcccattctgtggtccggtatgactaaaattcaaacaaagctatattagttaaagggaaatgagagtgaaatccgaaatgaaatagttttaagtacaataagcaacatgtttgtgatgatcaattaccagtcttttcaagccatctccagaattaggaacatatccacaaactagataaaatgaatcgaattcagctgtcactaaccggccttcactatcatgatcttctataccgagcccatatttgacagaaagtggctttatctgcaatgtaagtgaataagaaaactagcgaaacggtataattcttgaaaacaatgttaaacaacagaatgatccaaattcctctccaaattaacaagacagattggttgctcaacacttcagtcaaagaacatatgtgaatacaagtacaatcacataataagataagtatacccgagaaataatcgcagctccagaataaccaagctttgaagtactgcatgtccagaagctattttgataaccgtctatcaaacaagcaatcttttcaacatccttatcctgttccaaagggtatacgaatttaaagaaattaaagagagtaacagttaaagactatgaattagaaagtttaatacatcagaataattgcctgaagtttggtctcttgcaagcataaaatatcgaaatcctctctttgagcaagttccaatgctgaaaacccatctaactttagcaatgctcttaatccattgacattccaagacagaagcttcacacactttgtatctctggaaagaatggcaggcctcatggttctaggattataaggaacccaatctttctgaggcttcttgtgtgcaagaatcgtccatggttcatttcgcggcgtggacaattcaactttggaatcaactttaacacaaatagtttctgaaaaaatagaactcctttccttagataaaagcacaacaaataaataaaaataataacttttacaatagatcagcacctgaaacctcaacagattcgactgaaagcttctttttcgttgtaacagctttactatcaacctggacagtgttcacctcaagccttgattgttttgaagttctcttacttttcctaacctccgaaacagtgctaacattttgaacctggtcttcctcttcttctgcctgagaactttcacctatggaaacatagagaaaatcatatgcagtacacaatatcatgtaactttatttctctactgtaacatttcataccattcatcttctccacaagcgatttcaaggccgaaacgagttccgatttaagacctttagcagggagcccattactcctgataatatttcaagacaatttacaataaaatctacaactccaaacacaaaggggttatgtcatatgttacctcaatgttgttctaagctcctgaacagtcattttctcaattgtttcagggttattcttaaaacttgctaatccaactgaaacactttccacaccattttcctgtaaaccaatcatgaataaataaattccacattaccaagccaaataaaacagaaaatggttatcaaaaacttaagaaaatatacaaaatctaaatatggatggttcaaagttccaacctttacaacaggcttaaacctcttactctcagtcttgtcttcatccattgccgaaatgggttttgaagaacttgaaatggttcgtttagaacccattgaactcgcacttaatctcaaagaaatcactaacccaggtctcaaattccaaggaacaactgtacaatactaaaatcaaaatgaagcataagcaaatgcggaaattaacagagagaagagataaaagataaaacctttaaggaaagtcttgaacccgaattgcagagcttgaatatggttcatggtagaagagtaatagggagtttagtgtgagtatcagcatggtttggaaagagaaaaaccgccattgaagttgaggaggaagaagacaaaggttactttcccatgcgagaatgatggacttcacagcataacgtacttctgagttctgaattgtcaagacttgggctttccaggcccattaaggcccatcaatatctttgggctggcttgaaaaataccccttttattaatcaattaattaaatttgcctctaattttatatttatttgaaacatac

SEQ ID NO: 378099 - DNA, 2668 bp, Cannabis indica
aagtgacatttcttgtagtggtgttgggagtgatcttgttgttgctgatccacaccagtatagaagcaatgtaggtgctatacaatatgctgtcattacaagaccaaaggtttcttatgctgttaacaaggtctcccaattcatgcacaatcctcctgagtctcatctcaaggttgtcaaaaaaattctcaaatatctcaaaggaacacttgatcatggacttcatttaaagccctgttcttccttgacattgacatgcttttgtgatgctgagttgggcctccgatccagatgatcgaaggtctacatcttgtttttgtgtgtgccttggttccaacttggtttcttggagttcgaagaagcggaaaattgtttccagatcaagcactgagatagaatactgtagccttgccaatgctactactgaaatcatttggcttcagtccttttttggaaattcttaataacttttcactcagattgggggttatcatttttgctattaaagtattattgtcaagcattcttagggaatctctctaatgtcagtcataagtttaatgttaaggcttctagattggctaagcatgcctttaggatagacaataaactttcttgaatggaaaaaactcctcacatcttgtgtttaacttttgttacctttgttattttaacctttattggttaaccttacaaaaaaaaacagtaatcaagcatattcaggaaaaacgttgttaataaaagttctcgatttctctttttatagctttttaaaaatcttgaaccgtccaattccgaacaatatcaacatatttatgaccaaaatacttttattatataaatagagaaggaagcccgtgaactagagagagagagtgttttgtagttatattaattaaagacccgatagttaaggatcttctgaatgacttgtttttacattgaagaggatgattgatgtgtgatgatggagaacaggtcattctattaattagggtattcatcataaaatatttatctgtatatatataattaattagctatctaggacacgtatttccaacttagtatataatataaatatactaatgaatatatatgacactatatcatcatatatatatcttgaaagaaaaaagaaagaatttaaaattaaacaaagacaaaacgtgcatgcatacacgttttggtcattcatattataaataatatataattacaactcaactgatgatgatggatctaatatatatatataattaggattaaaaaattatatatttgaattaagttggaatgtaaatttgggctataaataggtaaggcatattaagagagaatgcatagttaattgagtactactgaatcaatatatataatcaattaagtataaatatatagtattgtgatttgtgtacgtagtgagtagtagtgatcaaatatggccgatatgtcatcaaaacaggttgtggtggagtcttcgtgtccgtgtcccgaatccgaagtggtgtcgttcaggcactacaataataaggatcacacatataaatatctggttcccggtacaatcaatcaactaccatatctggagttcattggagcagaaaataatgaccggagaatactattcgagatcaaaaagcttcatgatgatattgtcaccataaaatcccgttttgccaacgcactttggtatcgcaattctggcgactggatcattcccaacggctctgacgaacaagccttggacaggcagttctgcattctcaatgcgtcaggtgaaggcgaaggccctaagtacgtgagaataagcagtgtaggagccgacaataagttcttgacgtgcaagagtccggaagagggcaaacccgagtgtctcattgcctccatggatagcgagaacggtggtatgctgctgcaggtggtgtcccaccctcactttgcaactgcagctgcatcacctgcgggtgatgaaaactagacaagtatcatatcaatcattaacgctggctgcgcctacgtaactacgtacgtacgtacgtacgtcgatattcatcaatcattacttgatgtggtcttgtcttgtcttgtcttatcattattttgttatttttatttttcttccaataaaggctgggtttatatccaccaagtttaaatatttctccatcatcatcgatccttccatccattgatgtccagtacttcttaatttgtttgtaacccatccttaatatttaagctcatatatgtatggtgacatgatcgtcatcatcagtctatcagggcttaattgtttatgtattgcttaagtatttttattcataataataataataataataataattataataattcaagtcatgagtacgtgcatgcatgcatgcattgtctttcatgtcctttaattaattaataattctttttactctcaaaatgatttttttttctttctttctatttcttaagtgttaggccaatatgatttttggatttttattttagcccaattaacttaaattaagatatcattaattaattttaccattattaaataattattctagataaagttcgctgcttctccgtcaagctctcctcaaattagtctttgtaaagcccgcttagttaatttagaaattagcagttgtttatgtttaattat

SEQ ID NO: 378100 - DNA, 2440 bp, Cannabis indica
tcaaaccatacaaattttagtcccaattcaaaagacccaacctttgttttttttttgtcatctcgaccattcttgttgtcttttgtctttttaatttttcttttacatattttagtattttctttctgtttttcgttatttcaggattgagaagaagaaaaaacaggaaaatttggggtttctgttgtctctgaagaatcatgatataaatgagcgtttcctgttgtgttctgggttttttgttctgttgatggtaattgtatttatctgctttctcttctaatggtggcttttctcttatgaaattagggtttcatttctcttatctctattctggttctttatctgttgctggcctgcctcgcgaacattatgtgagtaattcctcattttgacattttatttctcattgttgattacgggtttcattttaggggtgtaggacgaatcccattgttggttttttggttttgccacactaggtcagtagcattgtgtctttgtttaattccttaggtcaaaaatacaagggtttcattttctttaagcttcttgttctaatctggggttttgtggaattgtttggtttagtttcctcctaacgaaaagaaaatggattgaattttttcgttggttatgattttcttaattgggaaaagtaatattgttccgatatgttttgacctgaataataataatagagcaatgtatccatttatcagtaaaatggcggaatcataacttatctccacatactatgcagaatgaatctttgtgtatttgttttcttataatgatattttctctaaagttggtttttaacaagtcttgtaatttaaatcaggattgaactttgtgttttcaatcttaaaatgtcatcacctcgatcatcgccgtatcagattcttgacaatcgaccgattgatcagtggaaggttacagagttaaaagaagagcttaagaagagaaaattgataactagaggtttaaaggaggatttggtaaaacgcttggacgaagcagtgcgtactgagaggataagtgctcagaatgacaatgatgataatgatattcaatccagtccagaaccagcagttgtagtgaaaagtgggaaggaaaaggctgttttttctgaaaacgtaggcactgtggatggtagtgggaagaagaccagtaaggtggataagcttcctgttgaggatgacattaataacagtgtaccagacttgggccaaggtaatattgaggaaggatatgttgtagttggtgaggattcctctgcggtggaggagactgtggttagttatgaaactactgtagaaactacagttacggttactgagagtgtggtatctgatgtaacattaagtgagcaagattctgagattcagaaagagaaggggagttttaagtttcagctggagaatgaggattcaaagttccagctggagaatgtggattcaaaatctcagctggagaatgtggattcaaagtcccagctggagaatgaggatgcaaaggccgagctggatagtgagcatttaaagccccaggtagagaatgatgactcaaagccccagttagatagtgctggctccaaggccaaggtagagagtaaagactcaaagacccagctggaaatcaacaatacaatgtcacagctggagaatgagtgttccaagcctacatccgaggaattcaagctcgacgttactgctccagaaaaccaggtatctgaggtcagacctaattttgggtctcaagtaaaatatgattctatttctactgattctgtgtctattaatgaaaagattgaacttaaggataacataattgctgataatgtcaaattagaattagatgttattaagccggagatggtggcaccatcatccagcactaatgttcagggcggtggtgactcacatcttatggatgttgaagagccacatgagagcaacacttctgtcgaagagaaggatgacaataatggtactaatgcagatttggggaagaaaaatgataatctagatgtggggtactctgaaaagttaaatttagacagaagttctggagatgattctatggaagaagatgtgctggagagtaaacaaattgattccaagtatagttcggatgatgtgggagataagagtgaaaaaactgaagtttctgatatgaaggaggaaggtcatgtggatattgtgggtgatgatttttctgcagacggaaaggacgttcatgttgagagtgaagagcgtccatctgcacatgctgagaaaagaaagattaatggtgagttttgcttttatttatacacgcacacacaatataaaacgtggttatctgagtttttcaccatgctggtatcaatgtttaaaaaaacgcaaatgagccttgaggcgtttttttttgtaaggcgaggcgtaagcctcgaggc

SEQ ID NO: 378101 - DNA, 3120 bp, Cannabis indica
accatgaatttcctatatgatagcactaatctcggtctcggctatgcaacttaagtatggcacagattgccccctacaataaagcttcccatatagtatcacataccaatgagcctaatattggattttataggaagcttctttgtttgccgaaagctctcctaaatttaggaactagtagatgggccatatctaatagttggaatgatcaacgatggcatccaattgggccaatatttggagcttctaattgggccacaggcaccactcgatattgaatgatctctgggtctatggtgagtttttctagcgtatccgcgaatgaatttgggtctggtgggacctgacaaatgttgtatcttttaaaaccttgtagtagctcccagaacatcatcacataggtagccatcctttcacctttagtttgatactccccaaatattttgttcaccttcaattgggagtcactatgcactttgatatattgtgctctgacttccttagccaaccgcaatcctgttggcatggcttcgtgttcaacttctttattggaggcaaggaatttgaaatgaagagcactatagagctgatgttcttgtggagagatcagtaagattcttgctcccacacccttttcatttggcactccatcaacatagactttccaagttggtaactttggggctactctattacaaagtcggctaggggttgaccttttatggacaccctagtttgatattaaatatcaaattggctaagttccattgcccattttaatagcctactgaatgcctctagcctttgaagcacttggcatagaggatgatttgttagtaccttgatggtgtgggcttgaaagtaaggtctgaacaatctggaggtgactagcaagaaaaaattcaatttttcaatcaagggttacttggattttgcacctagtaatcttttgctgacatagtatacaagtagttggacccttccttcttctcatactaaggcatcacttatggcaaaatctgacactgccaaataatgatacgaatcatcaccttccactagctttgataagataggagctttggtcaaattcttctttagtttttggaaggcctctttggactcctcagtcctttcaaactacttattcgatcacaatacgttaaagaatgggatgcacttgtctgtggactttgagatgaatctactaagggctgtaattcttccagtaacactttacacatcgttgtgcttactaggagatagcatgttaatgaaggccttaatctttctggaggatacaacaaatgtacatttcttgggattgagcttcatctcgtatcttcggaggaccaagaaggattcctaaaggtctgcactgtgatctctagatgttttagactttaccagcatggcatcgacatagacctcaatgtttgtccccaactggttcttgaacatcctgttaaccagtcgatgatatgttgcttcgacattcttcaaactaaattacattactttgcagcagtacaaacctttatatttctagaatgtagtgtgttcttcatcagctatgtgcattttaatctgattatatccagaataagcatcgatgaagctgagcaactggtacccagaagtggcatccaccatcttatatattcgcggaaaagggaagcagtctttgagataggccttgttgaggtctgtgaaatcaatgcacatcctccatgtgccattgggcttcaggacaaaaactagattagccagcaaaatgggatataaagcttcccagaggaagtcgttcgtggtcaacatataaacttatgcttttactgcttttgcccttacttgatctaagggtccttgcttcttgcgaactagtgtcacgtcttcattgatgttcaaagcatggaagatagtattgcgattgatctttgtcatgtcagaatggctccatgctagcacatcctaatttcttctgagagtacttatagtgctttctttcaccattggaggtacatttcctcccaccttgattgttttggtagggtctacactgcaaatgctgacctcttccacatcctccattggttcaatcattcttttagtacccatacgagggtctaactccacttcaaaaacctgtccattttgagagcactatgtatctctttctagactatgaacacactctgaacagagacattgtaataacatcttgcactcttccagtcacctctgactactccaacacatccattgtcacatggaaacttcctatatagatgccttatcgatgttactgctccaaaatctaccaagacttgaagtcctagtattgcattgtatgttgtgagacactccaccaccaacaaagtgcaatgtttgaagtcataatcatcgttttctcctttaagggtgacagcaagttggatttttcccatttgcattagagcatccccattgaagccttttagctggatggggcaaggtgacaagtctgcctccataagcccaatcgcctaaaatgcaaatttcaatagaatgttcacggagcttccacgatccaccaagactctagaaactctcttgttggctatttgggcttcaatgaacaagggttcattatggggaaagtacacgtgttgggtgtcctccatgaaactaataggaaaattaatcattcgaagatgcgaggctggtgattgcacaaagtcgcacatttccccttctctatgtaactccctcaaatacctcttttgggagtttctagtgcttcctataaggtgtggtcctctagagatcgtagccacatatccatcaattggtggcggagctaggcttggcggatatgggttttccagtccttgagccactatggtcaatacagctagagttggtggagtaagaagtactagaggttacattttgggagcataagggtaccctactccttgcggaggatttaaggcgataccctatttaggatagataacgggaaaatggacccattgccccaagtgacttgctttgaccaacattttgatctcatctttcaggtggttacatgttgggttttgtgccctaaataaaaccctttacaatctgattagttat

SEQ ID NO: 378102 - DNA, 3288 bp, Cannabis indica
taacaacaatatattacaaatgcaggaaacacttttacttacagcattggtgccttgacaatgttctcccaaattactcaatatttcaaacctattcttagcaattccagttcctgcagtaaaggaaaattaacaaaaaaataaaacttcaacagctactcagaaaatggattaaaccaaatgttaattccctacttaatacaccagaaatgaaattaatcattacttctaaatccaattaatgcaatttcttgattccaaatataaaaacatgttaactagaaattggggggagagttcttaccaatagtgtgcttgcttccatgtcttttatctgtaatcaacttacgagtagagcggccatggcgaaagtcaaatatactaataaaaccccacatacaacctgactgatctttctcataccgtaccgcgcgtctgtgagacctcttagccatatcaaatcaatgatttcctcttcttttttgtttcttcctgtagaaagatttatatgcctttctaattttctttgccgatctctcgctgcatcaacaaaattgggtcaataggattcaaatttatggggggtaatctcttatctactagctgccatggttttttttttgggtagttattggatgaatatttagtagaaccacaaagaagaagaagggtttctcgagaaaccaaaaaacacatgcaaattttcagctaatattgttggaaaaaacaagaaagaacagtggatggactagtaccaaaataaaataaataaataaaatgttggtagtaccttagatagagccgaaattcgttaagctcgaaaagaataatgctgctggagaaatctagtgcagtttagtccagagattccagtttcaaaatctcaagctttgtaacagagggaagttcagggcatctaaactttccttggatgttaagatattaaagacttcatttttcgatagaagctttaaacgggtcataaaaaattcttcacaaaaagctatcatgtggagaagttctcttcttccctcccaaaaaagaacaagcccagaaagttaaacctcttcaaccttcacaatcagaaacttagtcagactgtcaatcttcaagaacaaagccagtaattaatgagaaagcactttctcaagaattataatcaaaagctagtgagaagcaaaaattaaatcaaaaaaacacaaccacaaatcaaatctatattacataatttatctacacttgagttcaaaattggggtgaatcaaaaacaatttccaaaggtcaatgctgccagccaattaaatagaacaaagcatgcatattgatgtaattgactctccacgatgtagcatcacggatccttgaaaatgactcattagtcattacatcacaatacccaaaaaaaaaaaaaaaaaaacactcaattaacacaagaaaaaagcttttctaaaaattctaccttcaataatgtcaaggtttcagcaccgcactatcaaaaataattttctgacaaaagggtccaaaatatcacacttttttagcaaaacccagatcaaatttacaccaaattcaacaaaaacacatgcttagaaacaaaaactatctttttcttttctcaatgggtaatgggtatctttttcttgacaaccaaaaagagaaaggccaaaatgcttatccagcaccgacccactaatagttttttttactcagaaattctcatagaggcgggcagccattaaagactgaggaaagtggagaggaatagaagagagagagagagagagagagtaagaaagtaaaagactcgagctttacaatgttgtcattgttgggtgacaatagaaggaatacgtgagtgttggggtaaaatcaatggggtccattgagagtgctttatgtggaagaaaagtcaggtgtgtctcctcttccatttttctcctctgaatttcccaccctcaaccatcatcaaactcaccactcttctctctcctctctcctctctctaactttgctggtattaccggtagaaaaaagcgtatttagattgacgtgtgggtatgtactatagttatagttagagaaatttcctgagcttatcagatttttttttaaaaaaaaattggatcatgacatgagtaataatacgtatccaatctaaagaaaaggaaaaataggtttttaagacgaaaaagaaggacgaatatgatacttcgacttttttttttttaattttaatttttataattatcactttaaaatctaattccttcctttcattctattgtgtttaatattcttttccatttttagataacaaagataacaaccaaatataaattatttatttttaaaagatacaagacaaaaaaatatatatttccacttttccaaccaattaatttcaacatcttttatacagtgacaccctaaaagaaggtgtttatctaaaaataaaaaactacctaacattagaagaagaaaaaataaacatactcagctgccatgttttttttcttatcttttctttgggatggtgagatcaatggataattattaactcattaggtcagttcagtataataaaatatacatttctgaccatatatctatataggattctcttccataacatatacttccaagtattggtaacacatcaagtaataatagtctctttcacaaaatataatagatatatatatatatatattaattttaacaatgttcttctccattggtagattatcattaacaaaaaaaaaaaaaatgtgggctatcttttggatttaattaaaaaaaaaaatacaacaaacaaatctcatatgtgtacatctttacatatatagatatactagcaaaaactacgtgcgagacacgtatactaaattttatgctagtttttttcatgttatttgaaagtgatacaataaaaaattaaagaaaaaacattattagttattaggtgagattatttgaataaagaacaataaataatcacgtaaaaataaaaaataattatttgaataaagaattcaatatacacatttatatatatgaatctcattaatcaaaaagaattattaaatatatgaacaataatttgtcacgctatatgtttcccaataaagaaatccacctcctcatagtcaaaaataaacaatatatgtaatacagatctttgtaatgaagtacctaaaagaaacaaaacttcagttagcataatcggaaaaggtttaagtgaactaaataatgactaagaagatctaaattacaaaatgaaaataacat

SEQ ID NO: 378103 - DNA, 5383 bp, Cannabis indica
cttatgaataaatcaagttgttcttgtactaggcgagacgtctcaacgagatacgttttgtagcgtgtcctaatccatgtcagcgttgaccctttaaaagtaatttaaatcacagctgtgtgatcttcacataataactgcatttatttacgtggagtataattaaagcctacaatttcggggaatattgttatgggattcgaatttgaatgtaattaactgcttacctatattactatcaatagaggcagattatacgaaaaaggagacgaaaaatctcagagagaaaaaggagtacactaattgtaaaccctagttctgtatcagaaatatctgaataagattggctcgtggactatgcagagttaactgcaaaaccacataaaaacttggtgttatttctgtttctattttttctttcttagatctcttataatttctgtgcaaaatctattacgaaaataggctcataatcgttaacgaaaatttacattaaaagtttggtgctttcattaagagcctacgtgataaaagctcaaacaaatccctcctgacgaaagaaggaatttcttctccatgactgataatgggaaaaacaataacactcatcctaaggagactactcgtcatcccctttacgtgtgtgctttccatcatattcttcccactatttctcaacttaactataaaaaaggtgttcgtttgtgcatactgtaatgacatgcaaaaacgatctctcatgccttccttgattgccaactccatctgatgttatagcagatatcagacaccatatttcttttctgatgttattcacctagacaagatatcgacttagctcatagattgtacggagagccgtgggggtgatgaagagttggtgtttggtggttctatgcgatatttttaagttgtctttacctaatttgcttattcaatgatattgcaacttaaatttaaataaaaaaaaaaaaaaaaaacgaaagtacgacttgaagtgacaatcaccccagtcatagtgatgacactggccttaaattacaaaaggtactccagcttatatttggtcaaaatccaatgccatactggaactttcaccaacttgacagtttcttttttttaatgaccaaactaaactatacagttttagcagagtagagagcctaaaactgtaagtcttggataattgatcatatctatttttagaatctgggcaatagtaacgtacgttatcttaatttgtctgaatttgttggaacggtcagtccatgttctgtaggacaagttcaggaaaccaacccttagcacaacattaccgaatcaagcatcattgtaagagattgacatttagctatttagtagaaagaggtattatataaagcccttttgccactttatgatacagacatacaagaatagccaaacacttacaagaggctctctcacctggcaattatatcttatttgttaattagagacaaaaatttacaagccttgtaagctacaacaactttctagccttttgcttcacaccatcttttagtttgagagaagatgaggatgacgaggaagacaacccaccagctcggttgaactcagccttgtccttgttgaacgcattctgcacatcctctttaagctccatgaatcttgtccttttgatcttctgctcctctggagtgcctgtttcgaggtaaagcatcgaaggcaagtcatcttccatgaacttgtctagaacttctgaacaatgggggaagtatcgtctgcccatgtccactgccaaacccgaaaatatgataaattatcagatcaatagattgtattgtatctgacactggattaaagtgaattggcagatttaaaattctacaagtatggtcttacataggctatattttgtacaaagtttatacaagtcataaagaaatcacacaaagattaatgtatggtgtaaattagataaaaagtactgcttttggaataattctattctcatttaaaactagaattttgatttcatcattaagaactaactacattgatataattggattaattgtcattatgacttgtgagatatgaacaaacagttacctgttttgccaagagcttccatcctagaaaaaagtctctttctctgcacaagcggagtttcatttaaatcaacctccctcaaatttccatttgaaccctttgaagcacaaagcctagcaaactctgatgttgtttcagcatgggcaatgtccattgccagcttggcctcagatggaaagaataatcgagcaaatgccactgtgatataaataacaagcttcagcattttaactatatcaagcatactacagaaatggatccacattaaatcaattgaaagtattgaggatttgtaagaagtcggaagacataaagtcatggccataaaaagagcaaaaagtagagaaaaataaacatcaagaccttcgataataacacgcgatcacaaattaggaaagaaatgatttcagtagtcatacccctgttttccaggtaaagcaacctcatgtggaagtcgtcagccatcgtatgcaaagacatagattgttccggggccattggatttctccacatctctctttctagaacatcaatgcatatccgatctttgttagtttcttgtccctgttccattttcgcatgataatcctttggccttgtcaatctccggcagatacttacagcgctttgaccatctgatgttagctctgatgcacgagctcctttattcagaagcgacactattattgatggctcctttctcattgcagcaatgtgaagcacagtgtaaccgcgagaatttctaaggttgacatcagccagacccaggccaagcacctcatttacaactttgggatcacagtacgctccagcatagtgaagcgcattggcatcatctaatgttacatcagattcagttaaaagaagtttcacaagttcaacatcatctgaatccaaggctttatgtattctcctaattcttttttcacgcaagggatctacaaattctattttatcttcttcttcttcttcactacactcgggctttttgcggagcaatttaattttctcagcaacttcatatggaagctccttctcaagagatataaattcaatatctgatcgtgccactcgatcaaggcattgagcaaagagttgactcaattcacaatggaatgaagctacgagaatcgggatgacatcctcgacaagggactttccaacaaagttaagaagccggcgctgtaaaagatagagaacaaaatcattatcaaatcacaatctaaattcaagtttaacagatggcaaactatctaatcatatatttcgatcctctcatcacataataagaaactggtaaaacaaggattattacaggagttgttgcgagattatggaaaagttcatatttgtagtattagaagatgaacataactttgcaaaactacttcaaacaaaaaagaggttaccacaaaaccagccactagactttatggcgttaccatataaagttaattcaactttcatgattaatcttgacacttaccatgattaaaaaattgcaagctattactaagacctaaaattctcctattaactgaccaagctcctatgaagaagaagccaaatcaactcattcaaacgtcattttggaagcttatcaaacaaaaatcatgtatgtttgaagtcaaaaacagagaagaatctgactgaaaagcacaataaaagtgaccacggaagtccacagatctaccataaggtaacaataaaaaactataagacctcccctcaaaacaatagcacatcataatcaattcatttcctcaaaattgaccatttttggcaataattagaatttagcaaattgtttatcagtatacacagaacacaaacctggaacagtgacaccagttctggcatcttgaaaatagatgatgcatacatcatctccacagcaaaattaatagcaggtctacacgaatcatgaggacagatgttgtctacacaagttgacacctccatgggagaaggcttatgccttcctgtataagcatagttcaagaaaaccagaaaagcttcatacccaacattcccataaggcaacatatctttcatacagtacttgggtttgcctcccttatcagaaatccctcctttatctttcttgaaaagatcattaaagaaactactcctggaagccaatatacagcggtgaactcccactggagtttcctcaacaacaacttcagcatcactgtaatcagaagcagaggcatcaaccaagagtagctgctccaagctagaactcagcttgtttaggcccatgacttcaaggctaggaaacacagcctcagagccagaggaggaacacaagttttgaccatgagagccatttgacaagtgggaagatgaactaaagctcaaagaagatgagggttcggttgaaatagccattattattattttatattgaaattagctttagaacaaaatccccatcaaaccaaaatctcagattcaaatattgaaactaatcaatatctttctctgatggatagaagccaaaaacttaaacttccaacgaaattttaacagaggtttgaattttatacaataattttttactacagaaaggtatccaatctaatggtctctccacaaataattttttaattattaacagtagactagaaaaaataagaaaagaaaaaaaaaaaccaatagggaaattaattttaataaaggcttgtatgaaataaaacttacaggaaaagtcagatcacaaaaattccctacaaaattgaaaaataaaaccacatattcgaagaaatcataatgaattattaattacacaagcatatatctatcttcgatagatcaaacaacactgttaaaattttgtaaaaaggaaaaaaacaaattagaaatccaaagcaacttcaataaaccaaacctctcacccataagaaaaaagacaaatgggaatccaaagcaacttgaataaaccaaacctcaccccaggaatttttttttaaaaaaataataaattatatatttatatatagcttttcggtcctttcccaggaaagttactgagagaaaacagaagaacccaaaaacgggagtgtaatgtaagagtactgatacccgcccaactacgaaacactgagagtaatttccaaaattttgacggaagagagagaaagtaagaaagtgaggaaattagtagtgacgatgggaattggggtcatccccatgaatacgatccctccagaaggttcatttttcgctgtcgtcaatttaataagagagagagagagagagagagagagagagagagagagagacg

SEQ ID NO: 378104 - DNA, 4909 bp, Cannabis indica
tatatatatatataaatttaattcagtcattgttgcaaattgaatgaatttgaaaaatattttctctgctactaaacagagggagccacatatggatttctcacataatgaagcatttgtttgaggaagtatcactatttgtctcatcaagatactaagagtaaatattattgtttgtctgtgtgttgtggacattgtcccacatagaataaatggtagagaattgaaccatatataagaacatgggctactccactcattcccaattggttttgagatgattatttagttaacttgtgttatgtctctgattattcaaagatccatctaaaacgaacataaagtaaaaagaatatagaagcttttcaatttcaagctactcccttaatcttgtttcaatctttgtgctgtaaaatttatttcagttatctagtttgagaaactaattcaatgtttccgatagggtggtcgagaagaagcttatgcttctaatgttagcaaagaggttcctgataattctcggccaaggagaagtaagcggtccaaacgaaagcgtgctgtataaaagattagtgatgtttgtattttacggtgagtcttgtatatctcagaaaaacgatatttctaatatgtagatgccagttttgtgttggctcattcattttgagatataatgctaattgcacaaagtaataatattcactagactttaaaattcatatttaaagcatcatttctcatcacagctattgtctgtattctgttaaagcgaatatcatgtggatttcagaatccttaaaaccttattgaagatgaatatatcttgtgaatattttattaaaaggaactttaaaataatgaacaattatagagaaccttattgcagcaaggaataggaaatagaaatcaagcagttttctttattgcaattctcattctcagaggatttgcaaagcagaatttggagtaagttttctttcttgatggagggcttagcataacctagagcttgtcactggggatacattctcgtgtccgaagtttggtgagcaggtgttttgaattgtctcagtcatttctgtgacctttttgaattacatgtctatttgattagttttcctatccattatccattaagacgaatatatatataatacatgcaagagagttaaacatatgaagccttatttttctcttagaagaaaggagcattattcagcagttggttctgctgcattgcacataattttagaaactcttgatagaatctgaatattgtattttgtgtcctatcattgcttaagatggtgacttctgtaattggaggcagaaatgtatattttaactttagtgttgacaatttagttgctaaatgtaatttttagagaacaaatcatcagttgcattccatttgtacaagcataataccagaataatatgttttccagcctaaataaatacatctgatgtcaaactcttaaaggaaaatactgatccttagtcctacaccatcttgtctctcacctgcatttatcagttcattgtctggatggtggacgatgattccctactgggttaggtcctgatcgtctcatatgagtcttctctccattaacctgtttattaattgtaatgagttcaggtacatgcataactcattgagaaaaatggatggtaactacaatgtcacttttggaagagataaactcaccctagcaggtagtacaaatctggtgtcagaccttgagttgcgctgtgcaggtttgaatctgaagtgaactgttgccagcaattgagtcaggtaatgcaagttagaaactgtctacaatatttttgcctcacatttaatgcgatgaaagaaagcttatatattatacaaaatcctgcacaacccactacaagaacagaacgttgtatagcttgcctgattcaatatcttgaacagtaatggtagagtgatagtattggatagctacgaacaggatgaatgccactgaaagttggatgagagtgcgtactcctcccatgctgggcatgagcttgtgcatgccttggtgaataggataggtttaatattacaagcatttatttataagacacgtttttggtaagtaatcatagccgaagtggaaacttttgtaggagtgtttatcttcaatgagtgcttgggtatcctatgccattagatattgtattggtaagataggaatattggctggtctgtcattgtgagttgacttcttcccagttatcattgcatccatgatagtttaattaagtacctctcctattatttctttgtaattgttcaggccatgctgtgggcaactcgattattggggcccaccgatgcatgtttagttaccatgtctaccgagagtttgttcttttgtcattattctaggtaaaccatgagacttccatgctttttaaagtagttggattttctctattcgttttgttggtttgtttatacttcatcttcatgtgagctgaaattggaaaacaagtagattgattcatattgaagtgaaactaacaattgtgttctatgttgcataattttctccaataacaaatagctttgtataaaccaatgtaaggatgtgcatcagcatcatttgtttgtctcgaattaacttcgtatttcgttcagcaaaaacagaaaaaaaaaaaaaaaaaaaacttggtgatttctatagctgtccttttttgcaggagtggcttgtactcaattatttatttgtttattttactagaaatgttgagtagagcagaagtgcctgaggggaaatcatttccattatagtgcttatgctcaatttgcttgttgactttgctgctgatacatgatttctttttttgttggaagctaatacgacttaaaatattgtagactcaatccagatgagttgccatgagatattttcatcttcttaattcagaaaataaattgaaccttacctacaagttcatcgaattacacccaataaaggcgtaactccatttgcatggtggattataagatcttctatagtttcattgtatcagagagacaattgagcataaaaattggtatcaagtagcacactaattttcatcctatttttttccttcttctaatgcgctactctttctcttttataattacataattgttgtacattacgatttttttggaaactgataaagaaattttaaattaatgaattttagtgaatttggtaattgatgccttgacctttttgtttaaaatcactctataccactacactagccactatttgccacccttttgtgagtaagtagaggagacattttattgaatttgttaggaatacaacaaaccttccgtgagtacgtagaggagacattttattgaatttgttaggaatacaacaaaccagtgaatagattcggttagaaattagttttctgttattttcagttatcattttataacacaattagttaaactcttgcaaagctatctctatttctttcctgttgtactccggttcttcattgggctatataataaagttggccatctcagtttagagatgagctcatttttccaccattttatttttcactttctttctcacttccacaatgggatcgtgtctgtgacacatcgaaacatgtccgaactacaaaatactctcagaaagatagtttggtcccagatggctttccaacctttggtgaattatggcataagacaattattcgataacgaactcatcttactttgcaaaggtatatttgggaatacatgatgaagctaactactagagatgatcccagattggttaggtgtgccttttgcagcctgaaactcctaggtgggaggtccaggctttaaacttgtttgatcatgttccatcctccgggatcgttgtgttttttacattcttggaaggtaattctgagctagtcttggattgctatgctctagttgtatttggccttgacatgccccttgctgtcttattgggacccatttatgaagccacgtgtctaactgttggaaaatatacatataatcttcttttggaaatttataattacatacaaaattataaaactattagtatatataaccttaagaaactaatagaacatctaacgtgacctattcgatggattctatcgttgcctgagtcttttactctagcgactgatgcttcagtggtatcaggcaggggttttgttaggtttgggggggggggggggggaaatgatacgggtgtggtatgggtggcgtggtcatttggtgtaggtgatttctctgcgaagttgcttgccatttggttgggtttgtctcttgtgcatcaacgtggttttcgtatctcccttattaatagtgattctacagtggcaattggttggatgaataaacttcacataaattttggtgttcagtcattttattagatgtctattctttattagttgctgttggtggtagttcttgcagcgttgttccacgttcggtaaatggtgttgcccacatactggcaacctctgttactagtttaggagattatgtttggacggatacttgtccacgattttgagttcttcagtaacaatagatttagctcaatgaattatatctttctctaaaaaaaatatctaatgtgacatgtcatcccataatactggaaagaaaccatagtgcccaaacttggaatctgcttcaaaaaattcaccgaattacacatttaactttgatggtgcgatatcaaaggtaatagttcaaattaacaagagaaaaatatatttatagcatgtgaattatatatatactttaatcaaacaaagaaaaaagatacttgcattatatttaaaaaaatgtagtagagaatttttttttatttatttatatttgttgactgaggtt

SEQ ID NO: 378105 - DNA, 1535 bp, Cannabis indica
aaaataatttccaacatgatcacggttaggctatctgagttgacaaagaatggtcgggccttagatttctgcaccaggttcaaccccaactgaattgctagacattcagccataacagtcgatctgtaaccctctaggaaaattacttcagcagctaccagacgaccttcatgatcacggatgactgctgcaattccactaccctgctgatcctttccaaatgctgcatcacagtgcagagagaagtaacctctcggaggagccacccagcatttgggtcttgacacttccttcactgcactagtctcatggggctgctgcagagcattatcaacgaaatccatggcccaaggagtccagctttttaaattaatatttttattctgaaaaatacgctggtttctttggttccaaaccatccaacttaaccccaaaaacgattcaaacttgtgtttggagcagttttgttccatatgcatgagaaactcctggaggtctgtcatcattccgagaccagtggggaataaatgccagtaccctgctgctttccaaacagatttcaggctaggacagttccaaagcgcatgtccaattgtctcctctttgctccaacatcccgagaaagtcttgtcaatttttatgcctctttttaccaattctgtctttgtgggaagccagttatggcaaacacgccaaacaaagttcttcattttcggagttaaattagagtgccaaatccctttccaccatcttcttaccattgacttatctgatgtctccgctgcctgttcctctattcgattccgaatgtacccactagccacgtggtactctccataagttgtatagtgccaaattaattcatcctcgccacaacctattcgagttttaatccccaatatccaaaggatatcttctttatgcattttttcctctatggactgcactatccaatcaccatttgcatcaacaagagagtccacataagtattgcgaggaaccgaagctggtgctctgagaaggaatggggctcctcgaggtatccatcgatcttcatttattctcactttgcttccatcagtcactctccaccgcatccctttaacaagtaactcacagccccataaaatgcctctccacacattagaacaccaactgccgagtccagcctctatgaaattagaattcgggtagtaaagagcctttaagacttgagcaaacaaacttttcggatttgtgataagtttccagtcttgttttgcaatcaaggcttgattgaagtcttcatgatccctaaatcccatacctcccgaccatttgtctttgcaaagcttctcccaatttccccaatggatttggtgtttttctgttgtagaaccccaccagaaccgagcaattagagattgaatctcacttattagtccctttgaaattctaaagcagctcatcacatacaccgggatagcttggattattgatttgatcaacatctcgcgaccggcttgagaaaaaagacccatcttccaaccttggag

SEQ ID NO: 378106 - DNA, 3654 bp, Cannabis indica
aaatttattttttatcgtatcaagaaactcatccttttctaacaatttcttttcagtctgcataatatgcccatttttgttctgtacagctaggtcaaactcagaggctctgttctgagtatcttcacataatttttgagctaaatctggttttctcttataaggctttaacctgctccaggtcagaggtaagttgtgaaatttgctaacgaagagcttcacaaagagctttgagtccgaaggcatgcatgcaacaagggaaaataacttttagctagtttcaaagttgaagtcatacaaatcgcggagaccacattttgctgcctcacgaaattaatataactttctattatcagcatcaaattgctaaaaaaaataaaaggatctaattcagaaaggactgagttaagaagagctcatcaatagttaagaagagctcgacagagaaaaaatcgacgtagtaaatgccattaatccagtagccgaggtcgaaacctttggaggaaaggaagaaatatgggcaatgggatttccaaaagttgttagaggtgaagaaacaagctttgaaaaggaaggggaggtaaagtaagagtggctgagaatgcaacaaatgttgaacaagaagtagtaggtttggggatgtttacttcgcaagaaacaaaaatagtttcagagtgactgccaaaaagggaagaaatctagaaggaaaaagaggaaaatatattatttagaatattctcaaataatggactatcgtccattgctaaaggaaaaaaatgagaggattccactaccctacccatcaaattcttgtggagagcctccgtaccagaaacagttgggactgagtcaatctcgtcatcatagtcactaatttgacttttggaatgaacattcatattatcaattggaacaaattggatacgatgaggattatatacaatttcgtctatctcagcctaaggaaaaggagggggggggggggggaagccagaaaaaggagtcaccaggcctgaaggacataaggtagaaccaagggcagctgagcttgaagttacatcatcagtaggctaaaagtctcttttgattcagtcgagtccttgggaggaagggcttcttgacatttatactctctagaagggcttgattcttctcagtatgtttcctcttattaagttgtgatcctctagccttaagaggaatatgaattgggctagaagttaaagcttgaggttcaaaggatacagatgaacaattatcagtagtgaaaatgactaagctctattgaataacagttttagattgagcagagctcgagcgaagatgattcagattaacctaataagtaaatagagtgacaccttctgaaataaaaaacaccttctctattcaattcggtcgtagatatgaaaatcaaacgttggagatctttagacatcttctagtcgtgtgcatcaatcttgatcttaagaagtgcaatctaatctggaaggattttttaaagaactaatgagtcattagcaacatcaaccttcttcaagtaatcttgataaccgatagtcaattcaataaaattatccccaatcatgtttgctttgatttgtagggcaatagagtcgacattagaaggtgaatagagaacacgcaaatgattgaagagctccttagttaggatgtcatctatttgataagttaggtctttcgagatgtgggtaatccccaatttaaacaaggtagctttgcagactgtaaaataatttctcgaaggccaataaatcaaggtggaaaattggttagcaatggtgaaaatttcataattaatgaccctggcttcctaagtgggggcatgacttttacccctaccataggagtatttcttatttcagcaccaagagaagttatattctaattttttatgtatgttagtgtaaattaaaattatgaaagacattttgtatttttttgaaaaattctaaaaaatttaccgcattaaaaataaagtttaaaatagttattgtacacataaaataataaagcacgatgcaactaattgtctcaatcatatttttatcaccctaaattattcaatattttttgaaaacgaacatgatacctattataactgtaaagtatattgtcatataataaaaaaatggtttattataattttctatataccgaaagtaagaaataccccgatagtatgagcaaaactgatgctctcacctaataatttttctaaaatggattatgtataaatatattgccaataatttaatttgtaagatgaaaaatatctatatatatgtgaaagctagaaggaaagtgttgtgttagagtaataacgtacataagtggaacaatagtcaggggatgatgccaaagctctgcgccatataacatgatgatgatcatcatcatcataagacaacaattttcttctgtcatcatcatgatccatctttgtacccttacatggaagcataacatctccaaactttgcaggaatgcatattttagaaatgtactgtgtccccacagtcagtaatagagatataaaccccagtagcattagttctgcatgtatatatatatatatatatccaaccaaaaataatatacatattaagttatatatatacatgactataatataataatattagataaaattagtttaatcaatcatgatcaccagctttaattttctccagagcttcgatcatagcctttttatttctcttcttgaaaaactgcatgcatgcacgtacatatgtaagcaatattaataattaaagcttatatatcctcttaatcataaactcaatgttacctttccaagagaatgaattgcatgttctataagaacagaaatgataacaaaaatagaacaaacaagagccacagcccatgtaggtgtctcttgaagtgtcctttctccaggagcccctgcagccatgtctattctacccacctctgctaccttttctatatattaattaacttaattagtatgtatttatgtatatgcttcttttaatataatcaatagtatatggttggaaacttaggttttgatggagaagggaatatgcttaattatgagaatttaaaaaagtactataagtttggaagaagggaacaatatatatgtcaatataatatatatttatttatatataggccgttgtgaatatagagtatagtgctatggtttttgtcattgtattatagttgatgtcttttgtgttatgggagatgcacttatatattaattactacaatatcataaatatatataggccggctataatttcattgtagtaacatccaatataatatttagtgcatatattttgtaaataggtttctacaataacaatactttattaaaattcaacttttgaaaatacattattgttagaatttttagaaatacaagtattaatagccaatatacattaaatcagaaataaatttaaattaagtttgaagcggaagcatttaggatgattattatcgtaccgcacttaggatcactactacaaatatcagaattcgtgatggtcctaaaaatgatttttttcggggaccgtcgctgaaaaaattaagtaactatttaaaattgtctggaaaaatttagtattcccgacg

SEQ ID NO: 378107 - DNA, 5318 bp, Cannabis indica
gcttatttttaagaaacccaaaaattacttaacgccgccatgtccctcacttccgctccggcgcgtgtaactctactcgccgccctctccgccaccacattctacttcctctacaaatctctccgactccgatcactcccataccctagaactccatcttcatcttctccaactcgcaaatccaacaagatcatcttcatttcccaaacaggcacctccaaaaccctagctcatcgtctactccgtctcctcgcctcaaacagcttcgatttcgacctcgtcgacgccaaggactacgagccggaagatctttgtaacgaaactctggtactgatcatcgcttcaacttgggacgaaggaaaagctccgaccgattcgagattctttaccgattggttagctgagagtgcagaagattttagggttggatcgcttttgcttaagcaatgtgagttcgctgtgtttggagttgggagtcgagcttacgattcgacttttaatgctgtagcgaaggatttgtcgaagaggatgaaggcattgggcggcaatgagatattgccggtttcggaaggtgatgtggatagcgaaggagatgtcgatgaagtgttcgatgattggtctctgaaacttgttaggtttttgaaaggtgatgaggttgttgaagaagaaaatggtggttttgttagtgatgatgagagtgttgaagaagaagaagaagaggaatctgagattgttgatcttgaggatattgctggtaaaggaccttcaaggaaaacaggagctcaaagtaatggagtttcgaataattcgaattcaaatgggaagaagaatatggttactccagtgattagggcgagtttggagaaacagggttacaagattattggttcacatagtggtgtgaagatctgtagatggacaaaatcacagcttagaggaagaggtggttgttacaagcattcattctatggtattgaaagtcataggtaagcactaatcaattcttagtagtaagtttaagctataatttgttgttaatttttgaaattgcatagttatcttctttactgaaattattaagaacaaacatttggcctcttaaattattattgtttttaaagaatttatcttgaactatggaagcaattgcatatttattcattttcagttcaagagtctaggcaaatagataattgcataggtagtactataactataaatttaggactgtgtatctctaattttagggttaatgtttgaatgtttaaagtcattaacttgattctaactagtttaagttagttaaatataggttcttttcatataatcataggtatggcttgttcccgcttcaagcctccattagacattccctaacaagagtgttttcggcgtgtacctgtctcatacctgcaaagaatcatcatacttaactttttctaggtgatgtgagattgctcagcttattttcctttgtcacagttgctatatcaatatattatctcaaaagaggaacgaaatgtaatcaaaggggaaatttgcattttttcatagtttgaggggtattttttataaaataataatttagagagcaaaatcctatataagtgtggggggttaaaaattctatttcaattaatatatattaatggtaagccatcatttcaggtatgtggaaatatttctttcggtctaacgtccaattatgagtcttttagaatcaaaattaggtcttatatcaaaatatcattagataatttctcaacttagccaagatctagggacagaaaagatagatgagcttcttataaagaggaccacctaagacttagagtccccagtcaaaagtcaactaaattgtataattggtcccaaacttgatgagtttagtatattgtttgagtagaaataacatcccaagtagtccatacatggaaaatgggtgagaaaattttaattttgttttgttttaggtgcatggaagcgacacctagcttagcttgtgcaaataaatgtgtgttttgctggagacatcatacaaacccagttggaaagagttggcaatggaacatggatgatcccttacaaattgtgaactcggctatcgaacaacacttaaagatgattaagcaaatgaaaggagttcccggtgttacactcgaacggctgactgaaggtatgtctcctaggcattgtgccttatcgcttgtcggtgaacctataatgtatcctgaaatcaacacacttatcgatgagttgcatcgtcgtcggatttcaactttcttagtaacaaatgctcagttccccgaaaagattaaagatttaaagcctattactcagttatatgttagtgttgatgctgcaacaaaggatagtttgaaggcaatcgatagacccctcttcggggatttttgggagagatttattgattcattgacagctttgagggacaaacatcaaagaacagtttaccgtttaacccttgtgaaaggatggaatacagaggatatagatgcatattttaacctctttagcattggtaaacccgattttatcgaaatcaaaggtgttacatattgcggaacatcctctacgtcaaagttgacaatggagaatgtgccttggcatgctgatgttaaagccttttcggaggctttggcattgaaaagcggaggggattacgaggttgcttgcgagcatgtccactcgtgctgtgtcctccttgcgaaaaccgacaagtttaagattgatgggcaatggtacacatggatagactatgaaaaattccatgacttggttgcatctggaaaacctttcgatagtaaggattatatggctctcacaccgtcttgggctgtttatggagcacaggaaggcgggtttgatccgattcagttgaggtacaagaaggaacgaaatcatcacaagaaatcaacccaatctacttccataccaggttagagattattgaaactgagatgttaattattttacattatttagtttctttaaatattcattttagtctgtatagaatatagatttgctgaaattcaatagaagtagataacattattaactattatagtaattttaaaaaacatgactttggttttcatttgtatcttataattttaaaatattatgtgtttatatatataataataaaagttgagtatacacagtttaacataaaaatattacataagatatagttcaatataaaattatacaatataaaggttcataatatttatttgaagaaaaattaatttttgatatttgagttgattatttatttatttgataacagggtaatttctagcatcattacttatataggcctgagattaaacaccacttctccaggtacgcagttgttcttatttatttgtatatatttttttttagaaaaaaaaacatcaatgaataaatgtttctttaattttatatttattattgtatatatatttatgcagtagaagaaatagaagatgaagagaagaaaattttgacttgttaggtaaatgagaatttacatcataatccagatatttacttggattttttttgtttttttgaaggaatatttgaacattcttaatgtattttaattagtataatataatgtaatcgtattattcttcacactaatttttcacttttttttttaaacttatatactagtattttaatagtttagtctaaattgtttaccaggtcatctttatttgatttattattacataatattattttttaataaacgacaattattagggagaacgacaacaattagaaaaaacgacaatgttcaacggtgacagaaattagttgaatgacacaattaggcaaaaacgacaattattaaaacaaacgacaatgttcaataatggggacggaatattagttgattgatacaattaggtaaaaacgacaatgttaaataaaggtgccagaaaattggttgaatgacacattaggcgaaaacgacaattattagcaaaagcgacaactattagaaaaacgacaatgttcaataaaggtgatagaaaattagttgaatgacacattaggagaaaacgacaattattagcaagaacgacaactattacacataaacgacaactattaaataaaaacgacaatattcaacaattagtagacaaacgacaataatcaaaagaaacgacaatacaaagttagtggggctaaactttcaccatatggttttgaatggaaaaggaaattgcattaaacgatatgatagaaacatctttaaaattagggcaaataaacagctcactcaatgtacgatcgaggcttgagcaagaaagtttgccgctttattagcagaatgcttaacaaaattaaagaacaagtttctaactccaacaacaaagattgacactcatcaataatctgaccaaaataagactacatcatcacttgactacgaactgtctaaacaatcacgaggcattacatttcaattatattgcttgaatttgctagttgttcataataacatggccacgagccttaagtgatcgataatctacaaaacttgttgattccactagtcgtttacaatagcttggccgcatggcttatgttaattgatcgatagtttacaaaacttgttgattctactggttgtctatcacaataatatggccatgtggcccattttttcaattgagtagtgagttttgatcaattgaaatgcacaacagcattaactacataacaaataatttgtaatagtttggattataatatttagaaagaatctaaagttggaaattcagagactcggacccaacctcagacctggcccctgactcaacctagctccgaagtcagggacgaggttatggtaaagataatatattattacacaacgtatcaatgtaagtcaataccaaaaatagtattgtattaataaataaattataatacaatctaacacaataatatataatacaacacgatgtacccaaagccggtcctgagattggatgggtcttaggagaaaaaaattattgggccatttatttaaacaatatatgatatttttgaaaattattataatatatataattctaaatagaaaaaaaaaatttgggcctttgaattgagtaggccctaaacacgagcttaacctggtttagtccaaacccgaccctaaaacgaaccatgatcataggtggtcattgggcgtagaccatcaatttcttggggtaagttgaaaaataacacttttattaatcaattaatcaaatttacctctaattttatatttatttgaaacatac

SEQ ID NO: 378108 - DNA, 8513 bp, Cannabis indica
ttaaacaacaattatatgttttggactgcgatattaatgtatctatttcgaattttgtggctctgatgtttaatacctgtttcaatttgaatttgaatttagtagggagctccgatcaacaatgtctcatctatttattgaatgatctgcaacattcaaatgagaattttgaataaggagtgcagatcttactcagttcattctgagattataatttcgaatttttgatagctctgtgtaagcagatttaatcaatgagaatttgctgttgatggattcacctatgttgatgtttgttttttgtttctgtcaatctgattattcgagtaggtgagtttttttgtttgatttttcattgaattgttgttgaatttttgtttcagaaagctttctcgaggatcaatggctgctctgtttttttttttcctggaacgagaatggtgaaggtgttgaagaaggtgacaccgtattttatgtaaattagtatagagttttcgtatatatgttgtttttaccgtgtcatcgtattttggttaaattttttctacttttgtgccattgggaaaatttcccaaattttattgtactgaacaattagagggtatgggccaagataataatttatttgtaactaatcatactttcttttctaattattataaattaaatatatattccatttgccttcaacgaaattctgtcatcaccaagaaaagtgaattttcaagtactattgacttctaatgcagctagctcaaagtgcatgacttgacttgatagttgttaccatttagaatgatagctctcaaagtatcattatgtggtttcacaagtttgtaaacatttagaaagatggttcataaaagtagtgagaactagtcaaaggaaagaaaattagttaatcaaggacatggatcgaaactgaatacctcaagaaccaccacccaatcactttccaattaatcaaaagatcccactgaagctgattaaggatggatgctattgccggtggccattcttgttattagagccaagactagcttagaaccacgtttcatacattggtattaccaaaatatccattttctatttatcaaaattataaattataagttccatcaaatcattttctgttatgttattgcaaagcctccgagtgataggacaagatcaaaagaaggaattcaagaaattatctacgagaggaaataaatattacatgacaattatattgcactctttctttcatcgtgcctctggtcattctgttccgttatttttgtggatttgggttatttttataaagatcaacgttgccattgtagtagtagtaagcaccacattataatcttgaattttttatttatttcatttaccaatattacaagaggaaattacaaaacataatatgagaaaaagctcaaagtgaccacacctgctattgctatatctactgaaaacaaaaacaaaagcacaggatctaaaacagagtgattacaagaaaaagacccaggagaacactaacaattgtgaagagaccaaaaaatcaaccagatatttcaatggatttgacatcaggttttttgacctcctccttagggaccgtaactgtaagaactccattctccatagcagctttgatctgatccatttttacattctccggaagcctgaacctcctcatgaacttcccgctgctccgctccaccctgtgccacttgtcgttcttatcttccttctcaacgttcctcgctccgctgatgtggaggactcgatcatcttcgacctccaccttcacctcttccttcttcagccccggaacatcggctctgaacacgtgggcctccggagtctccttccagtccactcgggcattgacaatagccgagttttcttcagatagttttggaaaagatgagttaggtaaggggaaatccttgaatggatcccaaacgtccagagaaaaagggtcgaaaacgttgcttcgtcggccaccaaagaagctaggaatgagggacatgttttccttaaagtacaaagaagaattaaagattagatgaaagttgagagtgatttgaggatgcaattaataagtagcagtaaagtagtgaattgttttttcttgtgtatgaattggggtgagtgggtttatttattagtagcggttgaagattctggtgagttctcgtcttaagtagcaacggaaaggagagagcgagacaatcattccagtcttccagacgcttctcagaccttctattgggtttactcaaaatattttattctctttctcagcattctcttatttatttatttatttatttatttattttttttgagaactaacaagattctcttattagaaaagtaaaattaaaataaagacaaagatatcattaccttctcccattcatccaaaaccctttctttttcttttctcaacaatttcttacaaaaaacattttaaatttcaataataggtaggttacacatatttagttatccctgctctggaacgttctagggttctccttctctggtttctcatccagtttgctactcgtccctatgctcttctccaccctcttctctttccttaattaatgcagttaatctgttttcttcctataatcatggttagtgtttaatgcagcctcccttttctccctctctctggttgttttcttctatgctaaccgtcactttgctcttctactttcacttctctttcttcaattaatgatgttaattatgtcttttgcctataatcattgttagtatctatcgcagcctccttttttcccttaccgagaatgcatttaatgtttcctcagacaccccttggctatccctcttcctcccctcttttcatgcattcaatgaaagtcgttttcttcaggtggaggcgcatcattgccctatatatgatggcgttagcatcccctcctcttccagttcactccaggtactatctctttttccttctctatttaaagttatgctttttgcttcgtacctaccctattccaacacccttttcctctttcgatcatctttctgttctttcattgcaaccaaaaatggcctctttccctgtttcccactccactcaattaactcctgaagaagctcttgtacatgactttgaccatgtttccatccatcctgaacctcaatcctagtcccactgcctagttgttaaaattttgtcccctaaaaccctgaaagtcgattggattcagaaagccatgactgaagcttgggcgctcgttgcccattttctttctctgaatatcacttgggactttttcgggttcagttcggttgtgagggtgaccgtcgaagagtcatggagggtcagccatggcatttcgaccgatcccttatgatctttgccattcctgatggttttgacaccatcctcccttcccaacttcgctatattcctctctgggtctaggttcaccatatcccctttgggtcccgttccaatggtttggcttagtttgttgctgatacgataggtgacctcattgaggttcatttgatctctctgtatgactctgtcacccctttcatgcgtgtccgtgttcttctcgacaccaccaaaccgctgcatcgtggcatgaatgtccacttcaagaaattgtcccttaccaagtggctcaagtttctctatgaaggcattcaaaattattgctactattgtggtaagcttgaccacactttcaacaagtgtggtaaatttctccttcattgtgataatcacccttatccccctagcctaagctacaaggatgtcttgcgtgcccctgccaaatccatctacaagaaaagtatttttgaactgtccacttctattccctttgaagaacaaccctctcttgccaacactggccatcccactatcgaagaccacaatgatcacttcactgtccccaccgtggttgaacccactcccccctttgccacttcccctccaccacctgccttcactcatacgacctccaattggctccaacttcatccattcctatttccaccccctctccaatcactcaatccacggttcactaccctctcccagtccatacctttatcacttctaccactaacccctccaccaccaaaggtaaggccccgatgtatcctgagacttccctgcctactctcagccaccctcctttatccagtctttgcatcaatgacactccttctgcacctcctcccaccaaaaaagtaataatatttataaataaaacaatactcatatcatcatcatcatcattgtatttaagacaatatataaactaattaaaaaatgaaatcatgtatatatataaatatatatatacattacgattttattattcatagtataataacgatataaccaaattggaaaatgaatttgaaagaagaaggtttagccagcgaaagtaaaatcaatgaaaggaagaattagataatcacacaaggtattcatgagagaaagatatagagaaacctaaataggagttcgtaggatttcattaaagaacccaaagagattgagaagcagagagaacccattatagctaccttgtattttttcatcctacaaaaaggcaagaacttacttatagaaagaacatgaagttcttgcacgaaagagagagaggatgtgcttagaaggagaggacggtgaagggagagaggtctattttgttctctgggaagaactgatcatattaagtgaaaggattttatgttttagaaaaaaataaaatttaccgccaattttttcatattagctttaattttaaaaaatatttaagttgccgccaattcaagggaatttttcttatagtggcaggagaagaagctgcgatttggtcgcttatggatttcaaagagggataagagggggggtgttaatttgatcaacgcttagctggaagtagtgaagttatatgggctcaacgtccatcaatgacattgaatcactctaaaaaaaatctctccattcttaacatatcacgtcccacctatttttttagtccaatattgatggacatgataattttttatttttagtccataaatgttggactagaaatctctctaaatttttttcatgtccaacactatttttgttggacaagaaaaataaacataaaaagggttatttgtagtagtgccttgtcttaaaccttgctcacctttgaaagaaccctgaaatcttccattcattagcaaggaataagatgtatttctcacacggttcattatccaactaataaactttgtaaggaaacaataagccaccagtaactttttaagaaaatcccaattgatcgtatcataagctttactgatgtcaattttaatagtacacctcgagagcaattcttccttttatagttcttcaaaatgtcctgaagaatcaatatagtgaccctttacaatgcaccctggttctaatccactaaattcaggaggattttagccaatcaagaacacaagagcttagatacacacttgtagtcaaacaataggcaatgggtcgataatctatagctcttgaagggcaatctatttttggtataaaaaaactagaaccaaatccatcaggacctggacaattagtactaggaatactaaacatcgcagccttaacttctttaggagtgaaaggttttaataagtatacatgttgatcaaggttaagtttggggcccatagcaatgtagtccgttgaatttctaaggaagttgctctggctctgcccataatgctccggaagtgaccaagaaaatgttgaacaacatcaggaaagtagtcattcaaggtgccctaatccgtaacaaaagaaacaattttgttatctttcttcctcttctttaacatggcatggaaaaaagatgtgttgctatcccccttttgtattcattttattttgcttctttgacttagaaagttcaaatacatcctttcctgactgtgaaaatgaacaaccgcactatgttctctgtcaagaagagatctatcaaggggattagcttggcaaaggagttgagcttctttaaattgatcttcagctttctcataagcttctccaatatttccaattgagcgactgttgaaagccttgagcttatgtttaagcctcatggtcttgagataaatccctttcaacccatgacatctcaaaggtttgctcaagctttcaagaacaatctgcttatactccaagtggtcagcctaaaagttaaagaattgaaacagtttgtaaccaatattctcagtaacaactgaatggacaatgcaaaggcaatggtttgaataagttacccatgagaaacgagctaaggtatttggaaaatcatcaacccaagtctcattgtgaaaaacatgatcaatacaagagaatatttaggcatcttgcttattagtccaagtaaatgaagaaccagtttgtttcattggcccaaccgaagcttgagcaacccaacttgtagaatcagcaagttcagccgcactaataggattccccttgcctatcatcatagtgaaacacagcattgaagtcaccaagaataatccacgccttagttacattgatcatggataaggcagaccaaagatcacttgtactatctaaagtgttggctccatagtgaaaaatatcataataatatttttttctgccctattattttaatatgacaatgcacatgttgcttggattcctctaaaacttccacctggacagagttctctctccaaagaaccaatatacgcccctcagtatcatgactactatagactcccaactagtgaaactactagtcatcatcctctataatttttcccctttaaccttggtctctaaaagagcaccaactcctactttattaagcctccaaatatcaacaaccgattctagcttctcccttttattcaaacccctcacattccaactacaaatgttgcaaaaattcatcaacaataagcaagtaatggaccctcatctcctaattcctctccctgctcccctttcaaaattttgaaagaattttgaagcacttgcccttgagactcattaaccttttgaaggaaccagatcctttagaaactcttgtcttaggtgactaccaaatcacttgagtttggagtgcctgctgaacttttggtagtaactttttgagaattaagctactgcatctcaggcatctcatcagtgacattatgagttgtggtaacatcttccacaacctgcttccctgctgattttagatcagcagattttccctcatttgccttcacaatcatcttctttatcaagctttctttaggcttctcaactcttctcaattcttgatatactggaaaagtaagaagcaacatgttgtatctcgatcctcagcttcaatcgagctatgtccaacataacatacgagctagtttggttactgtttattcttaaagaattgaatgtggaacataagggccctgcttggctattttgtgacaataaggctgctcaacacatagcagccaaccctatctttcatgaaaggacaaaacatatagagatcgactgtcatttagttagacaaggtgcaagaaggagtgatcaagaccagccatgttgcctttaaggacctacttgcagacatatttacaaagccccttttccctactcatttcaatggcctcaaagacaagatgggtttaattagcattagctctgcatcttgagggggagtattaactctagcaaatattgttgagctgcaagtttagttaaactgtcactgtttggcagttagttttggttatgggtagtttcgtttgtttagttagttatatcagttagttttcttggttctaactgtgtgtaactaactcacttgtactcctcatttattgagcttgagctggataaagctcactcattttttgttgaatgatcaatgagaattctgttttcttctttttttctctcttttctctgttttcatgatttataataagtgtttgtctaaatttctccaacaattgtggccacagatcataaatatccaaattcattataattccttaattcaaataaaatatataattctttaggcaataattttccattcgtaatatagaatcaaaatttatttccatcagattgaacttttccattttaattttgtatacttagagcaacactaaggagacagtatatattatatatgtcatgcatatttgatccaacgagactgcattttatgcaacattttaaagttttgtctacaatgtacaacatatatgtcgtgcattgtagtcactgcatatctttttatatataattttattatattatatatatttatattattgtacttattaaattaagaaatagtttttggacaattttaccatgcatatttttaaaagtaatgtacgaatctactcttatttattttggcacccgacagactttttagtctattttttatatagtcatgtatattata

SEQ ID NO: 378109 - DNA, 2584 bp, Cannabis indica
ggctttgtctaattctggtttagtggtagaatattctctcttctgttatgctattttgtcttgttcaattctgttatttcctttttgcttgatttcctctgcttcacgttgtacgctgccacctggctttgagccgttgtaatcattgtgcctataaatgcaatcattagcctcagtctcctttgagctgagattttatccttactgctgtgtgtgaatattctctctgcccttgttggagcttctttaactttctttacatctttgtttcaatagttcattgtacagttttgaacactattggcttaaacactagtactatgaactgttgataaaatttcttcatattgtgttcgaagcctaaatttatttatttgcagtttgagtaaaataataaagaatattaattactgagtgggtttgtgatctgataaacaaatgaactgaaaaataactagttgaattctttatcttattcttggatataaattgaaagaaacatagtttaaactcatttatgaatagatgttattggttacacctcttgtttcccactatatccaaacagaggctaagtgtcttttacattttctttacaatccacaggaatcgtgatcatgcaccagaagatgtaccattggcattggatagaaccttgggagacttgcaacttgattatgttgacttataccttgtatgtcttactttctaacttctaagcttatttcccaatacttttatatacaatgcagtgcagaagcaaaaatatgaattgaattactttatttggattgtccttagttctagcaaccaagcttatttaaaatggagattttcttaagcaacatttcaagaggaattctacttagtttggataaacacgattatctttttgaacagtttaagataattattaacaaaattattccacaatctaagttaagttgctcaaattttgaagatacactggccagtgaagatgaaaaaggggtcagtaggcttccagcctgagacccttgatcaaacagacataccagccacttggaaagcaatggaagcactttatgattcaggcaaggctcgagctattggtgtaagcaatttttctaccaagaaactggcagatttgctcgatatagcacgagttcctccagctgttaatcaagtggaaattcatccttcttggcaacaagccaagctacatgaactttgcaaatccaaaggagttcaccttagtgtaagttgtggctaaatcaaattaatttttagatttaaatggttctaccttgatctcaagccaagtagttcaccttcagtttacatatatatcagctgcattgtacatatcttcatatatacttgtttcaggggtattcaccgctcggttctccgggcactacatggataaaaagtgatgtccttaagaatccaattctcaccactgtagcagagaaattgggtaaaacccctgctcaagtagctctgcgatggggcctgcaaatgggtcacagtgttcttcctaaaagcacaaatgaagccagaatcaaagaaaactttggtgtttatggttggtctatacccgatgacttgtttgccaagtttgccgagtttgagcaggcaagtctcttcttgataattttctttaatcatctaatactcacctcacaaagcaaacaacttataattttgcatcatcacctatataaagtgattttactattatgaaaaattacttgtctgataaccaatttctttttttgttaaattttttccgaatttcaggcaagactccttaaaggatcctcatttgcacacgagacttgtggctcatatcgtaccctcgaggacctttgggatggtgaaatctaaaaagttaaatcattcttaaaccaaatggagagaaagaacagcaaaacagaagacaccattggcttgtttcttcatttaattcttctcaaacatttggttgtcattagacctcttctgttttaatttcatggaaaataagtactggatttggttatgtttatggccttggttttctttgaatatggtcgtggtttacaatctggaagtttaagaaatgagaatgtggaaaaatgagctcattgggagcaaaataatttataaacgaggcaatattttcggcctccgaacagaagattcaaatcagctgtgaaatgctgtgtcttaaagtagtgtttaactaattaacattcatcatgtagatctttcgtttgattattactaggtaatacgcttagctccgttattttgtttattttttaatactaacattattattttcaaaaataaaaaactattataagtgcaaaaaaacaaaaaagaagactattttaattaggctaattaagatttttgatcattgaattttgatatgtactaaattatgtcctctgaatttttaaggtcattaaaaataccccctgaactattgaaatggttggatttaaggactttttccaatattagtaaaaaaatttaaaatgaatgaaagtttaggaggcatgattggggagcatagtttagtacataaacaattactgaaatagtaaaatagaat

SEQ ID NO: 378110 - DNA, 4763 bp, Cannabis indica
ttccatcttcacattgagctgaattggcagctatttcattgacgaatcggttcttaatattcgacaaatctaacgttttggtcagtaatttgtttacagtaatactaatttgtacaacaagaaagaaaaaaaaaaagaaagagagccacagtactgtaatgtattacaatatatatatatatatatatatataaaaaaaacactagaaatggtattgtcctaaagtaataatcccaaaaaatctccagaaaacacacttaacaaagtaattgtattaatgaaaattaaaaataaatctaattaagaaaataatctagaaaagattaagttaagattaaaatgaaaaatggaagaaaaaaaatcttccgtaaagattgttaatttatatgtttttttttaccaattaagttgcatcattcatatgaacattattatttactaattgttcaattaagtagaaagtgttagtaatcgcaattttacattttttattttttatatttttttgagataaatataaatgagaatcatttacaatgacatcctttcatggattttctccaactaattaagtgtgatctttacttaacactaaaacagtaaaacatatttagccaaatcataagtatttacgttgacactccatttaacatgagcaacaaaaactttgtgagaggataaattacaacaagataagttagctattaaatctcaatataaagatttcatatacaaatgaatattcaaatcattagaaacgagtaaaggatatctttccacttgtttaattggcaattgtaattagagagcccaacttaaactatgattaacacagttttagcttccatatctcatgtaatgcaaaatggtttaactatcgactataaaaatgcaacaacaacatttccattggatattgtgaacagctgcaacaacatcaatagtatttgtatgaacatcttcagccatcaacatttaatttgagtttgcccccaagaggggtatggtggcagtggtgatggtcgtttggactaaaattgtacaagtaatttagaagcaaattgatcataaaccacatcgcaccactgcgttaattatttactccatctcagatcgtatgttgatgaaagatgcaccaaataattgaccctatgcatgtaagtagcttcctgccaatatgtgtatgccgacatccattaaaaattgattcccaaattgaacaaataacattaacaagtatcaagtatttcccactgtagtaaacatttttactttctttattttattcattttggattaaaataaacataaaaatatccgtataatcaagtgttacacctctcctcataaagaggacctagttcaagtcccgctctgaaatatcaaaaaaaaaaaaaaaaacataagttaaagttataataaatgtcttatgtgctattttgataaaattttgtaggtgtttcattttttttttcttattatatttataaaattacaactttcctaaaaaataaataagcaaataatctgttatttgtgtttagaaagctaaatgattttataggcttgagtgtaaaaattacattttgtcaaataaaaaaacatttgcataaattgttagtaatattaaaattattaaattaaattatataaaattcaatacttaattacattaatatagtatagttttgacagctgtggtttttaccatttttcgtgcattttatagaatcttttatgatattttgctacttatatctttccatcggtggaaagcgtcattatagtcaaaaacatacaataattgaaaagttagagcatatataagacgttatattatgtgtatacatacagtcataagtactcatagacaaatgtatatgtattacctttcttaagttatgccaaacctaaagccaggacaatatatataactccaagaacaacttctttagtccaaaaccaaaattttgagttttcttggcaaataagtaatcaatctcaattaatatatatctatatgaataatacatatcttttcttcgggtactctttctactggatatcctatctcaccaagaccaagacacagattatattaagcattacgaaaaggattttgaacattgcccaataccaaaacactagtgttaatttcttaatttaagttagtttcaatatatcttaaacaataagaaaagcaaacaatctacacacatatatttgattattatatagaccaatattattattgatttgagtaagattttcttataagctaacgcataaggaaaaaacataaagctaaaagagagtcataatatgttgtagacaatccaaaatttacaatgatcaaaattaatgtgtgaaccaacaatctgctagacgacaatgaaacattatagaaagaactaagaaaaataaatgagaacatgctaaattacactaatttttggcaactacatatacgcattataacattatacacaattatatgtatatgttgatactgaaaaggaaaacagttaggaaattggttagacagttaggattgttctgatatagaattagttgatcagctcttgtatatgtgtcattataaatacttgtatctgtagctaactaattcattcaacagaaataagattcgtttttctctttctttctctacttcatcactctgtttcttagttcaacttggtatcaaagccgacggtgaacttccatggcgtcctcctccaatcctgcagctcaccagtccgttgttccaactacaatctttgttccaccattgccactgaatcgaaacaattatttcttttggagatctcaagttcttcctgcaatcagagcacatgatcttgaaggaatcctcctcaaccaaaattggccttagacaaggatttgccaagctccagaatccacaatcatgataagcaatcctgaattcaatagatggatgcgtcttgatcagtttcttctttcttggttaatgtcaactaattctgaatcaatgattgggcatgtgttcaattgtgctacttcctctaaaatctggaacacacttgagcaactgtttggaactgcatctggagctcgacaaattcatctgatgaatcagcttcaatccaccaagaaaggatcactggccattgatgaatgtctattcaagatgaagaatcttgcagatggtctttgtgctgcaggaaacccaatctcggtgaacaactgatcttgtatgttcttgctggtttaggaacagagtatgaagctgtcgttgtcaatctgacctcaagagacaatctcactcttgttgaggttcagtttatgctcaagagtcatgaaattcgaattaaagcaaaccaagctcatgccaccattgatctaaatgagccacagccaattatgcccaattcatgaagaaccaatctggccctcccactaccaatggctgtggaaattcaaacagctctcgaggacgtggaagaggatcctatggtggtcgatcaactaatggtggtggcagaggttattcgaatggcaatcgacccatctgtcaactttgtggtcgaactggtcacacggttcagaaatgttatagaagtgttcagaactggtcacattatctttctaacatgtctgcttcaagctcttcaacatgcccgataaggaagaacaaggggaagggggttacacatgcctataatgggacgtgtattgaagatgcactctagaagcaaaaggtgaagaagttgactacaaaatttgatgaggtgtctgggaagcctgtaagtgaggaggaaaagatgttggttaaccatatggttttttatcactcgaaacactattccaagctgagttctagactggtccaaagtcaaagccacagacatcaccctagtgtttgacagattagaggtaagtgatatgttttaatcgtctccaatattggtattgattccatataagctcaacaactacatatatatatgtcttgtcggtgttgtttttatgtcgacaaaatcctccaaaattctaacaaacctgtcttccaaatattttttgtgacacattttaccagcggttgccttttatgtcgacatctttttgcaccgacaaaactatttttgttggcgttcacgataacacgttgacaaaacctatttcaacgatgaaacatttatggcataatcttgtgttgataaagcttatctggcgcaaatagaagacttttgccgacacaaaatggcaccgacaaaagtctttattctcatagtgttgggagctaccatagtcacgtagtatcaaatttaatgtggatcgatgcaattatgtttgagaaaagtcataattattggtttggggtggtgtcaccgaatgagagggatttcttattaacaggacgtaccgagtttttcaagagcatgtggagccattcttagctgaggcaatgagattcaagaggcactgagcttgataaaaacacacgctgacagcaggtaatagttaagactgactgtttgttagtggtgcaagctttgatgaggtgagtggttatagtatctttgtttggtcttgttactcaagattgtaagcatttgcttactgaattgagaaatatctttgttgttttttgttaaacaataaaataatttagctgctcataagtttgctcgaatttatggggatattctaactaagttgttatcgtgtttagtaataaaagttgatatttaataaaatggggaattaccccatatact

SEQ ID NO: 378111 - DNA, 4392 bp, Cannabis indica
agcttttacagggtttgaagctaaatagcaagaaataattataatagggaaaaaagaagaaaagggtaattaaagaaagaagagtaaaattgaaagtgaaaattaaattaaagagaaataaattctttttagtagtagtatagcgtagtttttgagatcgaatgtttgttttttcattgcttgtacaagaaaaaataataatgctaaacataaagttttatgtacacatagcaacgtggatatgtaaaatctgtatcattccatactgtcatgaaaacgacagcgttttggaccactaaatatatttcacactcacataaaggtgaaaagaccgtgcatgctatatattcctccttatatccaaattacctcagttcaattaccttaatttgaagccctagcttattaaactctaaattagttttttttctgtaacgtttgaatttaagcttactgtagtttctctttcctccattataggaaatgagaagattataatttagtaataaaatttaatgactcttatacatgaatgatatactgatcagatcaaatcacatgtgcacatgggcgactttcaataattttccatttaatttgtcaataagagaaaaaaaaacaaacataaaaaaagcatgcagatctcatgtataagcactaataagatgacaaacagtaaataaataaatatcaaaccgtgaaaagcatctaataatataatatatttattattataagggtatctatatatatttttatatatatatataaaagtccaagaatggacactcacatctatgggttaattgtcagatatattgtgaataggagaattcattatgtgtcatttttgtcggtaaaacgattcaatcaaagaatagtagtaatttagaccttctgctcaaacgaatgattacttaattaactgtgaaaacataatgatttttaaggcaaaagactagttaaccaatgacgattaagcacatttaattaaacgagtgtaaaattaagcaaccaaaagatccttttaatttggtttccaccaaaaaaagttatatattccataattggtctaatcttttggatagtcagtgccgtgtaagggcaaaggactagcaaagaaaggttcaatatttactaatgttgaaaaaaatagagtccaagttgagtggttgaaatagctttttattactaaagctgccttatggagagataggtagataggatacatatagtgaggaataaaaacattattggaagctttaagacttattaagagttcttagagcagttggaaattagaggtgtttcaaagcttgatacttagctaaacctatcgactttctttcaattttctttcttccttttttgttaaggaataatatattatatatataaatatataaatttatataataaggatgatcatccagaggaaaaacatgtgatgaaccatatctctatttgttttctcttttttagtgaatttgagtaactaattatggtaaaggtcattaatatttttggaccacaacaatggtacccttcttttgcttcaaacaaagaaaagcagtttgggatgtgtgtaatgccaatatctttgcaattattatcagttttggtatttttgaatccaaacgaaaatatatatacacatgaaaaacgaaaatcaataatgaattgttgaccacaccaattttctttttcatctgtgtatagtactcctccttataaggtgaaccttttgatatcctcatccaatattttcaaattgaaaccccctttttctttccaaaaaaaaaaattgaaaaaaaaccccagtacgtatttccggagaataaaatagtttacttttcttttatttttaagtatagttataaacttatacgaattacttatcatctataaacttaaacgacttaatagtaataggattaaataaatgcatacggagtcgttttaatacgtgcaacctacacaatagcagtactattgtactaatgttaataacgcgggtatttggtgtaactatatgattattaaataaaaagttgataatgataaggtacattctttgtatatacttatatacattataatttataattaattagtaagtatattatagataaacacccgagagagtagagttccatctcataataattgttcgtttcgttatcttttctcttgtcgtggtttgtttttttattattattattattattattttctagttaagttcatgttgaacatgtttagaaatgaattagcggtgattaaaatattatgtatattatgtacaatttcagtaataaatcgggttatacgcatatggtcaataatcaaacataataatgttgtgtgtacataatctttgaaaggtaactgaacattaatgattacaacttgggcacatgataacaacatttatagcacataggttttttcataaatatattattttcttttatgtacattttcacaacctaaatttttcatttacagcgagttaaaaaaataaaaaattacaattttacaaaaaaatatataattttaaagttttttttcttaataaaacaaagacaactcttgcaatagcaagagagggacaagcagaaatacaacctatctaaaggcttttatacaagcagaaaaacaagcaaatctagctacacaataagctacattatccctagacaaatgaaaactcttagtacaataaactcatgacccttaatattattaaggatctcaaaccaatctaagagacctctaataccaaaggcaagcgcagtcacagaacaataagtaagctgaaattgtgctcacagttcaataacaaaacatatttcacgaatgacagaagggagaagaagattattggcaacccaatgtgaaatcgcatacacatttgagcaaaacaaatggtgaatatgtgtatttcgtcacacaacccatgatatgatcaccatgaaccactcaaaatctattttgctagtgcgatgtcacatcgtaaatctcattaaaaatggatcaattgtgtgaggagggaaaaaagaataaaattgactcaatttttaaattttcttgatcccggggcaataccacagtgcatggggaacatctttacaaacctttttgtaccaatcatacaccagtggaacctgcatgctcttgtatgctaggttctttttcactgacaaccatttgtgacaaagcttccaccaaaataccctgaccttaggtggcactgccgcaccccaaattaacttccaccaagccacatcagaacactcagatcctttttttcaaaaccagtgggcaagcatataacaaccttaaccatatagtgctcatccttcataaagtcttaacattgacagtctttgttgggtcgttccccactagtagcttctaacaccaaatctaaatcattaggatgaaatactaccttaaagtaaataccattttatttaccattctcatcttaaagagccccatcttatcacatttagttatagctgccttcatacatagtgagaaattaagttagaggcctcttaagccatttatttgtccctaaataaaactcaatttttatataatcttatttactaattaataatatattagaagtcattttattaattttgtatatttcttggttcacgtgttacgtactatatgtttaataaataatgtttaccgaagtttttagaaactaaatatttaggaacttaagaaataataaaatagcaaaaataaataagatagaaatttttacgtgattcaagtgttaattaacctttgtccatgagtcagtctattagcctctaggggcgaatttgatgagttaacaatatttggcaagaaaccccaaccttgtgttcttagataaataatacaattaagcagaacctagccatatcaggattaagatctattgacctaatatcaactaactcatattgacttagatagacataacgacaattttatgattgttaagaatattttaccaggatctagattaacaaacaagtatgtttcattaacatcctacatatgaatatctctaaaataatgagattaaacacataagagtttagcaaactttacattgattgtagcggaataatatgactcctttcgctcagatctctaacccttgttcctttctatcgcagagtgttatcaagatctgagcctggatctctttctctccctcaggttggttaccaccgtcttccacgctatggttgagtacttgactagttatgtgtgggtatggtactctatcactataggagaatttgatgaagaacaatgaaggagggttcaaattactatagaaggtgtctcccatctactagttatcagagaatgaaa

SEQ ID NO: 378112 - DNA, 7293 bp, Cannabis indica
gagagagagagagatcaattgttcaggaccaactcacagttcctaacatctagaccgctattgacattctctacattcatagtttgaattaataaatcttgcagcatatttccatgttgagaatcaaaatatacagttatggcacctatagaaatcctatttcagtgatttaatcaaaatgtccaggaagctattataggcatgcttcaaggctttctctcaaaagtgaaaaacaactttatcaatagaatcacccatttggtcaacaaatcagagcaatgactacaatcacatctttatcaatatgaaggattactaaagtaccacatttatttataattattcatgacattaagatgtaaaaaaaagagcagaaatatatgataccagcccttaaggttctttaccttgataaagatgcagtttcccaggattagacaatcttcagcaatttgaagggctttaaagatgaaaatctttgcaacaaatactttgcacaaaattttagtgaagtaaagaacttgaaaataagatatacatgtgcatatcatttctggaacatcttcaggcctctctctcaaaaaaaaaaaaaaatggaaaaagaaacagttcaaagtacacccagaaacctttaaatcaattttgggtggttgtcagcaccccatgtgatggagcattcttctttcactgctatatttccattccacaagaagaaaatgaaacaaaaagtaacaacataaggaagaaaagataataaatttcttcacaactttttcgtatcaaaatagacatgctactccatgcgcagtttgatcaaatcatctaactaaacgacaaaaaatttgaaaaggaaaatccatacaacttggtggaagtaaaactgtcatgtaaacaagctttctttttatttttcctttctcctcttctcttttgactgagttgagttatgggcattaactaaatgcatacaaaaactcaaacaatgaaacagcataagatgtaattcagctgaagggttgtgtgatacttcagtaacaaaaaagttacaggctgaaaagctaatacaaacaaaaatctgcacatgagaggtgttaagcaataagttgcaatataagacattctcacgtctctatgttaaggtttaatatactacatcactggataacaaattacaagatacgtaaagaaaaaaaggtttcctagagggggaaaaagcggcagctgtaaccgccattagccacctatcggataaaaaaaacaagacaaaaaaacttataaacgacactatagaaggaagttatctataatatggcgaaccacgtcaacaccatcggaattcaaccaatacctcttcacctgtaacatgaaagagaatatgtataagcacaattaatagttcaaacaaatatatcacttatcaatgtgtcttcagttcttacttttcaagacttttaggtcattttgacaagtttcattcagtaaagaaatacacaagaagcaagcatgttactataactaatctttacaaattgaaatcattagatgtaaaagagataaaagaaagtccaaatagcaaagcaaattaaaacatgcataatattaagagtatacagaactagcctggattgtattgtgagcaatgaatctttgtctgctcttttggaagctaacatctacgcgctcccaagatacttgagtgagacctctgatcatctcctctacatatacattagacaagtgctcattacataccaaaataaaccgattgacgaacaaagaacattaaagtaacacaaaattcaaaagtagaaaattatatagtgatataggtttatataagtaaaaaaaattgtatttgcagccaaaaataccatttgtagggtgtatgactaattgtattcaggatagttttgagtgtagaataaaatagtataaataggtgtgcaagggaataaagtgagtatgcaaggattggagtgaagcactctctgcatcatggagaggacctaagcctcttgaattgcctagggacattgtctctaattctctggttctaatatcaacatatacacaagtttcctctatttttctctattgttcttgttttagctactgttattgtacaacggaaaatcaggtcttatcagtgtactagccatacttgagcaaatcataatggcaagaagatgcacaaaaatcaaacaactactacagtaattatgcagcaagagaatagcagaagaatccccaaaccttcccaaccagcatctcttctgaaggcactccattatgctcatagtgagagctctctcgctcaatacgtacaatatgtggatatgttatatcagacacaacaagttgatctgactggaaataagtgtggaaagaataagtttagctttggaattatatgcatgtggaacattacatccatcaactgtaaaaggaattacctttggaagttcactttgacgccttatggatgatgttctccaaccaaccatgtctttagatgagtgaagaaaaacatagagttataaatgcaaggacagaccaaatcacactagtgcataaaacagtcaatcacaagttgaaaacagaatcaatgaaccaggatacgatcataatttgcatttgcatatgccacacgacgtttgaatacacgtaatgctgatctgaaacaaacaataatataacacaaaattacataacagacccaaatgttacagaaattgacaaagtgaaaaactcatactgccactaacatgaactttaggtcatcgcagtcattaaccattcttagtagaaggggctttttatcatcattatccgtaaggaagagatgcttccctgacctcccaacaatcaagtgtgcagtttgtggagcacttttctcaagaaaagaaagaccacaaagaaagggtagctgtaagaaagaaaaaaaaacactactgagttccaaaatcagttgtttttatatgcttgcaaaatggtcaaagatcattgatgaaaaaggcttaccccaacaatcataataatagaataaaactacctctttgtgttcatgtcaatgcactcacactcatgtcacaacattcactaaaagacacatacacagtgcagtgcagcacaaattcattacacatgtcaatgtgactgcccaccttttactctttttatccgaccacgtcttttttcttttattttaagagaattgtttaatttagaaaaaggaaaattacagaagattataagatatcacctacagctagagaaaatgaaaagggattaagataaattaaatccaaagattccaatctcatggtagatcagaaaggaataaagcttaaaatacttacagcttataatccacgaaactaccccaaaatttagtatttcattcaaccacgttaatgtaaatgcatacatgaaattcatcagcacaagcatcgtaacacatttgcacatttaaatgtgctcgcattcactaatgcaagtaaaactaaagggagacatttagtaatctacctgtttgtgtcctattgaaccaagatgtggagttgcaacggttacaaagttcatgggctccaacccagcaattttaccttggcattggccaaggctaggcattaaagtgtttgtgttttcttcatttaagtgatttccatttatacatgaaggctctgattttggaacagatttatacagacttccgatagcataccttgctacaaggccccctaaagaatgagctacaaaggaaattttccgcatcctagggttttcagaaacaacagacaacacctgcacttacaatagaaactttttcatattgttaaaaaaaattaggggggcatatgatattgattgacaatcatcgaaacaaagttattcaagatatcgagattcatatattagagatttcaaggtcattaatgcctatatactaccaaaatacctcttcagcaagcctctcacccatagtgtcaacaccatcaaatgttaattttgcatagttacatgcactgcctgtaaacatacaattatggtaataaggaacctttcgcaattttggtaagaaataagcatgtcaataacaattaaaggttttgccatttaggtaaggaaagtggaaagatcaatatattacttccacattttcttggacgagggtgggaacatgagagatcacagcacccaaccccacttgaattagtctcaagtgacaagaacacaacagaatgagatttgaaaatcacaaattatagagcatgcggacatgaaagacaatttttgagataggaggtcatttagattgaaaaataaataaagaaagggaaaacaatacataatgatggagttttgaacaatgttatatgaaactagagtggtgtggttcacaatttttctttaagaacagtatcaaaaggagtatcatttataaatgtgagataaacatattatataatatatatagattataaatttatacatttttaacttcacctaatcctacaatatttctcaaatctcaatcttataagtgcaaaccatagtacttgccatctaagatacgcctcttgagtcaatgtgagataaatattgtgcataagttaatgatgagaagtattgtagcatatagcatacttgtttagtgtaactaatgtaaaagtgtagtggtaaaaaaaaagggcatgcgatactcaaggatttcagatggcacaaaatgaggtttataaggataaaatttcatcgtggaagttagataagcaactaattctaaagttcaaatataaagggagaaaaacatatgttatccacaaaataaagcaaattacttctttatccctaaaccttgtgtgccgcttacttctagggcatattaatttcaaacaataccttccattgaaagggttggataactatcgaacttcaaagaagaaattagtgtcttgtcatgggtatttcttaaagatgaaagcatgatatgataacgaagtcttcaataatatatttcttttgttaaagtgaaagctaaaaggctgatgtgtaatgagataagactactggctatcaaaagaaaatgaaaatgggagaatgcagtttaatttttcttgtattcttatagaagtgaagtgacaaatggattttccttccacggttccacctttgttctttattttctttctcttctcttgataagattattttgtttcttatttccccaaagaactaagttgaaatagactccttggaaaatacactgagaaaaagagaatcaccaaatgcataaataattgatcagccacaaaagagaagaagcactaacagtgtacaaatactttatcaggaagcctctcgacaaattggcctgcagcatatctccaatctgcatcactgaaaacatggatcgctccttaactactttgcaacatgataaaatgtactaaagaggtaaaatcactgtttgctaaaaagataattactttaaagtgattggaagcatgataaaaaccacatggaaaagatgcaaaggtgttaatacttatgtgccttgagaacagagaagaaacctcttcttacactaaccaagtacacccttttaagtagtgatggctatgtcaataggcctcgtcctcatcccccaccccaccaccccatttcattcccccgatggacagggcaggggtctgttgcagtgtggaatccaaacaggcccatttagttaaaattgatattttagataaaaaaaaaattgagatacaatcataatccaaaattataaaagaaaaatcccgttcatgggttcataaatatgtaaatagtattgatattaataatatatatttttatattagacattaaacctcgtttaatattttcagagacagcaaatgatccgtcctgccccatttcctcaaaggttaaattgacatcactacttgaaagagataatagatagtaattttgttaaagttaaggcgtttgcccaacaattcaacccaaacgccttactacatagtacataagcgttccaattggaaagtaacagttttctttcaatattttcccctgaatttcaaaggtcacattgactaatccaagaaaatttatttaaaatcaacaacaaagaataccataatttggttcctaactgtgcaattaaattttgtgtcatcaaattacagtcataccttccattaattccattgaccataataacaagatgctcaggttcagccctatcattataaacatcctcaccaccgccgacgctgctactagcttcggctctcaagtcatcttcgattcgattgtacgacgagccaccacgccttccgtagatgaaatccggcggccatgaccaattaccggggaacatgaggttccccgatcgcctcagcgagctcaaggcgaagcaacagtcaaagcggcgatagcgatggtggtggtggttgttgcggtggtgatgtaaccgggtcgggttggggttgcaatcgggtcggtgaactgagaatttgagtggcggcggaggaggattgacggcgatcatgtgcgagaacgtaatctaaccgtttttcaaattgagctgaatcaatcagtggcacagcgagtttttatgttttaatggaaaataataattattattatttatttttccttttattttattttaaggctatttacataatatttatggtaaaaataaagttagattccatattacctaaaaaaagaaaaagttaagttacataaatatggtaaaaaaaaatttaagattcatttaaatttttgccatatgaatttgatatctactaaattatgcttttaaaatttttttagtcgttaaaaattcccttcaaactattgagattgttagatttaaattttttagtccttaaatctaacaatattaatagttcggggggaatttttaacgatctaaaaaatttgggaaatataatttaatacatgtcaaagttcagggggtaaaaatcctaattagccaaaacttaataggttacataaattagattatgcatgactggatcgatatgtaataaacacatctttcatcaaacttgtcatttactatcaaaagaatttatcatatcacaatgataatcaatagtaaatcagcctgaatcctaagtatacatgaactcttgtttgtgctcattgcgtttttttgattcactcattaaagttattctcaaagaatatgattcttacaacttctgttttgagagcttaataacatgagtggctaggaacatgttatactatagtgga

SEQ ID NO: 378113 - DNA, 2244 bp, Cannabis indica
gtacgttttaggtttttttttttttttttttttgtgaaagatgataagtgcttaagtttagttatatgtttatagataattagatgagtgtaaaaaaaaaaaaaataaaaaaaaaaaaaaaaaaattggccgagttgtctaagtcaacccgatcaatttgctcaacccaaacctgctaacctgtgaatccaaaacccgccaacccgcgcacaggccaggtacaattttttcaatccgaaccactgtcaacccacccaatgtttagtcctaattttgtgtattgtattttacattttactgagaaaaagtcgaattttcttcacagttaatgtggtatactacaaatgcatatgcaggtccacctacgtaataagacaaatgaattggaaaagtagagaggtagatacagagaattacaaatttgaatttcaaatactgtacacgcaagagtacgaagaggttcacattggcgacctgtttctgatattatgttacatgtcacgctctatagaaattgtattcctttcacaacaattggaaatgataagaccttttctcacattccgtgtgttcattctaagcaaatggaaatataagactacagcgctcagctgggctttcctgatattgtctatgattatattcccaaaagtttaccagagttcatcgccatatcatgccaaataacctcaccagcggttacttttaaaactaaaatgagttggcttcatcatcttcccgaccaaaaaagaaaaaggaaattagcaggcaaatttactaataaaaaacttctccagagtgtaatcatattaaattgatagcagttagtttagttattctgtttcaaaacttctgcctctgccatggccatgggatcatccctgctctctgtttcttctatttccccttctcgctcttgagccaatttctttctgtgcaaatcttctgcctcctgcatcgcagcccggttttctgcctgaatacgtagcatttcctcttcttgttgttgacgctcaaaccaagtgtccgcatccgcccaaactgttaaaagaaaacagaaggcacgttattcatgtaagacaagaaatcaaaacgtaagagcgagtgtggtaaaggcaaccatacattctaagttattgacatgcaagaaagtcataactggtaaatgaactagaaggcccaatctaccccatttaaaaagttaactgtcttcagctatgcattgatctgatttttccttcctatattctcagttatgcattatgcaacgatgcttaaaatatatgaagtaaatatgcaatgaattagaagactcaaattgccaatttcttttctttggggcagaaaatgtaacactttctagctaccaaaagctagttgattgaactgctgattcagtaatgccataggttctttctatattcctagcaaagcaaatcatacattgttgttaaaaacaatgctagagacccaaaagaccttttttttgttcgagctataataaacaatctttcttcgcctatcagtatcaagggctactgcattgatctaatgtttaggtaagctacttcgtataataacgcagaaaactaccaacccatacggctatacgactacactatcaaacaagtaatctcgtggaactagggagaaatagaactagaaaaggaacaatcttggatgtaaagtgcacactcaatctaaaaccctaaaccccaaattcttgaatgaggaattcaacaaattacgcatacgcagtacaaaccaaaccacaaatttaatcaccgaaaaaattccatcaccaaaaaattagcaaactcaaccaatccaaagtacttaacctaaaaattgagtcaagcaaaaagggttttagaataaaaggggaaagatagtggtttcttactaggctgagcggcccaaccctgttcaccacccttgatgcgctcagggagggcataattgacggtgaggactcggccatagagctcagcaccatccatattatccatggcggcggcggcgtcctctcgctcgaggaaggtgacgaagccaaaagaacgatgtttttgggtggcttggtcgagaggggtctttacgtctttaatgtcaccgaagggtatgaaagcggcgtggagtatggactcgttgacctcctccgccagtcctcctacgtacagtgtgttcttctgcactgcttgctgcgccattgaaaatctcttcgcgacttctctctctctctctctc

SEQ ID NO: 378114 - DNA, 5505 bp, Cannabis indica
agtactcggcctatggatatgttatagcactacagtattgggcttacaagtccatcctagagcttgttgaaaaatttatgattataaaattgcaccgctttcccagaatagtgaactgagagagtaaagaggtggcactcggtaaggatgaagtcattaaattattgcgaaaaaatataaattttttaattcattgtatttggtcacgtttaattatttatttcattttaatctaagtctaataatctttttattcttatttgcagttgaaaatttactccgttttatgtccacgacctaatgaggcggagtttttaagcaacgtcactggaggtgaggcaccactatttgtggatatggaagaattggttgttggtagtgatggacaatctactcaggccagtttgcatagccatgcctcgaagcttgcacaaacaatagaaaatcgagcgaaggaagctagaatcttcaaagagattacaccaccacaatctccaccatcagaggcccattctgttccaccgtctacatctatgccccattctgcatctatgccgcagtcagaatttattcccagaagttcacagcctcgggaactagtatcttttgccatattagcaagattagagagtgttgagagggaatagcttgctttaaagcaaatccaggctgatatttgaaaagggcagacaaagattatgggttacttgaagaccctattggcactcatgggagatccaagaaggcctaatgcaaaggcagagacatagccagaaccccgtctctacgagagatgagtttattcttcccaatgattacagacctgatgatgtggaagatgtactccatacacctcagaacatgtcaatcacgtccatcagagatacgcaagattttgaggtacaggttttagagactgttccaacaccggtggagaagagacggaagaagaggctgaggtggtttgacaagtacactaaaatgaagaagaagatgacgccatcgatagcacatgtgaatgttgacccacttcggcccgttaatcagaaactactacatagtttccgaaattggtcagtgggaaccattggaaacaagtatttgtgggatgtcttctctggtgtacatggcgtggcttggttctgaaagctacttactacaagagaatggctttctaacgatgtaagtttcttaactaagtattatttaatgttatctactattgttatttgttttattttctttaactaagttcagttcttgatcatactctacagcagaaaggatcaaggttagagaactgaacgaaatgagtcatatcattctgctgcaaccaatgtgaggctttcttaacctttatgtgtttattattgttatcccaattgttttccacgtgacgtggcatgtccacataggcaagattgatgccacgtggagtacaacctgtcagaaagaggactaagtcaacatgcaaaatgtaccagttgatgaagagtctgaatactcaagcaggacatagagacaacaaaatggccaaccaggggggttttgtcgaacctccattagttggccatagtgaagcaagggccggctagcccccaacaaagtataagacgaccaacttctcttcgggcaaacacatttggtgtctctgcaactttcaacttagacaaaactctcagatacgaattcacttcaactttagatatttacccattctttaggaataattaataggttatttttctatatatttaatatgtaacaaataggtgatatctcctcattttaagggatatcaacctactttggcttagatcttctgtaagctcgctcctatataaagagcactaggctaaacctaagtgctaggttttcattcctaagctctttagatcaagctctcgaaatcctagctctctctcctacacgccacttgtaatgtagtagagactaagtctctctcatctcacttacttgagatctgccttacattctcactattgtaattcaaagagagccactttagaactcacaacacttgttatctgagtggtattatctctcatatcaatacaactaaaagtggagtaggtcgttacctggtaaccaagggggtgaacctttataaaattgttgtgtccatttatttacttattctaattgcttacacgtgatgattttgatcgtaaataaaacttcgtgtgagttgaccaaatatgtggtcaatattttggtactttcattaagaacgttgtctatcaatctgatcaatcaccatggctgtaataaggagaactacagctacaactttggctatccccaaggatgaccagcgacgagattcaagattctgtgtgccacaagatattggtagaggtagaagggaagaaaggtatcgcaaggaagatgacgatgaacgctgcaatcctagaagtcgcattgattaaagaacccctgaggagtatgattctgagtcatttagatttgatagtcgcactcctagtgtatataccagatcaggatcaattttcacgcgtcttggaggcaaataccatgtccaaaagaggagatctatgagactgaccaaacaaggcttttcttgcccgtcgacatgtgttgttttcgcagttttctacctcgagtattcgtccaagaaagcctcgttaagtcggtctcgtagatctcctctttggacgtggtatctacctccaagacgcgttaaaatcgatctcgatcttgtatacacactaggagtgtgactatcagatctaaatggctcaaaatcatactcctcaggggttctatgatcaatgtgacttctaggattgcggcgttcatcaccatcttcgtcacgatacatttcttcccttctacctctgccgatatctcatggtgcacagaatcttaaatctcgtcgatgttcatcctcagggacaacgagtccctttccacgtgggggtcttaaggtggttgattcaaattgggagcatctggattatattcattgatcactcccttgcataatatctgcgaacatgttcaccacgacgtctgctaatatgattatgtacctcattattagtgctttgtaagttggcaggttcacgcggtaggagaatgttctcggtacgcggaaattcctgcaacctcagcttgtaaggctcacatctactcttgtatggttgtcaattgcaccataccctcgatggtgtgagcaatgtaattggtgggaaataaccagtactcaccataggagtcatcatatctcctgcggctctagcaaattttgagaacagattcagggtgacagtgctagttcgtccaatttctccaaaaatgtgtcaacaacgaggttcacacttgaagttccaccattgttgggcggagcagtggtctcgttgacgttgacattattgttgttattttagttcgtagctattgtgatatttctctagaatcacagtatataatactagatcccctccttttagcgtcaaatgttggaagaaaataaacaacactaaaaattgcgagtattcgagataaacaagaatacttcacttatagtattcacctagaatgacgataactcaaagtaaaatatcgaataataaagcaacaacatcgtatatgtaaagggagagatagtaaattatagtggtttagtcaaaacttggtctgcttagtctactttatcaattgtgtttgtaagcttttatttcgagttggatcactcatttatatagaaagcaagtgatcatttgggttacataaccgaccagacaggaccgtcacaatattaattacacttaattaagatataaaatatttacagaataaatgagagaataatttcgatcgttcttagttaatactcgaatgtatgcgacgttgagagtcgcatactgaatgttcactttcttgagtaacatgtgaacttgtgggttctttggtattactcgcatataaagtctcgagactaaaatctcgaggtcatttatgagatagaacgtctgcgactatactgatcatatattggacattcatgtactgacaacattgaactttacgggttcaagatgagttgtggcgcactttagtcattcggacctagcacttgtagagatgcgatctttacgtgggacgcaggggagaatcacttggtcctcgcatataagttaactcatacatgtgcgaattatggaaacttctcttgatcctacttttactttactatggtgatgcgtagtgtgtgaccatgcctaaatcacactttctcgcgagttcttatcatgggagaatagctttactggagtcattattgacacatcatcctttttcaattaggaagtaggtccacgtgtcaaatatatacgaggttgtactcatatttttatgcaaaagattcatactataagtcttgataaacaagttcaatacattgaatacacatatcatataaattaatcactcttgtgcttaatcttttaggaaaatggtatgtgatattttagatttagagttttgtttttacgtgatttcatgtgtgtatattaagaattaaattaatatatctttttaaaacaagataaatatatataaatataattggatataagttgtccattaaaacagatcaatgtctcatccaacaactgatccgatccaattagatttttaaactttacatccaatccaatccaattaaattttcagactttacatccgatctaatctaattataattgtatatctaattctattagatcgattgtaattgaatcagtgagttgtaattgaatcagataacccctaagcataacctagtgtttcacacctcctcaaaaagacaagtcccaatttcaaatcccccttccccaaatgtcattaaaaaaaatctctttcatatcaagtatactaatttaataattgataccaaggagggagcgtttttcttttcttttctttttttttcttacaattgtatgtacactaagttggcacatgagaacaaaaagaaagctcatgtccttggttggatgtaggaaaatttagttaccaaacagttaacagcaacagccacaagaaatcttcactaaaaagaagaaattaatgtacaaatacacaatgacctaaagctacatctcacagcttcgccacaaaaggaagcagacaaactgaattaacatacatatataatatatatatatatatttatatatatagcaaaacaaatcacatagctctggctttagagcagcatgatgctctttgattcaccagagtaatggaggaaccaatgaaaataaattacatggaaccatcttccacaaccaagtgagcccttccactaccactcaactcctcccctcttctacaagtacaccccaacaaaatattcccccggtgacatggagaatatctctcgcattatggaatttaattatacaaatgcaacaagactttttgtatatatatctatatatatgtaattttttttta

SEQ ID NO: 378115 - DNA, 4316 bp, Cannabis indica
ggattgaactgcaatctttgaatccaagagaatatgcacttcttgccatccaaactcaactgcccagttcagagcaaggaaaattgccctgagttcagcttcaagagttgattgtgcttgaattttatgagccttgacaaaccagctatcaatggaggaatctattgcaattgctgcaataccagcatctccttgcacccatgaagcgtctataaagaaaacatgcatggaaaacctacgtgtcacggggttccaaaggcactgcatttcctaggctcactgcgtgtcactggaattgattatatcaatcgacactgcagttaaactctataaatataattctataattactaagagtccaattctatatttagagtaaagtaatcatggaattaatattcaaagattatttagttgatgagactcaacaaatattctagtttataggagcttgaaattataggtctatgatcctcgaattgctaccttgaaacaatgtcaagggtagggataaagagtggtataaagatgtttggaaaaatctattttgaattagcaaatagtaattatttatttttgtaataaataaataattttttcaaattaattaaatagggaaaagataaaagttgttaacataattgttaagataaaagttgttaaaagacaccatctttatcctaaaagacaagggtaggcgcctagctatgtcatgtccttataaagtttatctttttgggttaattaattatttaattaatttaattgggtaaatatctaatttaaaaagtgattatagatatatcaaggttgttgagatattctctcaaatagttaagagattttctcataaatatcagtaactgaattcagttatagatatttatttatttaaacaattaaatatgatttaattaaatgaatttaactactattaaatataattaatttgaaaaatcaatacacacacttctcacttcctgagcactattattttcaaaataaggggagaaaaaagaattgaattttttctcaattattcttactcatgtgttgagaattcaacaagaacaaagtttataaacttattctaatagcccacactattccttgtgttggtggaacgatttggaagacacgggtgtgagtctaattgcatcattctcatcatctaaattaaaggatagaacatacgtgaagttttgaggataccctgatagacttcaagaggtatactctaaacttattatttttattgttttgatttaaacacatctggagatttattgggatatggtacaatgataatcagataatatgaaacccttccactacgtacctgatttagtaccataaaattatcagtacttatttaccctttccttctaaatgagagtttacagataatacatagatttgagtttatttggtgaggcccaactcatggggctatgcatgtacactgacgtggaggtttgatcatagtaatagttgttcatattgtatcctatgattgtgggtaagcaatgtgatgttaattacatgatcttcaatttatacatcttccctttgtaggcaggataattttatatgtccaagattgtaggaagtattccttattctaagatttgaggaagtattccttattctgttcgaaacagtaaatgggaaactgagactcgcttctagatacacgatgagaacttcttccaaatacatggagttgacactctttcgtatcctgactaggcttgacagaacctcgtctggaaagacggcgattgttctctcgagagaccagataacaatcaggcttggcctagcttatgttgtttgggcccactgatgggctttaagtctttatttagagtccacgcatttgtagccagaaacacagataacaaaaataataattgtctttacatgcttttaggacacactcttaacataatgtatgttgggttaagaagataatggattgtgtcacatctattagcttctcatttctgattaatggagaagttcaagatttttccacaatgggggtcgcgacagggagacctttgtctccattcttattttcgttttgtgcagaggccttttctagcttgatccaacgggtggagggagatggtaggcttggattttgggaatagagatttgcatgtttcataattattttttgcgaatcatagccattttttctttgaggctactcaataggagtgtagatgtttaaaggagacattggagaagtatatggctgcctctggtcagttggttaatttttataagtccaaggtgtgttttggcaagaaggttgctatgaatgttggaagatggtggcctttttgatggttgttaaggtagtagagaactatgggaggtatttgggactttcctcttttgtggggcataccaaaaaaaagaattgtttgatgtgattaaaaatagagtgtggcaaaaggtgaaaagttggaaaacgtcgacgttttagtggctaggaaaggtgttaataacaactattcttcaagctattctagcttaccatatgagttgctttcgactgccaaaaaacactattaatggtcttcattgtatgaaagcaaggtgtaggtgatcttacatgtgtaagtaaaaaggagaaaggtggtttaggattctgggatcttggaatacataaccaagctatatgttggctaaacaaatctgatgttgcattcaatttctaaattcactctgtagtagggttttaaaggaaggttataattatctacatggtgaggttttacaagcaaaatgtggttctaaggcatctcttgtatggtgtattggggtggggaaaaaagattattcaacaagaatatagataaagggtgggtactagaaactttagtgagaattgtggaggatccctggctgcccaagccttacgtacctctctatttaataattataaggataaaatagtaatttcataatttaataattatctatccttcaatcactccatccttcctaccaaacaatataaaaggattattactctcctctccctcccttatattctccatccttcatcaactctccatccatccaaatctccctccttcataccaaacataggtgattaccctctctatttacgataaatcctatattccaaattagatgtatgtcattgatttgaagaagtttgatggaacttaggatgatgattttgtatgggtagtactcagttgggagtgggtattgtatggctgctgaaatgcaagaagaggtgaagtaatccactacacatgagatggaatgttggtggaaagatctttgaaagcttagagttccgtcaaatttttatttggaaaatttgtcattcatggattccaactaatgctgccttagctaaatggggtgttccaactagctcagattgtacaagatgctgcagtggtttggcggaggatgttaaccatgctttgtggggatgtagaacaaatcatgaaatatgataacgatgtggtttgtgggaggacatgaagtagtatatggttgaggatgttctctcctttctccatcaagtattaaaggtatggacaacttatatgtttatattctttataatggtatcatggaatatatggatagtgcaaaatagtttgaatcatgggggttaccataaaaaaaattgttgatttaatggagtggtggagtaagtttattaacgagtttcatgaaaattccaacaggagaggacaccaaagtcagcaggcaacaactcagtggaagctaccatcagcaggtagttttccaatcaatgttgatgccagtatacgaaaaagaaaatcagcgatatatatagttacggttaagtgacatgcatgccaaagttgaatttcctactacagcattgagattcaatctccatattagttgctgagctaattgctataggggggattgaaggttggattgcaaagacatctaccttgctttcgggtggaaacagactacttgaaggttgtacaattggtgaagaacatagaggaattggatgtgctgctgcaaaatggtggtgttgctggtttgtatttcatttatagggaagcaaattaagtgacatattttagctaattatgtttttttaaacaatgggggcgtttggtaacacttttgtttttaattttaaaaataaaaaacaaaagtaaaatttgtgtttttaaaattttgtttttaaaaagtaaaaatgtgttctataaccacttttgttttacaattttaaaaacagaaaacaaaagtgtgttctataactttcaatt

SEQ ID NO: 378116 - DNA, 3041 bp, Cannabis indica
gtccaaaatagtatttatcatttatttgtcaactattacacatttaatttgataaacaatgttactaatcattaaataaaaaaaaaaaaagaataaaggctatatatgaataaatttctaagagtattattattaagtatcactgatgtccaacaccatcaaggcaattacttgcatgcgaacaaatgatattttataataattattacataaaaatatatagaacttgatacttataaagcgttatattattatgaggtatcaaggtgcctagtactattataagatgatgtcatataattattagcggttttttataattttattaaagtaaaatgaaggagacttgatattagattatacctataacgatattacacttcacaataccataggtgctctttagcatagaggtgtgcataaatcaatctaatccaatgataatcgaccgatctaattacaactgaccaccaaacattagatatctatttgtgatcaaatcagattgaatgttatttggaatgttcaattggatcggattggatgtcgggtgtgtgtttaaaaatctaatacattcaacatctaatcgaactaattaatattttcatttgttttgatgggtaattagattttatattataatatgtaaaaaaatatatatgtatatatgaaaattaacattaaattttgaatttttttattggattagattatctaatctaataaatactggatctaaaatattagatggatgcgatctaatctaaaaatactaaatttaaaatattggataacccaaagtaaacccataagtatacaaaaatacatctaatggataaaaccgatctaatccaatatctaatggatgttgaatcaattagatgactgaaatttattgaatcggatcggatgataaaatttaacatccaataaataaataaattggataaagatattcttagaaatatcaaatatggtccaataaatactcttacttgtcttatacttatataatactagtaatagtaaaataatagtttatgatggtatttaacacgtgcctttattagagttgttggtagtagaggagaacattttgttgcaatatataacaaaaatactaacacttagaatgtctagttctttcgtgagattgagatgtgatatgaggtgtaatttaattagtgtctcgtagcaatacttattatataaaaaaatattattattattattaggcatcagtagtatttaacaagtttctatatatatcactttgtgattggttaaatactctctaaaaattattatattaaaatatataaaccttaatacttaattaaactaataacatatttacatgtaagtgctagacacttcttgttcttgttaggttttttaaggagacttagttagaaagtgggagaaaattagagtgtaggcattaatatgaatctccgccggctacacaatactctctttaattctcttgggtccctcggtcttcagtcttgacccacacacacatcagcatgagtattttgaattgacttccataattaaattacacgtgcctttcttcaattggccactaatcaaatattccagaaactcatataccattcaatctacgttgatgatctggggaggtcaaaacggcaacaaactttgaataaaacgaccatcacagaccttgccattttatctgttttcatcattttcaactcaatttataaagccatctattttgctacctatactaatatatttggaaaatcattttatttcattaataaaaatttacgaaaatttaattagtctcattattcaatattacaagaaataatttttaaaaaaaaaaacaataatttttgctataacaaaaattaaaattggtataagcttctcaataagtttttcattttgttttttttaagaaaggaatgtctaattaatctacaaaatcttcaatcattcaaaaatggcatggatcataaacggacctcgatccaaaaatcatggcaaagcaacgaaatcatcacatcattgaagaaagtaatgacccgctataagagaccttattaacaaaataaaacaacatctagaaaataatatagattaaacaaccccacataattaaaacaagactacactgtattcatatttttggtaaatggattttattgtgggataaatttatatttatttgtttatatatttcaacaattagtgtttattttttttacgagtggtaagattaaacatgaaaaattatttaatgatgaagaataattagatattaatctatttaaatttgttatctttcttcaaaagttacattaagatccatacaagtaattaattattctatcgataataattgattgttaaaaatacttaaggagaaaaaaaaattattaaatattatgaatcataattatctattttttcgatactaaattaatgtatttaattataatatttaagtaatagattgtttttacttgtgtatgatttttattttattaatttgtataagaatgctagaatacatgattattaggattgttaatccttctactcatggctgcaagaacgtcaaagacaagaatgaaagatggaaaggaggaggaaggtgagagaaagagcaaaaaaattgtaaaagagatcattgtattattattgtgtatttcatcaatgtacagagtacaatgtagctttattactaactaaaaacagagtagttgagctaaaacaaataacagtaagtgagatacacactaacaacttgcaacaaacttttaactaactcaactgaactctaacaaggaggccctaatactttgtgacagtcagtagtcacgtgatccgtaagaggaaataccgggtaagctgtacaatcccacacctcctgggaaaggtcaggtggatgattctgagactgtgtaggtatgggactacacagctgaagagggcttaaatggattgattggtactacctatatcagcaaggcgcattcttgtttttcggtagcccatcacga

SEQ ID NO: 378117 - DNA, 1717 bp, Cannabis indica
ggggtggtacgttcattagtttccgacgtaggcttcactccaatgtcaccacctatttttttaatttcatacaagtccaaattaccaaagtgcttaaggtcgtagagtagctcttcttgggctctaaaaaaatgagataaagccctttcctcttcaccttgaggctcggcctcactagcatcattcacgtggaccaaattcttccccaccatatcacaatcaaatccacacggcccaccaaaaacctcccccttctctttgccctttggatcaaaagccactttcggcctcactaaagatttggacccattagcccaatttttatctattaaattatcacaaccaggcccaccactcacaaacatcccaccttttaacccaacaggctcattacacaaagagcttacacaacccggccccaccaaattttctagcctagccttaacaacattcggcccacccccttttaaattattagaaaagcccataaccaaacccggcccactacccacaaatcccacatctccaccatttccctcccactccttcgtcccagccccaccaacagaacccaacaaacccccaagcccaccagaagagaccaagcccaagcccaaactcggcccaacacccacttctaagttcccacttcccaaacccaacgaaaccacctggttttccttctctctctccagctgcacattccccactttaggaattaaatcagagatcttttccttatttttcaaatttccttcaacctcattaccattaacagcaaaccttcttgcaccctcgcctggcactttcttgggcatccacaccttttgccttccatgatctttctcatgcatggcccgagacacaacagctttcgtacgcttcgagccgcgcgccacagttgacgacgacctaaccacaccgccgtccacatcagctacggcaatcggcccaccaagctggaacttcccagacggccttccagtcgaagaacccaccagcggcttcgaagtcgcaccagaaaaaacgtcacgatatagtgaagtcgtggacatccacggcccatacataggaaacggggttccatctagatttgccaccgtgaccggagaagttagagagcaccctttacgttggtgaccgacacttccacagaagtaacaaaaaatgcctatcttttcatatttgaattggatccaacgtttaaccccagaggctaagtcaaaaaaacaacctgaacatagaggctttccaatgtttatgtcaatctgcacccttatgaacaacttccaactcataggattctcctcatccaactccactctaacaactttcccaatcatatttcctaacagggtaccatttgctattgaaaaatactcatgaggcaagttgtgaacctgcacccacagccgcataatatcaatggtaaccgaaccatgaacatcaggggcccaagctcgtagtacaaaggtataacctttaaacgaccaggggctgttctccaaagcccactccctatcctctgcactctcttgaatttttaaagttgttaaaaatcttaggctaattaacaactttcttcccgaactttgacatataccaaatcatgctccctgaactttttttgtcattaaaaattccgcttaaattattgagatttttttttttgagtaaaataactattgagattgtttgatttaaggacttttgtcta

SEQ ID NO: 378118 - DNA, 3143 bp, Cannabis indica
gcagaattttctatttctcaacaataacaacaatatacttgaggccccacaggatagtgatatataagtatatatattacctgaatatatattaattattatttaatatatggtaggattactcatttttcttattttatgtctcccacagttttgtctcttatatatggtatttatatagcctaaaaaaaataatcaaaggcataacctagctaatagtaattgatcaacaccatttctattatctttcctgagttaaatataattaatactataaaataaatatatatattttttttcctctcccatctattatcattttaaaaataatgtctcttctaaattttttatgcaaatgaaatatgttgggtttcattttttcatatttttcggctatcacgcaattaatattgtttggagtttaattcctcacaattttatttgtagaaacacctttcgaaaaaacatcgatctactaatactagagtatgtagaatatttatattcaaagtaactcttaattatttttgttatgtggaatttgaattgatacctaataataaataaagaaacattggttaatttaaaatgtttttttttcttccagaattaagatatagttttttttaattaatttattaaaacaaatactaattatgcatattccaaactttactaagtttaatttgtttttaataataaaagaatatttttttaagtgtcaaattttctcataaaaccaagtataaacttaatagaatttgaaaaagtcacattataaataacaaatgtaaacacattgaaaaaagaaactgaggcaaaaaaaaaaaaaaaaaaactatatgcagtaatcccaataaataaacaaaaattttagttcaccaattcatcccaacatttaaagaaattaaggttagctcttctacaaagtacaaacaattcattattatattcttttcattttcttcaacctcatttttttcttattttcaatgaaataaaaaatacttaaagataccaaagttattaggtaaaaaaaatataagaaaaatgatgtataattttatatttaatgtaaaattttgataatatattttgaaaaataaagtaataagatttataatagtaacaacaaaattaaatgaaggggaatgtgcatgcatgcaagaagcataaagtagaacagccatcttcctagctagatctatcgcgtcgcacacctatgccaaaatcatttgaattagctttagggagttctggccggccagaacccaaatacctttatcgtttattcatttgttagattcatttggattctagaatcattcttgaaatatcaacaaaatttgtccgctttcattatgtatgtggaccaattggaaatacttcttaataaagggagacatcgaaacttatttgcgtctcttctactgggagacacaaattctggagaagtaaaaagttctctaatttaggcgtctcccacatgaagctttaagaatgcgaccttaaaaacacatatgaggttaatatggaaggacttttcttgaagacaatatacagaagaggggcttttcaataatttttataaagtatgtaaatatattattattattataggaaaatagaaaatcgagaaattaaacaattattactcaaagaataaaatcaataagataagcaaaccatgccgtttacaaaaataggaatgaaaatcctaataacactttcacctaaaataccaataagctgctagcgttgaaacatcaaagaagcacgaacaatgctaaatctccatccaaatgaacacgtgacaaatcacacctattaatgactatttgtcaaaaatcttccaataaaaattaagtaataacattcaatttagaaaaaaaataaccaaacaactatatatagcgacaacaatcgtaataaacaatcgcaccataaaccatggggtcaataaaattctaagaattcctcagatctgaacatggacaagaatagtcatgatactaacacaaacatgctttgagccgattgagattctcccaatatcccaaaaagaaacaagactaaaatttcctgtcatgaatatagtccaactaccataacaatagcaagatggtgtgtagcaacactattattgaaaataaaagtaaacataaaaataaaatatagcaaataaaaataacacactgagaggaataacaccagtgaagattcaatttagagccaataagcaactcaaatccctaagacacacttctaaagaaagaagatggagaagaaaagaatactcacacagaaggatagcaataatgccagtaaaattaaaaatagtgtcggaaccaacaagacccaaccaaagtgacactataaggtcgagaaacggctgcaaaccctaatcaagcaaaaaaaatcaagctgctaagaacttctaacagaaaccctaaaaagaataaagaaaaactcaagtacaaaactttttattcctcatggattttggtgattattattattattcagcttcaatgtacacgtatatgttatatttctttcaaacgaataatatcaatgtagcattcaatcctaaattaatcctcttttcttagccacataaaagtactagagaagatatttgaataattgatgctttctttttctataaacaacaacatgttttctctcaaagattattagataatgtgtccacatatattattgtggatttattatatatataaatatctttatttcattttaggctagccgaccgaaaccaaatctatcatgttgttagggcaacctatgcctaataatgtatcatatatctatacttgtcccaacggcctactatactactttatttcctactttaatataaatatttatatagtctattaattagtactattaggttaattacccaaataatatttccacttgcttccaactttgaaagcttaaatgtatgtatatattttttgagagattaaatgtatgtatataagtactatgcatttagttgcatgcatgcatgccaataacaatattcttgttatgaatattaaaaataattatagttttattaatggggttttgtttataaattcgtttttttcttctatattttaattataaaa

SEQ ID NO: 378119 - DNA, 6500 bp, Cannabis indica
ttttgagttaaaaatcaaagaaagtggataaaggaggagaaggttttcgtcgaagaaggaggagagtgttgtatcgtactatttgttcttctatttataaacttataatatatataataaacttatcgtatatatatacactgataaattttataaaaataatataataatattgataattcttttttatcaagaaaaaaagactttattaatcgacgaacaattacaagcaccaataaaacacagaaaaataatcctcaaactatatgtattgtaatctaagcagatagtttttcttcagagcttacatctttcttttgtttacaatttgtaacctatactttacaatgttctttacatcattaacaactccacatactaattttgaataaccattgaagatggacctgtttttattaagccaaaggttataaatcacagcggctaagatggtggtattgaatctttgaattaggccttgccccttcactgttaaccagactcaccagctataaatatcaagaggccaacctctatatcccatccaactaaacgccaaatcgaggattctctaagacaacacacaattgaaaaaatttgttcatgagtttctatctcaacttcacacatcgggcatagacttgatctcagcttaatgtgaattcaactcaacttatccctagtgagaaggtgggagttaatcacttgccgtaatataaaccctgtgtttaagcactaataaagaactccaaatagctttgtgataattgacctggttttagaccaaattgttattgtataaccagtaagtcttaaactgaccaaatgtacctactttaagaatctcagttctcaaaaatttcttcctcaaatgacaaaatttgtgccaataccaactagagtctagtttaagatcataagtctagaagctcaccgatttcagatagatgttatctatccatttaacctaaagaagatcttgctttgttaaaatttcccaaatatactttgcaagagtagcctggtttcacttgactccatttttaaagccaatgcctctgtaagccttcggatggcaaactttctctcaagatgcaatgtgaatcttactcctggtaccattcatacccaaggaaatcctcgacaaagtttccaacatccttagtaatgctatgaggaagaacatatatgctcatccaataattttgaaggccaagtaaaatagagtgaattaattgaaccttaccaggaaaggagagatgcctgcttgaccaagtgtgtaatctttgcttaacctttttgacaatgatcccacaatcctcagctttccactttgtcagccttagagggactcctaaatatttgagaggaaaagtaccctctactagttgaaaatcgtcaataatagcttgtttctccttggtttttaggcctccaaaataaatttgggatttacttgagttaacatgtaagtctgaggtagtgcaaaaatcatcaagcacctatgtaagagccacaactgaaagcttggaacccttaatgaacatgatcaaatcatctgcaaagcaaagatttattatctttaagcccttgcacatcagatgatacctgtaattagaatgaatagtagccatatggaggcttctagtcagatactccatgatgagaacaaagaggagagaggagatcaaatctcctcatctcaaaccttttccccctttgaacctgccttgcactctaccattcataactaaagagtaggatgttgctctgaggcatcccataatccattgaacaaacttctgtggtatgctaaaagcaacaagcaaatcctccatgaaatcccaacttacagtatcataagccttgatgatattaattttgatggtgcatcctggagaatcatcacattgtgagctatggacctgccttgaataaaatctccttgattctggtcaatcagattaggcagcaccattgcaagtcttgaacacaacagctttgagatacacttataaattgtgctacaacatgctattggtctgtaatcaacgactctagttggattctcttgtttgggaataagagaaataagagttgaaagaagctttgaaggaataaaacctgtattgaaaaaatcattcacagtagattaaaatttagctcccaacataggccaaaaatgcttgaaaaagcctgaaccataaccatcagctttaggtgcttttgtgtctagtatgctgaaaaaaccaacttgatttccttgttagagaatggcttgagaagagcaagttgctgatctaaattaaagcgagggccctattcaagaaaagctaagttcagcttgttagtagccaagcttctgctttccatgtagccccaaaaatgagacacaaagtgatcaaccactttagtgaaattatcaacaataacaccctgcttagtaatgtatgaagtaattttgttctatttttttcttcaaacaagcatgaacctttatgaagccaagaaatcttgctccgctgtattaagaagttgtgatacatcttattttggcttaaaaatattgcagcagctagcttctctttttcaagaaaattaggatccctcgggtgagattgagcaagcatcttggattcaaggagtcattcttggaagcctggaaggtcttctcaatgtctcctatgatgtcactgttaaagttcttgaggcaatgcttcaacctcataagcttaagataaagagcaaagatgaccttagcagctatgtgcttttcccaattcttcgatacaactattttaaattcagcatgattggcctagaagttgtagtatctaaagggctcgaaccctgttttattggatacaacagtagtaatggtacaagagcaatgatctgagatggtttcccatctaaataggggctttaaaatcgaggaacatgtcaaaccactcctcatttgtaaaaatatggtcaatctttgagtagattctgttatctcatcttggttattcgaccaagtataaattgaaccagagcaaggaattgcttcaacatgagccgaagctaataattgagatggataagtgtcactgaaagttatagggttccctctaactctatcatccgtcttaaaaatggcattgaagtccccaagtattatatccaaggctttacaagaaatctagggttagacagatccttccacaagctttcctttattcaacaatgttgtagccatatataaaagtagcacaaaaaggagcatcacaaccagacatatgaacaaaataatgagccaacaatggtgattcagtaatgactatagttctaaaaaatttctttctccaaatgatcaagagccaaccttctattgtaggactagaaaaatagtcctaattggcaaatttattccatcatatctttgattttattccctttgagtttggtctcgagaaaagcaccaactcccaccttatttatcttacaaaatttagccacaacatcccatttatctttattattaacacccttaacattcacacaagcaatcttacagttatccatgggacaattgagatgttaccttgctgccttgttcatcttgaaccaagtccaattcttcacgattttcttgttcctgcaaagcactaaatgtgttgaccacaatatgaatattagagttagtgcttctctgagttttaccctgaacaatcttcttagggacatggcaatccttgtcctatataacacccttataacatggtatgcttggcaaagaacttgactctccctagttaaaaactgtgtagacaggagcatcctgtataggattatcagaagcagcagtgttctgctttgttttctctggttttggcttatcaccaactacttgttttttctacaaatcatccttacaacaatccaccattatatgaccaaaacccgagcattttttacattttacaagcagccatttgtaatctatactcttctctaacaattgcccatgctcattaaggaattgaaatgttctctgaggtgaatttgttttgtccatctcaactaaaatgcgagccaattgaaccctagtacgatctttagtatgttggtctaccataataggttttccaacagtactaactaagggactaagacttttgtttccccaatattagagacacaaatcgtgaagatgaatccatgaaggagcagatttgactactataacaacattcaagtcaatattgtccaaggtctaacaatgatcaacttcctatcaaactgtacaacacctacttccagcaactcatctctggttgtctcgtcatgaaacttcaccatgatcagccccttggacatcatagcaatctgaactatcccaaggtgtccgcatattcgtttgataaacccttcaaacacaaccattggtgggttcgcaccaagaatcacacaaataacaaccgaattccacgcctatgttttttttccctaatttcctcaaaatcaacttgagcaattttcaaaccatttttaattaaaggttctatatacaaaagctttgagtgacgaattaataccttctctttagcaaaggtattccatagactcttagctgattcttgaaactagccttgtccaattccccctccttagcccaattcatgctaatatgaggtgtgtgaaactccaagatacttggagattgtcaaaccatattttgacctatttcctcaccaaagtcatcaatagcaactttactcaagtctggattcacctgaagcttcatctttgtcattagtatgaattccatgctggacatagcctcagcaacattgatagtaggctttcgaactatcctattcttcttcaccatgggagaacgagagaatagctacatcgcttaactagaattccccatcagttatttttcttattaataattatcttatcatctcttagccactaagaaacctctactttaagggtatttggtcaattccgagtaccctaaaatactctggtatttctaaaatcaagttatcccgataataatgtttctaactaataccgttgtgacatttttagtctccaatcgagtctccatggtcgtcgaacctgaaaatatttttatttcacaaataacttacattatatccacatatttcaattaaatttttgtaatcaacaaattatgcttatttatccacttaaagcaaaatttataatttatgctaaattaagttagtaggatcgtaatcctactcattactacttagttaacccataatatataataaatcctaattattcatgattagactttcgggatattacaaccataccctccttatagaaatttcttcctcaaaatttacttaaatatataattcgggatttttctccctcatttacaactctaactctgaagttatttcttccaccacgccgtttctctataccactcttaactagtgaaattgtcttatactaaaatactttttcttcctagtccaaaacttggacaatcagctctccatataattaattatattgaaatcattataacccaaaatatgaatcgggttcggtacatactttctcagtagggtaatatgaaacacattatatactccggacaacataggggttaaggctaactaataggctacccgacctatttatcccagtataaaaaggtataatgaatttagggtttaaattccctctccatgtatcctttttataagtaatactcggagaaaacaaagttttctatttggaactcgatatccctatactttaaatcagtgtaacttttctatgtaattaatgaagcgagcatacatctcaaattcactctatgattttataagttcctctgatctttttggtccatcatattcttttctcacctgtataactccagtgaacatgtgtctaatatttctctcgtaccacttttattaaagtacctaaccagtggtatatttaattatcacctttagacaaacactttatcagggaggagattagtctaagataatctaacatttatcaaatatgttcacaaattgtttctaatattccattgatcctccttggttacccatctttcaataataaaacatcatactattttcactttaatctcgataactgtcaataactttctttaactcttaacatcatagccaaaaatatcaactttaggatttcacaagattaaactatccctttgtatgagctccatatcctcatttattgtatgaattgtctatactgatagacaacatattaacttggtatgtccaaccattactaatcaatcgatataataagatcccacagtacatgtaaagcccgcttagtaatttggaaattatcagttgtttgtgattaattatgaaattatttatagctatttaaataatttattactgttatttatggaattttgaaatgcatgattatgttatcagtagtttttcatattttgc

SEQ ID NO: 378120 - DNA, 2879 bp, Cannabis indica
aatgaaggagttggatgtacaaaagaaccaacgccaaccaccaccaaacccatcttcttcgagttcaggtggaaccgggtcaggggatagtttgcacttcatgccagaagagatcgaaaacaatggttcgactaagggaaagaagaaatacaaagatgttgctgatgcagctcaggcagcttttgagtctgcagcttatgcagcagcggctgcaagagcagcagttgaactttcaagatcgggacacgattcagataatcaagatagccctgtaagtcgacaaggaaagtcagctcgcaaaaacaagtccatgaaaattgaatctgattcagaagaagagaagactccagttgaaaatcaatccgctgaattgagttcacagtcttcttcgagttcagagaagataacccgaggcaatctttcagagaaggatgtgtttttgatgaggatgacaatgagacaatatctggaaacaatagtaaggttccatctaaattgcaaattccttcaagatttcaagcaggtctggtggtcgactcagctcaacagaactccatggaacatgaagctgagagctccgagactgggagtacaatgcgcttaaacttagagagagggccattatcggtgagaactagacgagtgcgagggtattgaggcttttcctggtacagtcttcatatgcatatgaattttgctagtgtggtgataacataagtatattcccttcatagttttgttttgttttgttttgtttcttcttttactttcacttattgagctgttcgatgtatattgccttttgaaagcgttatctttgtgctttgagcttttataatgaagttggaagtgtttcaaattggaaggtttctaagttgtgtacattctctgtgacccaggactaatattaccaattaaattcacatgtactggaaatagctttaagtgttaccatttctcaaattctcttccacaaactaaaccaatataaccatacgcaaggcatatctaaactaaaaatagctattttttctttagaatactgaaaacaagtagttgcttcatgattcatgaaactgctatacctcaattaatcgtttacgaaactttgaattggataaactgttgtacatactatatacaatttaaccttactgtaaaggtttaaccttaaatatacataaatggtaagctattttcatgagtcatgtagcagtttagcctctaacatacataaatggttaaaccatattggattctgaaactccaatatacaagttaatagaacgcagaatctgcatttttcactagtgaaaaaagcaagaaaagaaccatatgtattttgtgtaattagctaagataagacaaaacaaaaatcgactggcctcgctgcctcttctaaccacattgtagaagctcaccgaatgactgtaaactcacgtcaacgttttcacattaaagttagttccgcgtttgtggaaataaattgtcatatataaagtgaatgagtggcaattggttttgagatggaacccatccatattatcctcaaattctaacacttcatcatattcaagttcttccaacaaattttaccacctctctatttattattaccaaattcttcattgcaaaacacattctcaaaagtcaaaccagagacccttgaatggactgaaaataacaccttgaattccttgagattcttcggtaagttctcaataatagcaccccacaaatctttaaacatccttctacgctttctccattgacttattttgtcagtgtacaatttttcaacagatcttctgccttcaccaatgtaattccaccacgtaatttccagtttgtcctccatttctttgacctaacatatcgttacaaaatctccccaagttaaaatcaaagaaattttctaactctttcgtgaaacaaattccaattcaaggaatagtataattcaatcaacctccattcttagtttggcttcctttgcacgtttttgttccagtgtcaaatttgactgcaaacttttgatttctagagaatggaagaagttacctccttcaacatcgccaatggatttcttttgttcctcaagctgtttatgcaacctagcattttcttccttcatctgagtaagctcttcgctatttgggacatcgaattggtcttggccagcaagataaatcttgtgcttaccatactccttgaaggaaagcggcccaccatcagccagattatcaatatccagggctttttgtattgaagccttcttgagactgaacttttgtaaagcatcagccacgtacattttgtgaattaagcggccatggcttgccaaagaagcttagttgagcttaaccacgagaaaaaaataagactaatatgaaaagggaaatttgtgttctgtttgtttagaaagaaagtaaaaaaaaaaaaaaaaaaaaacaaatgattcttttctccatattgacgagattttattgtagcttcgttatagtagatatagaaaatttataaaaatattgagacacgtagattttaatatttttaatgttttaagtttataaaaataatgtgttaaagttttaaaattataaaaatatagtgttttagtaaaataaaaaataatcttacaacaacttaacaaaaaaatatgataacaactgtaaacaacaaaaaaaataattacaaatcaattgaaaaataacaaaatattgacctaatttcaataagtaaaataatatcaactccttaatatgtttttgtattactatttcttttacttagttttgaaaacttgatttatctttttgtactattatattatttttttttggctaattaagatttttttcctcgaactttgacatgta

SEQ ID NO: 378121 - DNA, 10448 bp, Cannabis indica
tttgtagctttatatatacacatatatctatctgtatacatatatatatatatatttatatttatatttatagagagctgagagagacgtagatttagattatggtcctcttttgaaattttaaaggaagacaaccaatgaaattgaagtccaccactatattggaaagaaaaagatgcaaccttatctaatttagaactggtgggatcagaagaaaagattaatttttggtttttgtgattaattaataaatgacctttcaacttgtttagtaaagacaatcacttgattatgaatgaaataattttgaaaaacaaagatgaaagaatcagaaaggagcaatgaacatggcatagcagagagatatgcgctagctatgaaagagtggaaattatccatttgggtacacgtggcactagagtgttcgtccgttgggacgacatgtggatcccacgtggcacttatccgtttaacgtgtcgtggaaaacgatgatgatggttggttaacatgatattatattgctaaaaatgcagagaatagaatgtaaaggacagtgtgaaggaaatttcccagctcctttttggtaatcaaaaagaggagagaaggaatattaacgaaaaaaaataataattatttctataatatttggctgatggtggcacatgggcggcactctctcactagtgccgttcttctataaaagagattttcttactataagttttgcatgagtttgtgatatttttcctcactctttcttaatctttcttttcttttttctccattgtgtgtttatttcagttgggttaaagctccggtttttcagttaaaagaaaaaatctatatcagattatttcaattgggtttttctctgcagatagttttgcttagtaaagtcaatggagggtaagaagcaagctaactcgtcttcatcatttactgctgagctttttggtggcaaagagtctccatctaagcaccagtcaactgggattttcgcctccatttttcctcctccatcgaaggcatgttcaaaatctactgcataagaagtttacaataattataaaaagtagagttctttattcatttattttattattaacgaaggaaaagttaattatcccctttactgaagaggaaattgttgtggtttggtttggtcgcacaagtgtaaataaggaaaactaaataaatagagcaaaaatgttccatttatgtagtctgttaatgttagttaattggtttattttggtctggttttaggtggtaggtagaaacacccgaagttctgatgttataggatcttggcagagacatgcccctggaaaccaaacatggcccaccaacaaatatggaagttcaggtattgttatcactcagatacagattgttactaaatcttttcatttcttcatctagatttgacactactaaatcttattcaaaactaaccaatgtttttggatactacttttcatatgctcctatttttgcaaagccaaatttttagaagttagtagaactgtcatatattctaggaaatgaaaaactatattcgatgacaatatttatggtattttgttttaaatattcttttctttgggaaactatacattaaagaataacgctggagacaaacataaataaaatgtatttggataattaattttagtaagtaggaccacttcactttgatttctttagtttaaattaatcaagtcttccctttcacaaaaaaataaaataaaataaataatcaagcctttttatgcatctttgagaggaaattcgaattaatagcctactaccactatgcataatgcctatgatcaccacactcaaccatcttaaaaccatagtatctgtttgattatatgatcaacaccataccagataatgcaaaatgatattttttttttaaaacaaaaaacagaagtgatgctaagagaatgtctaattctcttaatttttatgatgatattcattccactatggaagttcccatcttcactaatggataatccatgcctcaaacttgtatttttgtcttacacagctaagaatggcgaagttgagcgatgtagcatagcctacaaggacaggagtttgattcatcaagaagaaagattagaaccatgccatctaagctcttcgatttactatggagggcaagatgtgtattctcagtcccatagttcccaaatctctgaatcttcttaccctgtggtgagtcttgattatgtagtgtgagaatgattaattgatgataagaaaaaacaatgtaatagaaaataattttgtgagcatgtactcttgtgaatgaattagttcaaaaaagatggccgggaagatgatccaaatggaagcaattcgaatgatgcttctcgaggaaattggtggcaaggttgtaataataatagtaataataataaataaataaataaattagtactctctttgagattattttctttcaccattttggtctctgaccaattacacttgggtttttgcaggttccctttattattaggacctttgtccacgctgcatgaattatccaactattttttgaggtataatactcttatccaaatccattgcttatgaccaaatgaaattcagattctattgctcactcactcatacttcatttactctacctgtaatgtgagcttatactcagcatagctggaacaaactaagaacaactttatactttgttacccatgcacaatatcttcataatttttagaaaacattcctacagaaactctctagtataattttttattaaagtttattgaattgcaaatctcacttctgactctaattatgcaaattgttttattcatgaatcaacagtgatacatatatgatatatcagcaaatatttttcgtttatgattgtagtttaagtcttcttacccttctctctctctctggaaaccatattttaaagggatgcacatgaagtcaggatggaaagcacaggaagaaatatgcaatataaataagtagctcaacttgggacatggttaacataaataagccagcccattcctgaagagcttacaggggacttttccaagtcagaaaatgctaaacattttatgacaatctaattgttctatacgagttaagatcaggctgagaaacgaaagattcactaaactattctactggcttaagtttattttttttcataaatatggatgttcgcaagtgcttaaatttgtcatattcatagtcctaattcctatgaggctttctccaagaatgttgaagaaaatttagaacatataattctagattttatctataagaagaaatttacacataagtagtttacttatcgaaagtattgtcataaaactctcaatgacaaccttttatatatgtataagacttctagtcttatttctttctctttctcaataaatattcaaaggttatactatctcatgtagtacacacattaattattaacaatcaaacatcatttatatcttctacattacatatacttaaattatacatgtttaatttttgtacacacttaatttatattagatttagctttagtttaggagctaatattgaattttaatattcttcatgacaatattagctcccatttttagaactttcaaactattccaagctcagctcacggcaagccaacttgcttatctgaatttgatttatctcacttaaattttgtcttgtaaaattttctctcgaagaaatgatagtgcattttcacatatttagtttttgcaagaaagattggattctctggactcgcatcatctattagttggtgcaaatcattcattttttgtattagccatgtattttcttaaattattattgttgttgctcaatattctactaccgttgttgagaaagatattatcagttgtctcttgcaacaccaagaaattgttcagatccaagtataaatttaaactatgaagttaatcagcatcataataacgaactagcttataattttcactttcttatacgcaaggccatagtctattatttgcttttatatatcttagtagacgtcgaactacttccaaatgcatttattttatgtacgacctatcacaccaactgtataaaaaatattaagtagattaaactatttaccgattgtcaataggttgtttgattttagaattgttttccttcatatgcacatattttgcaatttggtttcattggtgttgaaatcagctgcattcatgcattacaaactctttcaatagatatttggaatatttttgttgataaagaaatattctttcttgagaatgatcaatattgagccaagaaagtgtttcaattgactaaattctttcatttggaaacatactatgaattttcttttgttcaaaatatttccatgttgagttagcataaaatttcctaacaaatgaatttatcagtatgtttccaaataaaagaacttggccaactcaaacaatttcttggcctagagattgatctggcgcactaagaaatatttctttatcaataaaattattctaaaaatttattgaaatagtttggaatgcttgaatgctagccattttaaacaccagttgaataaaactctaaaatatgtgtacatgaatgaatttttttggaaaatccaacaatataccaataattagtaggtagtttaatttatttaaccttgattcgacttgatatttcttatgcagttggtgtaattagtcaatacatacaaaattcaaagaagtcacatttgaaagtgacgaatagtaagataataaaagataaataaacaatggagttgtgtacaaaatgttaaaaattgtaacctagttggctatttgtgatgtgaatatgtatggaatcacaatactcgtagatcaactacaacaaagtatatgtttatgcttggatctaaaatgattaattagtaacaaccgatagtgtctttattaataatggcaacttaaaaaagtatatagctaatacagctaatgaaaattttgcaacagtcaatagattatgcaatctgttatgctgttaccaccaatcaacaatacatttagctgaggatccaatctttcatggaagaactaaatcactatcattttctttaagagaattttgcaagaaagatttcaatgagacaaagattgagtatccaaaagtttgaaatcttttgcttaataatcaatatagctcttaattaaaactaaatctaaaataagtgtgtatactaattaagcatatataacttaaatttaaataatatatatatataatatgtagatataaatgatacacattatcaataattaatggtgtgtgtattacagaaataaatatataaaaggttgtagtcttgtcattgactattttagcgtagtattatcaattaaataaagttatgttacgtctccaattttatagtttttcttagagatataaaattattaacaatctacatcatttatatccacaaacacacactatatacgtacaatttatgcttaatttatatgcatacataatttgaatttagttttaatctaggagctaatattgatttttaaaagatagcatttcaattgctcaagatttgtcttttattaagactatcttcaatcaagatcaacaaaatcagtaatccaagggaactagaaaagcaggcacagtagtggattacgtaaaaagagaagacaaatacagtagacaccctttcataatagttacaaagaaagcgattgctaaatgtatgaagatgtttttttccgttctaacttgaacccaagaacactttgttgtgcctctttgtcatatcctacaactaatgcttaaaggaatccaagttaaagtttttattcacttctgggaaatcttcctaaactgaaaaggtttaagcataatttgctattctttaatttgatgaatcttggtagcgacaattgttgtcatttcctccaccgtctgctatgcaaaggaaaagcctttcgtatgcagctgtcatcttcgtggctgtgaatacctgcaaacccttttgcctagctgcctgacctttctgctttaaagcttcttttccatcatccagaactttagacaaggtattctttaacgaagctacagttggggagaaagtataacccatttcagtgcccactattacagaacctgtaatgctagcaaccctggttgccattactggtttaccagacagaattgcttctagtaaagtatgatccaatccctgagctcgaagagttgggttcacaaaaatgtctattgcactatagaaacccgacaactgagcttgatctaaaggccccaaaacaagtatattggctccaagatctctgtatctagaagcccaaggaccatcccctgcaaccagaacaacaattctttccctgaatttatcactttcagttattaactgtttcaaagcctcgaacattatcggatgtcctttatccctcaccagccttccggccatccccaaaactattttcctcgattcagggataccgagctgtaatttaaactcctcccctttgccaatatctggtttaaaaatttcctcatccactccattaagaataatatgaactcgatcttctggaatcatgtaaatcctctttaggatatctccagcatggtcactggtagcaacgtggtgagcataaaatggaaagaatttcacctcattaacaacccttaaaattttctcagtcaaaacagttgcctggggttcctcagggtttcgcagaagctcctgaatgatgtccgaatgaattgtttcataggcaatcccgtgccaagaaacagccaggttggttagaagacgagatcgagtatgaaagaggccaacactttcagtatgcaccacatcgaaaggctttccagtagagttttcaattaggaactgcttccagattgtagcttggtccaaatagcctccggctgttggttctgacaagtgaaaatataaattgcttattgtgtagctaggaaaggaagaatttacatgggaagtagtgaagacatggagctcatgaccacgttttgcaagctcaaggtgaagagtcagcgcatgacgttcaagccctcctgcatgcgatttatgaggccatttcttgacaaacagaccaatttttaacagttttctgggcggatataaggagaaagaaagataattccacgctgaaggatatgtaagaaggttaattggctggacttgcttcagctccagtttttggtgtaaaataaaacatgggccacaacaatcgcaccaaaacacaaatgatatgaatgagaatgaacaaaacaagaagataatgcaatagagccgacgaaaactaaccatagaagcttgctcctttgccatggaaatgtgggcaaagaagcataaaaatgatattcgaaagacaaactaaaatttgatggagaaatctcgggaacaaaaccgagcaatcttattctattctcagtatgaaataagagaatgacttcagagaaagcttaaaggagattagatgaaatgacatgaattgttttgacagagaacggtgtcaaatctcacaatcctttttttcttgatctcaagactctatatattgataatctcaatgattaattgtttaataaagaacaatgtaacttgcttgagcagcaaagtttatgcattttgacttcgaagctctatttgacctacttaaacgtctactatgtttagtatataatatactatataccgcgttaaacacatttccagccgctgtttcaggctcacgcccatggatgaaacaattcccatgaaaataagtatattatactagagaagttaaatgtaatgtaccatcacccaacagtgaacaataaaataatgcagctctactagattctaaatctaaaccactaagttaatattatatcaaattccaatggttagtttaatccgaattaaattcttgcaagttctgatcagtgtcagataagctttactccaaagcaagccaactgtatcacgtatggcactagtcatcaataagcaatagcaattaacaaatttcagccaggtcttaggtgtaacttcttactttctaaaccaagaagatgatcataaatcaaatgaagaacaatcaattacaatttttttttttttattattattattctaaactttcactttgttattcgttgacttcaaatcactggaacttaaacatgtatatacaatatcaaaataacttgcattaaaaaagatattgaaagaaagcttctaattttacagaactcaccacaacaatcattatgacatcctttagcgagtgaaggcatgaagcacaagaccaacatagacgattagcgccacagggaccaaaataaccaaaggaacaaccgcagcaaacgtatagacactcccacaagccaaaatccccaatttgatctgaaccaaatccaccaaagccagcatcaaaaacccacatccgaaaaccgacccaatagccgaaaccatcatccccaatctcaaagccacccggttcacgtgccctaggtggaaaccctcaagatcaccaggtccactgccttcgctgatcgtaatcgcctgtttcagggtcagagcgatgaggctcgagaaaaggaatgagctgaaggagtacacgtggtaggtgatgaggccctcagtgacatcggagccggcagagcaagccaaatcggcaacgtcaatgagtgtggtttggggatcgaacgttgggtaccaattaagtccgaggaagagagctaaggtgaaaagggaatttacattaacgacaccgtccaatgcaagtatatgaatgctagtcctgcttaacgcacgtcgtcgaaaagacgcgacggaaacgttttccggcttgacttcgccggggccggcggaggagaatttagtagggaaagcattttctttgttatcagaaaatagaacctttcccttcattttcttgtgcggtccgaaatctgtggtcgtacattgaagttttgaagattagaattagaatggagtttggcgtgggttctctggctaccgtcttcttccatattacgcaacaacgaaagtgttttgcagaaggaacaaagttacgtagtgcacattttttaaataaaattttctctaaaaaggaggataagcgccgttgccggggatcgaacccgggtcacccgcgtgacaggcgggaatacttaccactatactacaacgactcttttgataactgtttaattatacttttatttatatataatctacaagcaagcatacataacatatctaacgaataaattaaaataagggcacaaataattttagcaggactcaatcaaagaagttacgtacaataaaaacttaaaagaagatattaataatcgaaattgatacgtacaagattatattaaaaagtatttaatatgataataataagaaagattaactattaagtttgtaccaataattttaatatgattatacgaataaatatttagaaaattatataatggaatttgatatatggtaggcagtatcaccttggatcctaccccaaacctgcttcaggttaataaatttgtcccctaatcccgtcccataacgcaccaaagtaggtacttcccgcctcattcgcggtgggtactcacggtttgggatgggcacatccaatttaattgaaccgaactgaatcgaaccgatttaatccaatttaattacaaaaaattagatatccaactacaattgaattgaattggatgttaaaatttagattataattagacttgggaatggtaccgcgctttgcgcggtttttattataatcgaaaattacatatattaaaataattttatattttatagtgaagtttatatattttatgatttaaatttatagttaatttttactagcttgtacaatctaaattatgatttaattaatgtatataaaatgataatatagatagtaaaataaaaatatggattaatatttatatatatatatatatatattggttggcgactctaattgtcaagaattattattgtatgtttctctttaaaacgtataacaatgttcatatatattggacaatctcatatacgtgtatttatattatgtcaaatacaagaaaaatatttacatgttttaagaagttcatattaaaattaattattaataataatgcgatttgttttccacaacatttcagtttaattattataatatataaaattataatacataacattattttatgaatctagagtaacaaaaaaataaatttaagacaagaattattttttctctttattttatgttatcggtaatatttattttttcaaaatttcatatttatatctttatatattaaaagtgcctatctaacggcatttctt

SEQ ID NO: 378122 - DNA, 2404 bp, Cannabis indica
ctactctctcctctgttcttacacataacacctattttcataaaaataaaatttataatacataaaatacatatataatcgtataatcagattaattagtactaagtgtctcactaattccatatctaagtataacggtcattacaaaacaaatgtagaacctataattaataaattaataaccagattatcaaaattgagattttgaggtgtacttttcagaggttagagatgtgcttttctcatgtacaagcaacttctatattctattctcaatgagaatggtgacattggtccctccaaaacaacattctattatgaaggccaatcaattgggccaatatacacccaaaatcatccctttctcctttatggctattttccctaaaaagattaggccctaatagaatgactaaaatgaatcaaccaaaaaaaaaaaagctaagttgcattagagaatgaatggccctatctgttaagagactattcctaatccttatttacatttttctgagtctcttcaatcaatgttttgaatgcaactctccattcagcagtttgggattcactgcaaaataatctatgcaatgtcgtcagctcctcaggactcgccttcttcaaaagtcttctaacaactacctttacctcttcgtcaattaaactgtaacctttttctgtaaatggattgctatcatcctgttccttctttatcaagttaataccgaagagttttgtcctcgtttctccagaagagcaagttgattcaatcaaatgcttctcaatatttgcaggtgtcttttgcctgttgtcccagtactcggagcatttatgatgagggtcgagagcctcaatagcctgtcaagaaaagaaaagagccatgataagatagtcaataaagaaaccaagttcgttgtaggaaaacataataaaagtggattggctgtatttaattatgccaccaaaattaatagttaggcttgcataaacttaagtatctatgctgttagtatccctatctagaaactcattgatttagccatttttgtatgccacatagcctataataaaacaagataaataataaatatcacccaaaagcctatcaccaacccacacaggtccttccaaaacctaattcttaccccatggccaccttgaatttaactaacttcgcaaattcatcataacaagtgaaccctatccaagggcctggtcaatatcccccaaattaaggaaggtcccattgattctctttaaggatataaaccttttgataaatctgtaccatagagaacatgtttctaaaggaaaactcttctttttataaacaaaacaactcaacttgcattattagtatagacaaaataatacaaggagtagaattggagtactaaaaacttactacccaaactaataaaaacaggaaacgaaacagcataaaactgccaaactcaatattcagaggtgggaaaaaaaaataaaggaaatatcccttatttgcttctaattgaacaagcttcatctctaggcaggtttaccataaaactaggagaagctaactgaaatgtcctatgaatccatcattaaaattgttgtttttatttctcaaacttgtttaatactcttgcaaaggaaattaaataaggtggtattacacagctgacattaaaaaaaaaaataacaacttagtctcagctgtttggaaacttttactttaaaggctattgacaaatgatcactaatgtaagtaatttagttcttctcttatagaaaatgaaagtgaatcacctggctcaacctaaagcgcaaaaacaggtaaaaatgaaatcaacaataggtcacctacctgcataatagaaggggagagaaacccaaacatttcaagcccgtttatgctctgaaaaggctgtaaaggcagtcctctacctatcttacttcctctttttatctcctcattcagtctttgcagaacagtttcccaacacttctcagctgaggtattggaaaaagtttcagcaggattttcctccaatgaaacctgaaatgcatgctatgatatcagggatgaacaaaatgaagaaaaaagaacaaactcgatagatgctttatttaatatccgcatttaatgatatgatagtaccagtgtaactaaagaaagtgataaaatcatgtctactagaaaacaatttcacaaaaacctaaaagcttagatcaatctaaaaattttagattaatcaactaagagcttagtttggtaggctcaaagcataaaaggctgttagaataccacaaactcgtctaatgaaataacaaagcaatttttaaaaaagttgagggctatttaaatttaattagctaacttagttttattaataaaagaaaaacaaaaaataatatactactt

SEQ ID NO: 378123 - DNA, 1680 bp, Cannabis indica
aaaaaataaagaagaagaagaaacaaaatgttggaagcttgacatgacgtagaaagaagaaagcaattcaaaatcttattcaaagtagatacaaaatgcaacaagcagaagaaaaacatactttcagaaatgcatttaagactgacaaggaagaaactaacttacataggagtctactggtcccccctggtctttatcaccttctctccggtaactagaaaactctggactaaaatcaaaaggtgaccaaccctaagaagcacagagagagtgtcaattataagacaatgcatatgacttgcaacagcaacatattgaaaatatttttaaaaaaaggcaaatcaatacctcattagccacaaccagttcggatgtagcattaatgtctgacagtgaattttgtacattggcgaaatatacacgaggaaaggactattttcaaaagagacgggcaataataattatgatggagaaaaaaaaaaggatatccgcgaatatgaaattatcagaaattcattaccaagaatactagtgtaaaatgagtatgcagacagatagaatgattgtttaataaagagaaagctcaaaccttatctaactcagtcaaaagtttataacttgccataatcaattccaaagactctccacaccttaggatcctgaagacctcctggaacattttgcttcacaagacatgtaccaaaaagtaaagggaaaatccacatgataacattgcataacactagatgtagaacatgtttagcggagataattgtaagaattgttagtccatgaacacgatcacaatttttcccataaaagaaggttataaaccgtttccattcgtgctaaaactaacgtaaacatacagagcaaaacagagaagaaaagagaagattacttggttggtggagttccgttcagcgaaacaatcgaaattgcacgaacggcttcaagaaatgcgagacctgtttaagaatcaacacaaagcaaacgataaaattccttctcaaacaactcaatgaaactccgtttggtttttaagaaaatctcgctacgtaaaaagcaatcaaactagaccatcatttcgaactctaaaaatcatataaataaatttatatgtatatgtaatcgtactatcttcattagcttcctgagtgtctttagcaccagaaccattgataattgccaaaatgttttcttccgcctgtccccttgtcttctgttttataattccagcgacctccattttcactttcacaatcacaatctttaaaccctaattcatggccccatttttaacgatggatgctattttcccgccaaaatcgattacagctaacgagtgttcagttgagagaggaaaatgtaaagtttacagtttagagaggaaaagtttgtttgttgttgctatgtcagtctctctcttccatttcagagatggctgaactgaatgtttgaaacggtaacagcgaaggagaaagacgcaactcgagtactggactggactcgactccactccactccccacgaaagtccttcttatgctttttagaggagaaaaaccaaagtaattttatgtttggtttaaggatagattggacaatttatttattttattttctaaaataaatttaaactaaaataaaaaatatataataataattttcaaaataaaat

SEQ ID NO: 378124 - DNA, 1175 bp, Cannabis indica
ttataattagattgaatttgattaatttgttgtaattcaattcagtgtaattagatcataaatcagctcacaatcattattgaaagttaggaagagaaaattttgatgttaaggtaaaaatattctttttacattatatttaatttataatttaactaaatagagagaactaaaattttttgaaagacataattaaaatttatatttactgtattacataactgcgctactacgcgaaacgcaattacgtttactagtttactaatatgagtgctctattagagcaccaaaaatcacattttaactaaatatttagctacatatctattgtgcctcatatttgggattgctcaagtattgataaattagtaactatataaaatctacacagcttcaataatttaatattatcatattctcaaagaatgaaaagaaaaaattatacaccaatgtagtgtagattcaatatccaacaacattgatagtgtttacagttacacaccaatttggtatataatttgatatccttttggagtggaatggtgtgaaaattccatattcaattagtgacataaaacaagcagatttagagactaaattatactgttacgagttaaacaaatcagatgagcacatgatgataagaacaaaagacttaacagacaaatctaaattaggtttagagaaacataacaactaattttcattcatcgaggcaaagagtttcaccataacaaagacacaagatagcaaactctaaacaaacctctaaaacatccaactacaacagctactcttaacatgtaatgtaagcttcagtcatgtcagaatcagtaatggcaataccaaaaagagatcaatgagatctataccactgtattctattgtcaaagacaaactttagctaatcaaaaaaacaataaaatactattactgtaaaaacaactgcccctaaaactgtaaccttcatttaatcttctcaactatgtccttgatggttttgtccatgtccaaatctttcatcggctgaaatggtcgcttcatttcctgcaaattaaaacacaggtataacaacagtagttaaagagattattaataaggaaatactattaattagcagaataactgattcacttgtgtctttattatattaaaaacctcttgcaagtttatct

SEQ ID NO: 378125 - DNA, 4126 bp, Cannabis indica
gtatgttcccactatttcttaaacgacaacgtgcataccccaaccacagccaccaccgcagccaaccaaatcaagcctgaccgcaaacctgtgtcgttagccatagtaataagagatagagagggagacacacttattctcttgttttgttgcctaatttgctttgctgattttcttttggacccccttaaacttaaactcaaactcaaaactcataacctatatttcttgctaaaaatattatgctcattttcttagccaagccaaccactacaactaaaaagaaaatagcttccatattattataggtggtgggtcccactcccatcccatagaaggggagttatggaccctcagctatcaacactcccaactgtatccattaataatatctcattctaaccaatatcaaatattattattattaaatataacttgtttttttttttatcttaaaaatatgtgttgactgttgagtgttgggtgtttgttgtaaaacagagtgaaatcatatgtgcacctaatgtgacacttgccttttatcatatatacagtaattttttgatgggtgtgtactaatatatgtgcacgaggtgttgcgtactaatatcatactttgtatttatttcgtatcgtgagatttttaaaattaaatatttagttgaaataaagttaaaaaaaaataaataaaaagatgaggaaacactagtatttttttttacgtgatttaaccgttaacaaacctaaattcatgatgcagcctcagaaacgtttatgaagtttttacatttcaaatgtgtatttctcggattgtgaaccctttacatggagaagataatatcatatttatagacatccatgcttaatgggtcggacagattcaagttgaactaaggtttattataagaaaaagtccattgatggtgtaaaatacattagtttaacatttttgtaagctattgtgctgggtaggtgaggcccaattccaaaaagaaatttgtcataccgtgcatggtactattgacaatgacagctggtgtcgtatgaaaaggcaatgtcagagtagtgctgagttccacaaaaaggtaaccacatttttgccatgagcctttctaaaatctggcagaggggacaggtcaccagattcctcgagatcgtgtcagagaggtgccacgtaagaatcatccgagataatatgttgtcccatatgccctttccactttgattcccgaatggcctttggtggtgtctcggtatgctttgagatattcttgtaaacttcgttggtcaacaatggtataactattgtctcgaaaagctcatgaatcctgagtattatgtggaatccagatacaagatccgaacttatattactcaaggaaaaagtctacctagcagatcttcttggactgattgacaggcccaaaactcattaaatattggctaggtgccacatgtcttttatatggaaacacaaaaaatatttaccccacaacttgttggttttatagtactaaatcagatacgcagcggaattattcgtattaatgattatcattatatcatagtctcaatagatctccagatgtgtatacattaaatcaaaaaaataaattacgtgaaaaaatacatatacctcttgatgactatcagggtatcctcgaaatttctcgtatgttgtatccttttggttgattagaaactcataccgtagtcttccaaattaatccaccacacacaaagaatagtgtggactatcaggataaaggttataatttgttcatgtataattttcaacacatgagcaagaacaatttgagagagaaaatatttttctttttctcctctaggtttttcgaaaatagaatatgaaaagctctctttttgatttctcaaattagacttgtatttatagtagttaattccctattaattaaattatatttaattatttaaataatatctataattgccggttattgatatttcagacgagaaaatatctcaaccaacttgaaatatctttaaccacttttcaaattcaaatatttatctaagttaattaattaacctaaaagacaaaactaatagggacaccctactataggataggcacctaccttgtcttatttaggacaaggatgatgtcttttgtcctgataatttttgtctcaacaaatattgtgttgacaaattttatcttaacaacttttgtcttttccctatttaattaatttaaaaaattatttatttattataaaaataaataattactattttgtcaattctgaatagaatttttttcgaataacattatacaactctttatccctcacttgacagtgtttcaaggtgacgattcgggaactatagacctataattttaagctttaataaactagattatttattgtgtttcatcatcaaaataatcttttgtttattaatttcatgattattctactataaatatagaattgaactcttagtaattataaaattatatttactgagttttactatagtgaccattgatataattgttaatgcaaattttttgttaactaaataattagctttttttttgtaataaataacctgtagaattaattatattgtaattaaatatataaaaagcaataaataataagaaggtttttacgtagttttgaagttaaatttttatagtctacgagtctatcttattaaagattgatgtgtttatatacattttacaatgatattattttttaggaataaataattgtaatattatctattttcctcaagattgaccatcatttgttctttgggctctatccttatttatagatgtacaaggtgacagattttccattggaatctaatcatttgtaactgattatgaaatatggacatttctcacgtagtatctttgtacacatggaataataacaaataactgcctaaccactctttatctttatctataaatggttatgctaactgtgctaaattgttcttgccgtctgaatattatctttcttaaacatcttcgtagaaaaatgttaagtgttgagttatgatgcatcttgtagccttccttagccgttgagagaggaattagcgaggtggttaattcaatgcgtcaaaagagcaaggtgagtgaatgttgaagttgtcttcattccttgagcatactcacgagtatgtggatcaatgagatgcaagctcatactcacaagcatgtggatcaatgagctacaaactcattgtctactcgttctgaacaattttattgtgttttctatttatcccaaggtggacctatttatctcgctggtctcatcaatcaatagttattcctcacgtctcgctattgcctatatggcagtgagtttgagtatttttattaactgtatttcatgaaacgagtcatttaagtacatttaataatgcgtgatttgagctggttcatattccagctttgatacacgtgttattttcttattgttgcctaaaatattggtataacagttgctccctaaaaaatatttttttttaaaaaaaggactttttgaatgcttcaaagggtatgatcatacttttccatttaaattttgcatgcttttattttggttgttcaaaaatttgaggcgaatcatatcaccattaatgctctgattgttcctttctcaactagttctaatccttcaatctcttctttccttgatcgaacggttttcaccgtttgggtataaattttaaaatttccccttacttttgccatttttgcccgtaaaaccttagaactcaaaaatttcttaaccaccttcctctctgagattgcacgccctcactgtcttttgctttctttcttcgaatttcacccgattacaccccacgactttggaatcactaatacccagttttcctgaactcaaagttctcatcgcgaagttgttcaaaacccataatttctcatcaaacaagtaagtgacattcgcttttgctgacttcttgaaaatttcaatcttgaattccctatatgtgtgttaatttgcatttgtaatttgtttgtgtaagttttatatgaatgtttgggtaatttagggcttagaaaatttaaggttacgtgattcgcagg

SEQ ID NO: 378126 - DNA, 3508 bp, Cannabis indica
tttaatctaattttcaaaattgagattttttgaaatatctacattcaaaaaaatgcatttcaaaatctatataaaaatgactattaaaataaaataaaaaatactatgaaaattatcttaagttgatctgaacaagttgacatgctggtctattacccaggggctatcattcaggaccaattgggaagccccttggtgtcctgaagcctcctcctctgaattaatctccttttgataagaacacttagtcatggtttctgtacagaaataagtaaatctaagaatttagctaccctaactacctaacatagaaagggagttgggggccctcccccataaactgcttggagaggtcccaactagactcactatccaaaaataataacttccaggagttagtcgttctagataggaagttaggagcaatacaagaagagagacgacataaactaacatcaaacccaaaactagaagtgttatcccaatttttgcactctgacgtggcatcacatgaatggtgacacgtggaatccacttggaacatctgctcgggaagcatagtccgagcaagatgcctcgctggcatgcccagggaaaagtattcaacaatccgggcagagcgaccaacacttagcaaatttagctttcgcatcgtgagtcatcagcacagtccctataactcagggatcaatttacgtggatatgacatacacacgatcccactatcaatgtattcagcctcaatcccacgatccttgcattcagcattgatcccacgatctttctgtttatatgcattgtaacgagaggggaaactcttcctccacaagcttactagccctataaatagtgatgcatattcactgggcaaaaggtcgaaaaaagcagttgagctaagactataccctaaatatattatctaagaattatacattcaaaaatattgttgtaagagctataagaaaaggaatctttctccttgatcttaagtcaatacaagtaacgaggattaggctattactgaactgcttggctgaacctctttaaaattcatgtgtctttatattgctttatcatatatttgttgctataaatcacttatcgcttataaaatagactcgttgtcgttggctaaaaacgaggtcaacaagaaggattttgggcaaaaaattggccaactttattgttacgtattaatctactacagaaatttctcagtaaaaaaaattcaaagaaaccctaatctcatcctagaacagagcatgcacatacaattcaaaacaacaaatttagaaaatgcattgcataaataacaccaatgtacctgatgttgataaaggagaggttacgttgatcgttgctaggcttggctcaggaagttgattgcacctttcttgaagacaagaagttgcaacaatcaacgagtcaattttttctccaaaatctagggtagtgatctcctttgttgtagtcatcctaatcactagagaaggaagataagggtattctcatgccctaatcctcagtaacaagcaaagatggaggtccacagcgttttttaggttggtgaaaagggactctccttgaaggtaatttgaagttctgggaatggtaagaagacttgtgcgatttgaaagattgaaaatttgaaaaagaagtaaaagtggtaactgaaggtcacttgaggtatttatacctcaagaaagcaatccacatgaagaaggactagacagctatgatcttttcttcacaaacgcgatctctatccaacgattagggagattaacaatctatgtgtattctcatatttaacgctctccagaataaaggtgtgaagtaatgatgaagatgctctttttcattttttgtgtcagtcagtgaacaaccattgaaatgtagctgctcttggaagacgactcctcgatagtcgtgccttgtcacacgcttgactgccacatggacaagccatcattatagatggaagccagcctccgtgctcgaacaatgttcaagatatccttacttcattcttcgatctccacgtgtccaaattaagagatcagagcaagcttccaccatgtgcaacatactgaaagcttggggttgaatgttatctgcatttccggcactagacacgtggattccaggtcagcatttaagaccctttagtgggaccctctcatcaatgataaagtgggccaagtccacctggatatgcctttttgggagttatcttggttccgtactctcagagccttctgccttcatcttaaccgagcctggaagataccttcggtgtcacgagcccggaagggcaagatgttgtgttcctggaacacccttccaatttccctatttatccttgcctataaataaggaaattatagctgtcagaccacgtcagaatgttttatcacgattaaaggggaaacttcccataacaagcgcggtgtagttatttcagaataacttccctaccattagcgaatacagttttgactcgatcaacccaatttcaatctacctagtcagcaaatcgtgttcttcatgggctgagcttcatcaaaaagcccaaagagatggtttaattgtaaactccctagtagagggaaaaggaaaaatgctaatgtaatcctacaactactataactaccccattaatctcatggattaggggttgaattctcttacgtactttgctaaggcaaacatacaaacatacatcctatctatttctcaaagcatttataactaaacagcttacaaaataaagcagactcgtggactaaggctatttagtgccccaaccacataaaaaacctacttgtctcttgctatattttccctttcgattattattacttcaattcttattatttgcattctgtttccaaaaatctcggtaaacaagttaaaattaaaaatcaaaatacacgatagatacagccaaaaacaagtcatggcaacttggcacacatgtcagtagggtcaacatgtacattgctagagaagactgtcacctcatggatgctctaacttttctttgccttcacctgcaccacagagcccccgtgaatcacaaggactcagcaagaaaagtaataaaagataatatatgaaataactatttatttatttcactattataaaatgattaattaataacattcaagagtggataatataactaaccatatgcataaaagtaattgttatcccaatttttgtcctaatgacgtggcatgctcatgtggacagaaccagtgccacatgacgtacagctcactaaacggaagaccaagttagcaccgagcaaacaaagatcccaacactcaaatggagatcaacagaccaactccttcttataagctggacaggccccttggctggtcagcctagggacagcaccatgtgttggaatatattttgatctagatttactaacaagtatgtttttaacatcctaatatgaatttctaaaatgatgaaaataaacaaacaaaaggta

SEQ ID NO: 378127 - DNA, 1434 bp, Cannabis indica
aaaataaaaaaatctctattttatttataacgtatggtttgcataataattattcataaaaggaaataatatgtacttacaaaaaaataataattataaaaaattaataaaaccctcaatacatatgattttaaaattcttgtctattatagaatttatgaagtattattattattataaaaaattcaatttatgaagtattgatttttttaaaaaaaattaaaagtcctattttaatattttatccaagacccccaaactgtttaaaccgatcctcacaagtgtatgtagtttgtattaagtcgctgtatatctcggtcactcttaatttctctattattttctaatattttttattttctaactttgaaaaagagatttctttgtgagaagaacttgtgttaagcttagctcttagcattatgttatggtgtgctctatatattatttttcttgtgattatttttgctggttgcttaaacttttggatgtgtctatcaagttttgggaaacgaattgtttgaattgtgagacattttttgaaaggaaaaaagtgcatatttgaagggatttcaagacagtaatgttttagaagattgattagaagattggattacaaagtctttatttatacaattcaatttttggttttataatcattcaatattcttttaataaattttattctcaagcatgaactcgtagtatttgtaaaaatactaataccacataaaaatttatttgttatttgttttatgttcattttatattctctatgataatcaatttaatcacaacgagtttttgtttgaatatttcattcacaacactacaacaattaattttttaatttcattaaataaaacttagtaataataaataacaaaatttcaaaatatttcacatttttggtaaaataggaagaaaggtcattgtaaagtgataaaaaaaattatacgaactaatttttattattttatttgatttctatctgtattttcattcttaatactcccagcaaaacacactttaaattttatttaaattttttaataaatctaacattatttttgtgaaacatttagaagagcatagagttataatagataaatattaaagggaacttaaaaatatagcaaagatcgatgtatgccataatttagtcagtaattaatatagaatacacctcttaaccttaaccttaaagtgtcactccttacaatttaataagttatctatatttttttaatctaattttgaaagtttttttttttgaaattttcacaccaaaaatacaaaatacacactttattacatatatatcttcgcacggttaaactaacatttatactcattaactttattttattacacttttaccacttgcacacacaatccatgcagccatacacgtcattgattgatgacttatat

SEQ ID NO: 378128 - DNA, 2565 bp, Cannabis indica
gatgatagcctcattttttgttcagctgagagagagtcttgtctagctcttaggaatgccctctccatttattctagagcttcaggacaggttgttaactttgttaaatcttcgattttgttctccctcaatacgattgatgatattcggtctcttttcttcaacacttttaatcttgaaaacaggccttttatttgtaaatatcttggtcatcctcagtgtcttacaatatccaaatatcaatgttttgcttttcttaaagataaggtttcttctgttattcattcgtggtataataagtggttttctcgtgttggtaaggaggttcttttgaaagtcgtcattcaagctattccttcctatgttgcctattaaaatttgtaggtatattgaagttgtgatgtccaaattctagtgggttcttttgggaattctaggaaagtgcaatggaaaaataggagatttctttgtcaatccaaatttgttgggggtcttgggtttagatctttggttcacttcaatcaagccatgttagctaaacaaacttgtaaagttaaaaacccttactcttagcttagtatgatcttaaaagctttatatttttccaactcttccattcttgaagctgtccttggtcataattcgtctttctcttggagaagtattttatggggaagagatttattggttaagggtctaatttggaaagttggtgatggtaatatgataaagacccttgatgatcattagatccctggtagtatatacaaatcttttacttccacctactccctgcctccaattatgtttcctttttcatttcttctgctggagcttgggatttaaatatgctttgtagatactttgatgaagccactgtgaaattttgaaagttcttattggtagtgataattgtaatgatgctttaatttggggcaaaaataactctaggaatttttctgttaaatcagcctaccatcttgttctttcttctaggtataatccttctagctctttctttattgatactaaaaagttttgggttaatatttggagttcttttgcccctcctaaagtaaacactttatttggagagttgtgtctcaccctatccctttgcaaactctcttttccacagacatattatctattctccctttgtgtccttgttgtaatctttcatttgaatctatatctcatgctcttttggaatgctctagagctaagaaagcttggaagtactctaatttttatgattattataatagtaataaacattataaaatttcagattttattcatattgcttctgttaattttaataaggatacttaatctcgatttttttgctttttttaggctatatggaatcagaggagttatattttttataataagcctacaatacattgttttgtcctgtttgaccggacaatctcttacttgcatacaatcatatgcagatgctcaacaaggtcttctggataagaaaaggctggttgtatcttctcatctttgtcctcagcagttatcctaggattgttgaaaaatcaacactgatgcaactattgatacaaaaaaaggaagtttagttaagtgtggtggtcactaattctcaaaataatgtcagtactaaggttaaagccattctgttggctttaaattcggttcgacttgttcggatgcatgttgctttgttgtaattggttttcaagtggttgtagagaaactttagtaaaataagtagtaagcttaagtctgttcttggagatgttttaaatagtattcaacactcattatctttcagttcaggtcttttagtttcttatgtccctagaatacagaataatattgctcataattgtgctaaatcaggccttggattagatgatgagtttatttaaaatagttctttaccttccttgtaatgcatgttgctttgtactcttttctcaatctattgaagttaacaggttaatcaaaaaaaaaaaattgcttatcagttgaatgtatctttttatggtatccctaacttgttgattacgacttttcttattcctctcaaactaaattattcaagccatttctaatatttcactatatgaaaacttcttttttttaaaaagatttcagagatatatggtagaaatgtgttttgtaatgtttttatgatgttgtgctgtaagttttttttgttattttcatattgttttttataatgttttgtaaaattgtaattaaaagaatgaaatattgtaaaatccaaagaaagattttgcaagaaagtaaacaatatatatatagtagaatctctatttaagaatactctattcaagaataaactctaatttgttataaaaaaatcaagtcccaatttggaccaattatatataagaataacctctaaattgtaattagttatacattttctaagtcccgtattaacacggtatacctctagataagaataattacacatcttaataaaatatatacatatattttgtaaatttatttatgtcaaattaatttttttattttaaattataatacatgtatgaacat

SEQ ID NO: 378129 - DNA, 5340 bp, Cannabis indica
gaaatcacctatatgagtgtggactggggtcgctccaatgagattctggcataatttctagagcactcgtgaattaccaggcacgtgcatgacctatttgcgcaacaccgcgccaaacagcaaaaattatgggggtgtgattgataagattataatttatattaaagagtattggttcatagaagctaaatgtttcaccaatattttatcaattgtatcttatttttctagaactggttcatagtctaaaagataccaaattcgaagcattttacactcatatattttacccaacaatattaattttttatagactttcttttgaaatatgtggaggattgttgtaagatatagatatatgtgtatatttataatattatgtgtatatatttcaaaagaaaggaacgtggctcattccatttgttgacttggctgtatatttgaaagatataacattcctattattttgccacttgatccacttttttctcaaaatcaagagcaactttaatttttggtttaacaatactatttgggttttcacattaatgtttaacagaatatcctattatttaacagaatattcgttattaattttataatattattatatatatgtgtaaaaataaaaattatatagttattttatataaaaaaaatttaatttaaatttaaaatagttaaaataggatagatatttttaatcatacttttaaatttttaatttaaattgaaaataattaaaatattgtagatatttttaatcatattttgaaatttattggtttaactttaaattaaaataaaaaaattatgtagatattttatacaaacaaaaaaattaaatttaaaatattaaaaatattttaaccatatttttaatttttttattatttattttatattttaaattaaaatattgtaataaggaattgattgtttttgttttagttatagtaaaccgattcacaaattatatttttcgtaaagtttgagaataaaaaatctttacatcaaatttatgaattctgtctatatatatagacaccctcaaatttgattatgtgagttttggttaagaatatagtaaattacattcaaatggcacactaatgtagcaatagctaaaaaaaatgtagcattatcagatacgttatctaattaaaaaaaaattaaaaatttaaaaaatacgtatttttttttttttttgaaagaacctcagttcatattaaattgaaaaaactagagagctgggattcacagggggaaatccctccccagttgaaaactggcaatcagccaaacaaactctagccgacttggctaagtcatctactacagtaaaatgttctcttctaacaaaaacaacaaaacaagcagaaaaaacagaaagttttcctaaaattaaagaaaaaagagcagaacatttccaatccggggtgttctttgatcggatggcctccaccagcaccttcgaatcagaaataatggtgagattatcccattgttgcatctcggcccattgcaaactcaaaagaacagcctgcatctcagcctctagagcggaatcccccacaccagaagagataccgtgccaccactccatagaagacatatccatggccaccatagcacaaccgtactttccttccttgaaggaaccatccaccataacagtcttggtggttgtgattctcgactgggactccctttcggtgtaggtagaccgactatcattctccccaacaatcagttgaatctcggccaacctgctggagatttcccctcttagcaagttcacattcggcacataattctcagtgtggaacactttgttcctagtattccaaatgcaatccagaatcactccaatacagttgatgaaattgggacgattagtgtgatcaatcgaactacagaggttacgcataacttccttcatattagtacccatcaccctatcgattctgataggccaggggctagaaaaccataaagccagggcaatactacatttggtaaagagatgcaaaggtgactcaggggcagtatggcataaagggcagaaatttacctccacagacggaaatttgtccccagtaggcaaaacattcgaacaaactctccatagaagcaaactcaacctagggtgtatcttagagttccaaatccatctccacaagtcttctttttcaccaaaccgctcttgttgttcaacccaataggcaccctttacactgaactttcccaccaatgaattcttccaaataagagtatctgtggaagcattcacattgatttgtattcccccgatcttggtgcccatatcactgccaaacagataccggagataacccaaattccacttcctggtacttctatacatcaaatccgccaccgattgcatactaggagcctttgaccgaatgctttccatcaattctcggaattgaacatagtccaaccatggaatccatggctgccaccaaacatccacatcttcgcccgtagcaagaacagaacacgcccccttggctattgtatttctagctctaaggataccacgccataaaaaactgtcagtgggcttttcttggacactccaaaaggattcacgcggaaagtattttcctttcataatatcacaccaaggccgattgatcccacaagccaacatccaggcaagtttggctagtaaggcatggttaatatcttcgaaacgccgaaacccgaggccccccaacattttgggttgacaaatagaattccacgacttcgcagcccacatatactgattgtcaagagagccattccaccaaaattttctaactatagcatccaattcacggcaggaggagaggggaattttgaatgtggacatggcatagttgggaagggccaaagctactgaatttatgtataccaatctaccggccttagacaaggacttgagtttccaaccttcgagtctctccaccaatttagatttaagaaagtgaaaatccttccttttgcttcggccaaagataaagggattacccaggtgcttctccgagtctgatatcacactcatatccagcttgttctcaatggcttccttgagcgaatttgaacaattgcccgagaaaagaattccagatttctgtttgctacacttctgcccagaccactcttcaaattgttgaatgcaatcattcaaagtctctatatcccggagattagctcgggaaaatataatggtatcgtccgcaaacataagatgagataaagctggaacattgcgagccaccttgataccatgtagcctacctctgtcttgttctaaagagaggagccgagagagtacttcattgcaaagaaggaatagatacggggacatgggatctccttgtcgaatgccccgttccggcttgaagcgtttcaagggcttcccattgagaagaatggaataggatactgttgtcacacaacacatcaccaaattgatgaagtgagtagagaaaccgaatcgttccataacagccttcaaaaacccccattccaagcggtcatacgctttgttcatgtccattttaatggctagaagaccccctttccctttctttttcttgataacattcacgacctcctgagtaagtaaggttgactcggctatccaccttccagggaggaaagccgattgtgtaggagcaataagatgatcaagaaccactttcagacgatgcgccaaaatgcgagctataaccttgtatacaaaattacataaggcaataggccgatatcgctccacacaatccggattggtacctttcgggataaggcagatgaaagaatgattaagactcggatccagagttccagaagcaaagaaacgctgaatgctcttgactacatcatctccaacaaagtgccagcatttgcggtagaaacatcccgaaaggccatccgggccaggcgccttgaggggatgcattaggaaaacatgggacctgatttcctcctgatcaggaatcgccgtgagcatgttattctcgtagtgagaaatcgagttgcttatcaagacatcaagaccatcataagaaacctgacctttagatgaaaagagatcaataaaatactcattgaggatcgtaccaatctccttgacattcgaacataacattccattggaatttttcagattccatatttgatttctcttcctccgcaccatggtggacgcatgaaaaaaggaagagtttctgtcgcctttggacagccataattctctggaacgttgcttccacatggactccttacgtctccataactcgcccaaatttttaagaatgtcctcctcagccacctcatccgtttcatgcacctctttggattgaagagtttggagctcaaattctaattccttaatcttgttatcacagtccccaaaaacattcttactccaccaccgaagagcactttgagttctattgatgcttttcccaatactccccctatcattctcttggttatccctacaccacgcctccttgataacttcccagcaagaagggtcctcaaaccaagcttcgaagaacctgaagggtctgaatcctttagtcttacacatgatagagtcaaaaaccatcgccccatggtcggaagaagtgattggcagattacgaaccccccctctgggcacacagttaaccaattggtatccacgatcacacggtctaatctttcctttactaacccgccattcttacgcttattcaaccaagtgtatttgcaaccactatacccaagatcaatacttccagtagaacgaaggaaattctgaaggatagcaccatccctgtgagtaaaggaacgcccccccgatttatcctctctattcaaaagagtattgagatcacccatgagggcccaaggaccatcaaacgaattggcaagattcgagagatgttcccaaaattccctcttatgctcgtcatacggagtcccataaactgctaacatcccccaaatacttgaaatctcatgatcattgacagtacacacaaaaccatactcaagactctccaacaccttaatatcaacattcctgttccacagcagacaaacacctcccgcccgtcccacagaaggaacaaaagcaccattctcgaattgcagagaattacaaatcgacttcatttgactagtaccaatcttagtttccattagaaatacacaatccaccttccacttccaaacccaagcctttagagcttggattgccgccggtctcgaaaggccgcggcagttccaagaaaggaacctcattggggatgggggggcttgataagggccgcctcc

SEQ ID NO: 378130 - DNA, 3072 bp, Cannabis indica
attgccaaataatattgagttcctatcataccacaaccaccaatgggttgtcatcatcacttcaaaaagcctcacgagatagcttgtcaaagagtaataggagaatttcctgcattggcccatatgcacattgacggagcaccgaacacaccccaaccaatgccacacttgagtcaaaccaaaacagaaaaatagagcatgtgcaggagtttcagcttcttctccacaccgagaatagcaaagaggtacccgaactttttgggaggtaaattatgttgctacagataaagctaaatggaacatacgccaaacaaatactttcacctttggtggcagattgagatcccatactccattctaccaaaccatgtgtattatttaaataaaaataattaataaaatttaaaatattttaaatactaaaaataaattttttattaagatatatcatttattataaatcatttttttagtgaatcagatgactatgtattcattccacaacttgttatatacaaattgttgacggtaaaaattcgtcaacgaaataacaaagatttaaaataatgtttagagatcttgattgaaaaatgcttaaaaaaatctcacaaccttttatctttagaagtattaatgtttattcaccagctggagtccttttacaatgaattcaaggtctctatttatagtgagcccttgacactttacaaccttactaaatccctcatccataggatgtggaatcactatcacacctgacatgacgttgtctcttaggtgatctgatatacctgacatccaaagttacactaaaaatgcctatttcattttgtacctcggatgaaatgaactttgtccccattatctatactccttgtgccatcattttcttgtctgatactttcttgcttagactgttggtgtcagaagactggcacggggagcgggcacgaggatgtgcaggtgcgagggtatgtgggtgtagcgcggggtgcacgggcgcgaggcgtgggtgcggggcgggcggcgcagggcacgcggcgcgcgggttcaagggtgcaggcacgcgggagcgaggcgaggggtgtgcgggcgcgaggtgcggggaagcgagatgtgggcgcgggcgcgcggtcgcgaggcacgggacgctcagcacggcgtggggctccctttggcgaacttttcgagcataacactaatgactacaaatattacacttagtaatctttaggggtcaacacaaactaacgacactctgacccactaaatttcagggccagccctagtggatgaaccaatgtctgatctatttatagagtttttgagaaccaagcatgaaaaacacatcccacaagtttagtggttgttactagccatgtaagagtgagttaaggagcaaaaattcattggcaaagaagtaaaaaccgtttcctattgattgcataacattttgcaatgtttattccaaaaaggctctaggcaacatatcgcttggagctataccaaaaaatcctttgagatatgtcgctacacgtcaaaaaactccctaaaactattttaggcgacatgtcgctcagtgagtagcaacatatcgccggagagagtttttagaatcaattttgaagtttcaaaaacttcttcgagtcaaccttgatttcaaacattccaaaaatattcaactaatataaatctatttttaacacttagaaacttccaatttgaatgcataaatcccaagtgtaattatactcttaactacacatttctaatcaagattcatacgtattcataagttagaaatctaaatatttagatttataacttattataacttatatatatcatatattattcacttaataatatatagtataaccaaatttaatctcaataatatattatataaataatataacaatgctattatttcattttgtataataattagagtggagaccaaataatttgagtacgaccgacataatcagattgtgtgcgggagcagtgacgaattaacgtgaatgagattttatagaagtactatataatattaattaattaacttataattattaacgacaaaaaagcgataccataggcatagctaatattagtgaaaccattacctattaaattgtggtaactggtaaaatgtactcccttattacacacattaattaatttttatctatagcatcactatataaatcgatgctataataaaataaatacaaaccacttatctttgtcgtttaggttttttttcatacaaatttttttacttttttatatactattatttgataattttttaaattttttattggcactttaacatgttcaaagtcatattaatgtaatatataataattagttagtaattttttttatcttttgtgttttattttttttaattttttgtactattattgtcatgtagcacttaaggtcctcggtaccatactaatttacatacacaatattaaattaaaatttttaggagctgatattaaaatacaccaacgacgatatgtgttcttttgtggtgcttttacacctaaatgtgtactttaatatttttggtattaatatgtacatatatttataaataactgaaataaccgtgagtcgagcttctctctaatgacgattgtacatgtcttgacgatcttcggtatacaaacctgacagctctgataccaaaaatgtaacgccctgatacttagacgcgctacagtagtgattttccagttactgtgccacctttgctaaaagggttttttttgaaaatcgtgacaaattaaaacttttgatttaattgctaaactttataaactttcatacatttatttacaaaagccgcgatcctatatttaaacttttacagcattatcaaaatatatttataatatggtcgcacagagactacaaaatagaatctcaaatgtcccaagaccgaatgctccaggttgcgatgccatgacatgtacgatcactacccaagcttggagctcactcatgttcagccttcgcctttcctttacctacacatggaagtagcaactgtga

SEQ ID NO: 378131 - DNA, 4613 bp, Cannabis indica
aaatttacaaaaattagtagtttatgcaattatctaatttttttataatagaaaagccttaacaataggaaacttctttgatatagagtaaaacttttacaaaatagagaaatggataaatagagctcaaattgttgttactgaatatatatatatgccaatacaagatcattctagaaaagggacatatcattacacagaatacaagacataacaataaaggaaatattccctaaaacaataataggaaaagattctctctactatacaatgattgttcaatcatgagctgtcaggtgcctcttcgaattccaggtattgagagggacgagtgacagggctaccacttggctgctgagttggacaggtaacaagtcactagtaaccatttcaattcttaacacattccctcaaactaagtgaggattaaaccacgcctagtttgtcagtaaggaattgaaaatgggtactattgagacttttggttaaacaatcagccacttgatcatgtgaggggacataccgaacttccaattatttgttgagtattttatctctaacaaaatgcacaacaagctcaatgtgttttgttctagtatggtaaaccgaattagacgccaaagcactagctcccaagttgtcacaccaagtgattggtgttgcagccagaggaaaattgatctcgtgtagtagggactgaatccaagtcatctcagcagcaacttgagcaagtgctctatattctgattctgtgcttgatctagacactacaacttgcttcttagatgaccaagatatcatggtatcacctagatagacacagtaccctgctgttgaccttctctcattaggcaacttgcccaatctgcatcagagaatccccttaagtcaagcctgtcactgaccttgatatgcagcccgtgaaacagagttcctttaagataccttagtatgcgtttggctgcattccaatgtgttgatgtaggggcttggagaaattggcttagcttattaacaacaaagcttaagtctggtcttgtatgagtgaggtactaaagggctccaatgagacttctatactctgctagattttctaacagttctccatcagaaatagagagtgttttctcaacagtcataggagttgaacatggtttcaagtgttgcatacttgttctttcaagcaaatcacgaacatttttggtttgacttatgtagattcctatctcatctttctatgccgaggaagtactgtaaagtacctaggtctttaagagcaaactcctgatttaattttggagcaaattattttaacttggttgaattgtttccaataatgattatatcatcgacataaatcaataccagaattatatcttgacttgtctggttgcaaaataatgaggaatctactcttgaattgacaaatttccatatgataagtgtgtgtttcaacttctcaaaccaagcacgtggtgcttgtttgaggccatataaagacttgagaatttgacacacatgtgttggtttacttgggtcaatgaatccctctggttgctgcataaacactttctcctatagttgacctttcaagaatgcattgttaacatctaactgatgaaattcccatcctttaaacactgctattgtgagaaaaattctcattgttgatgctttcacaacagggttgtatgtctcaccatagtctaatctaggtttctaattaaacccctttgcaacaaagcgtgccttaaacttttgaaaagaaccatctacatttcttttctctttaaagacccacttgttacatatgacattcatttcaggtgtgcgagggataaggatccaggttctattttgaacaagagcatgattttcatcattcatggaagttgtccatcatgggtgaagaagagcttctgagacagaaattggttctccaagaatgagtgggcacttagatgctgcaccaaggtaagctttaggttcgaagacatttgcttttccctggtgatcatggggtgagtaggaacaagaggtcttgggacaaaaatctcatgatcaataatagtgtgagtatcaataggtgactgatcaacaatgtcatcatctaaattaaagggaacaggtgaatgaatctgaggtcacatatgggacagaatcagcatgtgattcaagagcagaatcagctaaagatggagcttaaagagttgttgtagagagagatggtgatgaagttgtcgcagaatggttaggagagataggagaggtgtttgtttgtgtagaaaagacattaggtaacaacccagatcaagagggaacagagacttgcactggttttccagaatggaaagtgttaaggaagccatattgaaaaggaaattcatcttcattgaagatgacatttctagaaatataaagtctacctttgctgctcaagcacttgtaacctgtgtggctgtcattgtagccaagattgacacactttgtggagtggtattggaacttgtgtgtttgttatggtctgaggcatgggtaacaactacacctagagactttaagaaacttataatctggtttcttacctaacaagatctcaaatggtgagatatttcctaacactggtgttggatgcctattaatcaaatacacaaatgtttggaaggaatcccaccaatatttttgaggaatacgggcttgagcaaggagggttagacccatctctacaatatgcctatgtttctctcaactctaccattttgagctgaagtatgagggcaagaatgttggaaatcaatccctttttcaacaaccaaatcactaaaagccttatattcacctccccagtcagttttaagttgcttaattttcctatcaaattgattttcaacaagggtttgaaactgaacaaaagcttgcaatgcctcacccttgtttttaagatgatatatccaggtatatctgttgtgatcatcaataaaatggatgtaaaatctatagttggtgttagacataatgggtgaggtccccaaatgtctgtgtgaatgatatctagaggaactttggcacgatttgaattcaaggagtaaggtaaactatgggattttctcatttgacatgctttacaaaaaatttcctgctcatgtttaaaagacttttcattgatagaatttaacacaagatgcaacacacgattggatggatggcctaacttcctatgccatctatccttgattgaatttaaaggcttctaaatagaagattgttttacattagactgacttaaacaaaaacagtagaacaggtttaaaaactttagaggttgaaacatggcaactgtgacattgagcatgtgagttatttgatgaagaaaaatggtagagtcccatctctaagcctcctctaaagcaccaccttctgtgtttccttgtccttcacaaaacaataagcagatgtgaattcaacaatgacattattgtctttggttagtttagaaatgctaattaggtttttagtaatttcaagtacatgtagcatttctttcaagactaaagcgttgtaattacttataggcaacaaaccagatccaatatgagctattgtaagtttagatccatcacctactgttaaaatttccttatccaagtacttggtcttttgctgcatattgttcacattagcagttgtgtggttgctaggttctgtatcagcaaaccagatcattatcaaccatttcaaaagcaggaacaaaggcactgtgtttagagggttgctgctagatcctagtgaaccagctggagctgtacccatataggtttcatcatacctattataacattaggctacaaaatggccatatcaaccaaacacctgacatgtgggtttaggaccattagatcgacctcctctttctcttctacatgttcttcctctgttattgttattgttgccactattatgtccacctctgttgtttccatggtgattcgaaccacaaccaaatccaaggttgttccctttgttagcatagttagtattgggggaaattggtccagtaggttgtttcaaatatcctgagagagtagttagtctctccattttgttgtcacaacttaggagcatgtcatgaagttcttaccaagtggtagcaggcctggactcaattaggagaaccagaggcagatattctatatccaaaccagataaaatgttagcaactaactaagattcaggatagggttcacttgaagagctaagacatatgcccactgcctcttttgtttgaggtattccaccatggtagcagatcccttcttgtgtgtttggattttggttctgtactcatccatcttggtttttgagtgagcaccatagagagcttctaaggcacgccataactcagcagaggattgacaacccataacctctcttgctataggactgagcataaaatctaaaaaactgttcaaatcgacttaccaaataccgttggaaccaaaattgacggaaccaaaaatcaaaaaaattgctaacagttaaaatcgacattgaacagtcggtttttttggtaataaaccgaccgttataaatatatattaatttattatattttt

SEQ ID NO: 378132 - DNA, 5423 bp, Cannabis indica
acttgtagccaacatctaagatagcacggagacctcataattaccatcatgataacatacgtacttatcaagtttcatatcatcatataacacactcaacactcgtagtaatctctccattgccacatcaggcgatcctcttactgaaaattcatgaaccatcccatcaatttcaatcatgctgcagcctacaacttccttttttattcctgtgtcttccatcaatgttctaatgctctttgcatctttaaatctacaagatttggcatatatatcacacaaattcacgtagaaagcatgattcagaggttccaaatcaattaaatacttggccaccctttctcctaattcttctttcccatgcatttgacagcctccaagtaatgctccccaaacaaatacatctggcttcatgggcatgtcccttataaccctttctgcctcgtcaaatagccctgctcggccaagtatatcaaccaaacatgcatagtgatggacctgtggctcaattaagtgaacacgtttcatcacatcaaaacaccagcgacctttctcgacaaaaccagcatgagaacaagctgacagtagcccaacaaacgttacatggttggtttcaccccagtcatttccatctctccaaacagatcaaaagcctctgtactgaatccatggagagctaatactgaaatcattgcggtatatgccaaagtatccttctctggcatttccttgaaaaccatacaagctcgttcaatgcttccacatttaccatacatgtcaaccagagctgtaccaatcaccacatcacactccacaccacacctactcatataattatgcacccattttccatgatcaatggaaccaagatgagcgcaagcagcaagaacaccggctaaagtaaacttatcgggtctaaccatatcactgcttactatctgcatttcatggaaaagttgcaatgcctcctttggccgaccaccttgaacaaaccctccaatgattgaattccaagtgactatgttcttgttattcatcatcctaaacagatccagtgcctcctctagacccccacttctcagatacccaacgatgattgagttccaagaaacaacatctcttttaagcatttcatcaaacagtactcgagcagtactcaaaaaaccacatgcagaatacagatttatcaatgaattctgcacataagtatcttcgtagaacccatatctaataatttgacaatgtatactcctaccggtgccactatctaccctcttagcacattccttgacaagaaatgggaaagtgagacaatttggcaaaatcccatcgcaaagcatagatttatacagcagcaaagacttgaaagaataagtcttatcccaaccaaagtctttactggcgtaggctctgatcattatgttatacacatgaagatttgggttctcaatgacccggaaaacatcagcagcatagctgagagaacccgtgtgtgaaatggcgcaaaagaaaaggagacgggaagtgagcaaaaattggtcagtttgctgtatgaatggagattttatgatttgggtgtggatttgtttaagctctctcatgttcttgcattcttcgattagtcgtaatattgcattcttaagatttagcctttgaccttcaatcatactcaacattaatcctttggctccaaagtccaaattacagaaagtttcaggtgatacctgttttagctggtggttcagtaaacacacccaattagtatttcttgcttttttccttcatgagttctcataccccttcagaaaaaattagtacaccaactaatgacaaaatttacatgtttcttcatttattgtcagtcaaaatttgtcccaaaaaaatatctgagagcatgtcaggatctcgattacacttgaaataatacaatatacacttaccctcatcaagaggtacgtttcacggaaaaaaacaaaacctgaaagctgagaaatttcaattttcaacccgtacaacttacaagggatctttttctttcttttgccttttttttttttttactttttgcttaaagaaaaccttcgacccctcttccatctctggtatttttgtatatagtaagggcctcttccatgaccttggcttgagccagcaacagagctctcttctttcctgatggatgagtcgaaagataatctcttaaagcagattctccagtaaccttgcccaacttctcatacacctttggtgccactctagggtcatacccagctgaagcgatcaatagtagtccaatataatcagcttccgtttccatcctaattaatacacacaaaattcaatgattggcaagggaagtaacttgaacaatatcttggattgcattaacatcaaaaaaagaaaacgaataaaaaagtagattccaatgaaatcatgtttataaccaaagctgttttgttagcctaatacactattgatctaatctaatacttagaaagaattagaatataggtaatttattgatatcaacaaagaattacaaagttccaaattttccgagacagtttggtatctacacagaaagtatttcactttcttcaacacaaattctcactgatccctctaggaagataggactagcctttataaagacagccactaactgaaaacaaataaaagaaagctaactaactaactagcaagtagcaatacaatcagccctataggaacttaagcttgaactaactctctaactaacttgtgacttattcttacacctgcatatgttaggcgtgtaagcatatatttgaggcctaacatagcctaaaaactatgttccaaaatttgattgcaaccttaaaagaagagaatcaaaagaccatcttcaaaacaaacattcatagtttccaacgtttttaacagcagaatcagagcatgctaacaacctttgtgtgtgtgaatcaattaattatatataaaacactttaactaaaatcttgccaaggcagtccatgttttaccaatattgttagaactcttagtgctgaaaattcacatgataagatgaccaaaattcccaacatgttatttactgcctgaaacaacttggattaatgttaatgtggctacactgcttcaaatctgtacaatacacaactttaagtactaacatcttaccaaaaaaagaaaaaaacttttagtactaacaatgccacattttcccctcaccctttgtctaacagtacagaagtttatcattcttaagaagcttctcatcaattcttgtccaagtagcaggcccagtgactgagtgacatgaatgaaatgcaatgaccagataaaaaatatatggaatgaagggtaaacaaaaccagcaatgcagatgcttttaaaagacaactccattattatgtacagtaagcacacaaattgcacgagaaacaagtacattaaaactcactagtaacacaatttgtgcaattgaaaggcaaaaagaaaaattgttagacaacaaacagaagtaatgcataagaaacaaccaaaactattcttgaagtgctaattgtacattaacaacaatttaacttttccaacaaaaattcatcaaaatgagagacgcttccacatataagagtcgcagctgcaacaagaatcttccataaaatagctatcacatccaaaagaaaactataacaatgtacttaccttcgagaaaaaggaagcctcaagaataatgctgacatggtgttgacaatatcaggcataacaaactgataaagcaccaattgcaggatggcaaaccataagttcttcgtaataccctctgcagcatgtctagccacagcatgcccaacctagacattcaatcaacaaattacatcagctgaataagctactaaagaactgaagagtatgaagtataaattactcatacctcatggccaattatagttgctatctcggcgtcacttctaaaatgctcaagcaatcctgtaaagactacaattttcccacctggcaaacagaaagcattaacaacaggctcgtccaccacaagaacttcccaattcaatccctctaaatgggaagtagcagattgagaccctctttcttgacccttcttcctagtctcctcaaaccatttatcatcaagaatctcatcatcacggaaccacttctcttccactttcccctctccaccactttccttgagagccatcaacgtatcgtgcccactttcctcctggggtgtcccaagactctcggacgcatagcccaagtcactccacacttgttcatgacgtaatcctttctgcaacgcctttattatgtcgtttgctatcaaccgaactcgaacactctctgggtgtattgccggcaatatcttccccttaaaagcacccttcatctgatcaaattgggcctctccgagccttctctccattgatctcgacaaaagcacgaaatgggttctcttggtgtaagggatagactctaaattcccaaaataaactgtaattagagcccccgaacccaccacagccacaatcaaaacggttcttggattctgaaaccaccgccgaggaccccgtggcctaaaatgctgaacttggtaccgatcaacatagtaacatctcttagcgccgctgagaaagggattattacacttacttctacctaatcccatgtgcgaaaccgatttctgagaaatcgttgaatatgagcaaaacccaaacaatttagcactattccgtgctagaatcgaagacccagtttgagaaatcttcgaagtgggcagttgagtaaggggagcattggaaagaatcttggaaccacaacggtgaaagccatcaagcgcaagcttggctcttctgtaatatgccatgatcttggaagttgaagtgcaatccaaaggctttttttttatataggaaagttatatagaactaggcatgacaatgaataacatatgaggaaagaatatcaaacgcagccgaggaggaaaaggacaagttaagggaaaactctcatgaaaaaatttactaagtgggaacaaacatgtcggtagttggatgcggagtagtcttgagaggtgtctggagcaaaagagtaattgcttgggcttttatatttgaccggtggcgagaggggcagacttcaagctgaatgcgctgacacgttggctccgggcaactgccttgagcctcaagttaaactttctggttgcaagaatcgaaaaagcaaaccaattcaatgtcttattcgtgtttttgaggcattttatagtgtatttatttgcagctttgctataaaagtttttaaatcatatctatatatctattctatataaaacttagtaaacaaatatatttaaaaaaaattaaattatatatataattaatgggaagttctaatgtagggcc

SEQ ID NO: 378133 - DNA, 3093 bp, Cannabis indica
tgatagttgttctgctattctttggtgatgagtttgtgtgtctttgagattacttttatgtaaagttaattctaaagtgaagagcataaagaacatataaagaacaatcttcgggagaaggttcatcaaagtcttgcttctagaggaagcaagcacgactatcttcgggagaaattttttctaaaagacttgctttgagaggaagtaagcaccgctatcttcaggaattaagtaccgctatcttcaggagaagatttctacaagtcttgctttgagaggaagcaaagcaccgctatcttcgggagaagatttctacaagtcttgcattgggaggaagcaagcattcatcaagtaatttgaagggagttcaaaccttggtgtcttaaggagattcattcagcaaatatgagtacatcaagcttgcggtaaaatcattagaggaagtctatgttttgtttaagtcaattactttgtacttgttgaaatttgactaatgaatcttatctctgggcaaggcccctggactattagcgatcaacatgaattgttgatactacgtacaaaatatcgtgtgttattttaatttttgtaattttactatttttgcagtatatttctgatatattaggtttggttatattaggtttggtttttgatagagcaggttttaattttattcaaataattttatagcagttccacattaattaaatcatttaataatttcatttagtaatattaaaaacgaaatttcaacgttgttagggtttttcattcctacggagaatttttttcacaatcttcaactttgttactccatagaggctagagtagaagtgaaaagagatgtgggcttcttaactaacaaatggtaataaaatgggccataaatagaaaggtcccttgtttgtgtagttgcaaaactaaattgtgggcacttatgttataacttttgcaagcattctttaagttcctgcaaaattaatccaatttgttcacacaattgatgtattgcagtactcgaatttattaatgttgcgtattaataattagttatgcatgaaatgcgcttgggaaagaattaattcttgtagtaactattatgcctataaaaatattagtttgcggtttaattttaataatgttaattgtaggggcaaagcaatactctttacaaaagttagaggcaaatccactagttaatgtttcctataaaatgatgagaacatgatattttttttttttggagaaacatgaccatagtttttgtgtttattaatgttgatgatttttccatcaagagggttgtggcacgaggatgtggtggaatgaatgggaaagagttgaataacaatgaagatggaagttaatttgagaaagagaggcaaaagaatcattggacacaacatggatagagtgacatacgtacaacatttccaaagacagatgaaccctttgtgatgactataataatatagccaagaaacacagaagattaattaattgagaaggaaattcaaagcatcaaagattcaaagtactaacttattcaccacttgaggctagctcaagtggccatatgagggtgcgtgtgtgttgaagatcctaggttcgagtcccagattatgcattgacaacacgcttaaatcaaaaaaacaaaacaaaaaaaaaagaaaaaacttattcccattggaccaccaattaccaagagcatatagagctcacgtcagccctaggctgaaaatcttctaacaagacattcaacaagctttcttaatttcttcttagtttcctatatattaagctttgatttgtttgaccgtagtcatcaaccatgacgatatagtccatgtacttgtaatcataaatatatgaaaataatgatgatttccttaattatagctatatatgttcaacgcataagatagaagaaaagaaaagatcaaacgataataaactgaggttaagatacagggaactaggactatgattacttatatccaagattccaaatgaccaaatgcttgttgacgattgggactaggattaataatctacttctcccaaaatagttcgatttgtataagattattcatctcaactaaaagtataggagtatttatttatcatacatgttaatttattttatttaaaataaacaaaaaataattatgtaaataaaataatggccatgtattaataaattgtaccttttattttgtttatacacttttcaagttttcaacatcagtttatgttttgaaaaatatagaggtggtttagttgtgtttttagtttttttaaaattgtgtttttaaaattttaaataaaaaactgttttttatcatttcaaataaaaaaaactgttttttatcattacccccttcatttgcatggttcctgtagccgagaacattcaagtgtcaaagagaacttttaggttcgaaaattcatggttaaaggagccaatttgttttaaagttgttgaagatagctgggatttgtctacctgtctccctattactgaaaaaataagagattgtggcaatgctctgcttgactggggaaaagactataccggtaactttggaaaaagaataaaagattgcaaagctgagattaagacttggaagaaagggcgtgacactaactctgttgcttgttataaagctgccgagttgaagttgaataatctctacttgcaaagagaaatattctggaagcagagaagtaagcagttatggttacgagagagcgatcgtaactccaagtatttccatgccaaagcaacatcacgaagacgatcgaacttaattcagaagctgaagaatactgacggagactgggttggctgggaggatggacttcctacggtggtggtggattactttcagcaatattgttcaaacagtctgttggtgattattctactgttatcaattgtgtttcccaatcggtcactgaagaccaaaatgctttgttactcgaggaggtgactcgaaaggaaatcaagaaggcattgttccaaatgcatcatgataaggctccaggacccgatggaatgactccaggattttatcaaaaattttggaa

SEQ ID NO: 378134 - DNA, 2944 bp, Cannabis indica
tatgaagttttctcctgcagttttgcgatgctcgattgtttttttaatatcatgtaaaataattattaattgtaaaaattaataggggcttcagctccctgtagaacgtcccagcttgcaaacaaagaaacctaacgaaaacaacaaatgaaatgcctgttttgttttttctaatgatgtttctcttttgtttctttcttggaacattaaacttttcaaaatgtttactttactagttcactgtacacaccatatcatgatcccatactcataccctttccctatgccgttttgaaagtgactccatgctttttaacctgcgatcgaccattttgaggtgaaggtttctttccaattacttttcttttctttccttttctatttctttcaataagaagtatttattatgccttaacatgaagatggcgactctgatttgccagtctaaatctcttattattgttcgttgacttcttttttttttgtttgtgtgtaaaagtaaaattgtaattttcatgttctacatagcctcaaattctgacttgtgaaagtctgatgttatagttttcgatttttctctgtttgtgtaataataatattaataataaaagaaaactttgattgttttttatggataccctttttgaagaattacttgtttcttccatgaatgattttaacttcaaccaaggtacaaatcaaaatattgtggaagcttcttcacatgaaacaaatcatcctcaattgagtgattcaaatttggtttcggtgggagattctcctggctcttcctctgccgattcctttaatgctacacttaagtacctaagtgagatactcatggaagaggaagacttggagagaaagttcctgattttagaggagcctttggcactccaagctgctgaaaagccattctatgatctccttggccagaattatcccctttcttctaataaaggtgaaaattcatcttctgatcatgtacaatctgttgaccattttaggagaaggacaggggaagcaagttcattttgtcatatgggcaaaacccagatcttggatttggagagtttggaatgtaatttacttgatgaacagaagggaaagaggagccttgaaagagaatacggtgagagtcaagaagaaagtaggaaaagcaagcaatcagcaatttatagtgatgattctgaggcaacagagatcatgtttgacagagtattactctatgaaggtgataccactcaatctactgtgtcaactgttcgtcagaagtcttcacagaaccaccaagcaaaagggtctggtagaaaggtgcggtttccaaagaaagaaggtaatgccaagaaagaaatggtggatttatggacccttttgactcattgtgctgaagcagtggctgactatgaccaaagaactgcaactgaacaattgagacggataaggcagcattctttcacctttgtggagatgcaactcaaaagattagctcactacttgctaatggctttgaagcacgcttgactgggaaaaagacagcttcatattcagctcttgtaagtagtgagatgtcttttgctgatatcttgaaagcttaccaagtatacattactgcctgccctttcatgaggatgtcctattcatttgctaaccaaacaattaagaaactagcaaagaacgtaagaagtgttcacatcattgactttggtattctctacggtttccaatggcccgagcttatccaacgtctctcaaaaacaccaggaggccctccaaagcttcgaatcacaggaattgagataccccaaccaggttttcgaccctcggagaaggtggaagagactaagcgtcgtttagaaaacttttgtgagagattcaatgttccatctgagtacaatgtaattgctcagaagtgggaaacaatccgttatgaggatctcaatatcgatccagacagagatgagcttgttgtggttaattgtttgtatcggttaaagcacataccagatgaaacagtggtgatgaacaacccaagagacactgtgttaaagctgataaggagaataaatcctgaccttttcatacatggtgttgttaatggtgcatacagtgcacctttcttcatgacaaggttcaaagagacactctttcactactcaccattgtttgacatgtttgacactaccgtacctcgccaggaagagtacagattaaagtttgagaaagcagtgtatggaagggatatagagaatgtgatggcgtgtgaggggttggagagagttgagaggccagagagttacaggcagtggcaggtaaggaacacaagagtagggttcaagcagatcccacttgaccaagaaatctttgaagctgtgaagaacactgtggactcaagttacgacaacaattttgttgttgaacaacatggtgagtggttgttacaaggttggaaaggacgacgtatatattgtctctctttttggaaacctacttgagaggtaagttaaagacatgactagctagctttaaagcttatactcttgtcttgggctgtgtagtgctttttcctttgtaaaacataaacagtacacttagtagtctcctcccacatataccatatctaacatggacattgttgattttgactcatgtcgctatgtcctgacctcacctgaccttggcaattttattatgagtttggtgttgaattaagatcgttttagtctcataacaaaaaaaaaagttttagacttcgttgctatgcttttgtcagtagattttttttttagatgctcatatgtatatgaatcattattagcttcgatgctatggaaacgattactaggaatattttcacgagtctttaatgtatgttgatttatttaaaggaaatttacaattttatatattttatagtatttaaattacattattattatttatt

SEQ ID NO: 378135 - DNA, 2907 bp, Cannabis indica
aataaataaataaagaaaagaaaaatccaaatttaaagagttttgtttttgttaaggcatgagccacaaaaacagatgagaagggttaaaatagaaaaaaaaaaatgggcacatggatgacataattaaccatatcatatatatgatcacatgctctccatgttactcaaaactttttctgtccacatattaacattcctcaacttggccactttgtcaaaaatttatactgccaccttggttaattatattgttattaatcactcgtagtagtgtggatgtaaggattgcttaattgaaataagatggattattagataattagagtgtaattataaaattatgttatatattaatcataatttatacatttgtggagatttatttgaattcagtatgtgttgtttatgatatgtatgaaatttcttgtttcccgtacttgtgctcagtagcagtagaacgcgatattggacaaaaagaggatcacattttcatatagtttagaattttattagcatgcacaataggacaggatagttagacatgagaagtgtcgggtttggaaaatgaccaaattacccttaggtggcatgtttgtctttgttttgtgttaagggataaaatggtcatttcattagaattcttattttgtccttttgtggacattaatgaaattgtttttaggttggatttatttaatgataagtttatattaattattcttaaaatgaaagttagaagcaaatctagaaaattcactctctatcttttgaaccacctagaaccagcaaggaggaaggattttttcagctacaattcaagagattctagcacgatttaggtgtctcaacccaaggtataactctctagcctccttctctttgatatttcttagctcaagataggttttggtgcatgattttgaaaattgaggttgtgtggttgtgtaattagttttatttcatgttctggagttaggttaggattacttgagttgttttaagctgagttagttgattgtggtgaggtttgtgcaaaattgaggtttgagaactcaatttagttctttaatggtgtttttgacttttggacttattgttgaggtttattgcttgttttgggtgtattgtggtatatgcaggtattctggaagtttttggaaggtttgggattaaattgaggtgttggggatgattttggtggttcctacactaaattggtcgaccggttcagggggacctgtaggaaccgaaatttcggttgatccccaaaaaaccccacctggtctaccggttggggaagcggtctgtcgattgggacagttttgcaaatcctagtttttcttattttttgtgatacttacggtattgccatattacatcgataggaaaatctttagttttgattttaagtccccaaaaaatattttagcatgtgtctcatcagaatttcgaatattgtaaatatagggccctgtaaaatgtcgcactattgtccacttaggctgaccgacacacctacaaggtaagattagcataaagtatgtatgtgtgaaagaatgcatgttattattaactacactactagcactgaaatatttgtagaactaattaagtgtgttagtacaatgtagggtatttaagggtaagttacggtgttaccaacacgagtacaagtgggtaaggaatgcatgtggtacaacacccagtaactctcgaatgtacaatatggccccaccaacactagtacgaagtcagtactgcagtgcatgtggtacacaagtcgtacttctgttgcgaacgttcttaaccatttggtgagccttgtacttgggcttcggagggcctaagtacaagtcagaattgcattgtgtatatatgttatgcatatcttactgagtctgtcgactcataagtttgctaccttgtgtaggtaaagaaaaagctaaggtagaggaacaatgagttggaggcccaacaaaaattgtacatattgcgacaatgaaacttaaagagtttcggtcacactgcattttgaactatcttttattgtcgccttgcgacttgtaaacaaaaaatatattatgtatatatttatggtatatttttcaaaagtggtttcaatctaaaattagttagtttttaaatacggacgttacaattttagtatcagagccaccaagttatttactgaagaccgtcaatatatgtacaatcatagccagtgtcgagctcaacttacgttttcgtaagcttttaccttttagcaaactgtttaaataatattgctataatgtgtgaaaagttatttaaattcaaaaaatacggtcttggaaatgtattgaccactgtctaacttatgtgccttatgagttcgcaggctaagtcttagattatggacacccaacgaaacgttagaggaaaggacgaaatggttgagactgaagatggtcagggtggtagaaacctagaaaaaaaaacaggatttttgagtttgaataaaattgaaaattctcattgttcgtaggaaaaataaattgggtttaagaatagaattgaaaaattgtaattatttctattttattttatttttagtaaatttttggttttaaaatggcaatcataaaattaaataatgttaatagttaactcagttaactaagaattttattatataaccatttacatattattaaaataaaatactaatactaactattaaattaataattgattgaaagtgaatattgttaatgtataaatatatttatgaaaacttctaaatagttaatacgtacccattcatagttacttaaaaaataagtagaatattttaaaaatattaaattattcaattttaatctaataattataaagagaaatttttatgattaatttaactacttaa

SEQ ID NO: 378136 - DNA, 2455 bp, Cannabis indica
tcactaccgacgctgatcagggccgacgctaaagtgtttttaaaaactgacgccatatatacccctatggcgtcagatattatatatctaggaaccgacgtcatgggagtatatatggcgtcggttcctagctaataaccgacgtcataggtggcgtaggaaccgacgccaaaaatgagcatttttcagtttttttttaattttatataatttattttaattatatatttattaaaaaccaagcccctgatatgtcactagtggtggggatttctgccagatttgcctgagaatttttagtgctattgtcactatttgtgttgcctaaggaggagggtccactaaataaaatatcgaacctatggtaacacttttgagcagtgtgtccagcttttccacatagctgacactcaggtcgattgcctcttcctccacgattgctggagcaacctcttcctcctctgttattgcctctttgaccatgtccattgtatcctcctatgtgattattgttcaaagaaagattggctatattaggttgaacattagcaagggcgtctgtggtgtgttgattaatgcgaagttcatgactatgtagcataattaaattgcacttcttgtaggctcagaggattttcacgagaggttacattaacaataacatcttcatattcttctctcagaccttcaagaatatatatgatataaggtcatcatcagagatttgttatccagcagtagcaagagcatcagcatagctcttcattttcaagaaataatcctcgatggatgatgaacctttcttggtggcctgaaggagaccacgaacttgcataactcgggctcttgatcttgaagcaaagatttgagaaaaaatgctctagatctcatatgaagtttgacaattgatgttgtgtccaagcataggttcagaaatagagttcattagccagtacattaggaactgatcaagcctcatccattgaagataaataggattagggagattaccttcaagatgttaaggtggtggagggatcattcctaagatgtatgtaagctcttacagctaccaagaccaaagatctccaatcgtaggttaagcaaaagtagattgttgttgggaagtcctacttgtggagcctctggtgcagggtagatcgggtgagcaacgatcgaaggagctccattgtcgttgacttgaccttgattgtttgaggagttagctccattcgacgtcattgttgatctctgataccatgtacgaaagcagagagaaagagagaaacaaagagagatgaaatgatgaaatggctcacatgaaaacgatgagcacaactacttttatattaaactgtaaaagaaaagtttgttacaccagctagtataaagctcagcaaaaaacagttaaagaataacaactaacaacaaatggtattaactgaaagtgtaactaatttatccctaacaaagttctttttttttcttcataaaaatcttaattttaatgtccctgtggtgttaggcattgagctccgattgaatgctatcaactttctatagatttatttaagaaaaagtatgtagattgaaaaaaaatcaagtataaatttattcgaaaattagtattttaagcgatacaattcacataagtttaaattctaaatcgtagagtataaatttgttcttcatggaagttaagaattgagaattgtgaaaggagcatttataaggaaaaaataacataattttaaagaagaacactatattatatatatgaaatatttttgatatggagtacaaactaaacatggaaactcaaatatctcaatctttttgatcatatatgcaatatatagacgaatatgcatgtgtatggatgaaatttaagaaaatttagtgtgtttaaataaaattcaaataatcagtaacacatgtaatttttttttttttttttctatttttcattttactatatatatattgtaattttttttttcaaattttacaatatattttaaataattatgttatacacactattaatattatatataataaaaaaaataaaattacaaactatctgaattttaaaaacacaaagaaggtgtacatcagtttacaccaccctaaaatcaccgagaaaaattaagagatatcttaaagtgtcaaacatcgtaaaaaatggtaaaattatttattggtacattctaatattcttacacatgagtattatgtaaattaaccatatgctttaattggggaccacgagctacttgagaggtagcatcaaattaactttgaaatttgtgaaattgtgaatggttgttttcaatgtacagcaaagtgctgatactgaaagataccttatgatgatgataagtatatatatatatatatagagaattatacatactaatatttaatgggaaatttgattttctatacttagaaa

SEQ ID NO: 378137 - DNA, 5920 bp, Cannabis indica
tgacatgaaccaaatcatgcttcgtgaactttttttgccgtaaacattccccctgaattattgagattgttggatttaaggacttttatccaatttcatttaattttactaactcggtgattgtccatgtactaaattatgctcccagactttgatatttaccaaattatacccctcgaactttgacatgtgccaaatcatgccctctaacttttatccatgttagaattttcttactaaaattacacaaaagtccttaaatccaataatctcaatagtttagggggggatttttaacaatcttcaaagttcacgagacatgatttggtacatgtcaaaattcaggagcaaaaatcctaattagtttttttttttaattataaggtaaaatagtacatatttattataaaaaaaaataagaaaagaaagatgcatattgatgcatattatttatttaaaaaatgcaagaagttaataaaataaacctaaaaattaaaaaaaaaaaacaaataaataacgatacattttaattattaacaaatagtaaagagagtataattgtaactatacttaaatatagttagaaagttacacatgttactcaattataaaaaaaaatgcaatataaagttttcttacctccatcatcaattaactttgaaatgtaatctcatgcaccttaatccaaaattatatacaataattgagtagttgatcaaattagtcaaacacaataatacgactcaaaacttgcacgaaataaatggtttgtggatcattttttagttgatacagctaacctgtttataaacaagttattttggattgactagcttaacccgaaattgacaggacaacaacctatatttaatttcattacatgtaaattatattttttttagttaaaaagaacataaacatgttaattgttataaatgtgtcgtaaaaccattgtaaaagtattgaatttgttataaataagttaatgagtggataataagttaacaaaaataactcttatataaacatgtttagtgggtagagtcaagtcaacttgtttatagggttgggctcgagttttaatttttgacacgattaataaatggattgagtttgagtttgagtttgagtttgagtttgatatttgcttgtagtattaagtctcgacacaatatgaacacaacctgtaaacataaattatcaccattacatattaaaaaatgttaagtagcaccttaaggtatcaaatactataaaatgtgacatattattattgatgtaatttaatatcgaatccaacataatttaattcaataaacaaaataaaaatgtcagatcggtgtactgttaagaatctaacaaggccaatagaaatgatcttacatattgggtgggcaattttcacttttatatggtccaaaagtttggaattcctcaaaaaataaagattatcctaaaattgaaatgtgaagaagccgcatatgtaaaaaagaaagtagccgaatatttgaatgttttgaagaaagaaatacataaaattctttttttcgctattattatgaataaaacatatatataatactaaaaaggaagtagtgggcaaaacagagtcctgatagagacttcatcaaaaaagaaaaaacaaaaaacaaaagtaagagcgttatcaccactgttcaaatttgaataaggcccaaactaaatgggcctcacacactctttcttcttcttcttcactgtattctacaattaccaaaataccctcgttgaattcaacggatgagctagctctgcttcattcaggggtaatagacagccattaattaatataagcaattcaccaacttgcaccagtctccttcctccgcacctccacttgtccttttatattatctctttcctccaatatccacgtggcaccaccatattcttctactcttgtccccctataaatacccccaactttctcacactgttcctctgtaccttcttcctctaactctactctctctcagttcttttgtctttttcctcttttcgaaattaattaagccggccatgaaagttaggtcttggttctctacttgcaccaccactacggccacaaacgccgccgtgccggtttcgcacacttccaaacacatggtctccgatcaaagcagtgtctccgatacggccacgtcatcatcatcatcatcttcgagtcccagtatccaaagcaacctctctctacaaacactcccttctgttccttcactccattcaccaatctccgccgaaaccccaaccgtctcttacgcctgcgtcgccactctcgaaccgcgtcttcctcagcagccgatcacctgcatcgccgtccaccaaaaccgtctgtacgtagcttcagtacacgaaatcaatgtctacgatcggaacacgaattactctcatgtcgattcgtttaacggtaatgatagctcctccggttcaattaaggccgttattttcaccgacgggaaactatttacggcgcaccagaactgtaaaatccgagtgtggaggatgtcaacgatgactgatgataagactaaaacaaacaaaccgtacaagctgttgactacacttcccacaattaacgacagattacggcgtttcgctctcccgaagaactacgttaacgtccgtcgtcacaagaaacgactctggattgaacactctgacgccgttacaggcctcgccgttaaaaacggaatgatctattctgtttcttgggatagaagtttgaagatttggcggacatccgatctccgttgcgttgagtccgttaaagcacacgatgacgcaattaacgccgttaccgtatcgccagacggaactgtttacaccgggtcggccgatcgacggattcgggtatgggcgaaacccgaaggagagaagcgtcacgcgctggtagcgagtttggaaaagcataagtcgtcagttaacgcgctggctctaaacgacgacggatcggtgttgttttcgggttcttgtgaccgttcgattttggtttgggagagagaagacagcgcgaatcatatggcggtgagtggcgcgcttaggggacacgaaagagctattctgtgtttattcaacgtctctgatttgttgctgagtgggtccgcagatcggacggtgaggatctggcgacgtggagatgaaggaaggtattgttgtttgggtgttttaggaggtcactcgaaaccggtgaaatctttggttgctgtaatggaagaaaaggattcaaacggtgtcgttttgaatgtttttagtggaagcttagatgggcaggctaaggtgtggcaggttctagtttcaagacccagtaacatcactagtactgctaataccactctccaatctcttaaaattaattaattttgtagtaaattaagaaatgtattttatatataattcatacaaaaacactcgtacgtcaccaattaatttgtgtatggttttttatatgcaaccaaaaatatgtatttcttcatttttttcaattatttttgacaatgtaattttttttttttttctaaatttgagtcaacaacataattatgatccgcagtcgcactgatcgatatacttggtttttgattttatattatatgtataaattcatttagcacttttaaaaatctatatatcaagatgaacaagttaaaagaatcattattatgagaagaaaatatctaaattatattgattatatatattccattctttgtttgggagaaggaagaaatgtatataatgatggtaatcaagtactccactcaccaccacatagtcacatgctatatatctataaatttgtatattttttgcacaaagacacaatatatatgcatacatagcactataagacgcccataaggagccatttcctagatataagttgttgaaatgttcgcctttacttgatgagtgttgtttaagtaaattaagtaaaagactgagacaaaagttaataatgttaatatatatttccttattccaagaccaaaaacaaatatatgcatctcaatatataaattataatagtactaattaaatatatatagtaataaagacaatgaaaaaaccttgaacgtgaagtctcaattttatgaattaatacaatatggattataataatatttttattattaattactacgtacgtagtgctatggataacccaaaactaatcccattaatacaaagggagccggtctcagcatttcctggcctaattaactgcgattaaattacgtaaaacacatagaaaaaatatatatacaacaagagtattagttagtaattaagttaattaatattaataatcattcattcatgtgtacatatataattcgacattgattaagatcaaattattaagagctaatattaatccggcctcgcgagtcatgacaaattaaatatatcaatgcgtaaatgatttaatttaattattaatgaattatatatcctgttgtgtttgattataaaagcgctaggtcaacgtttgatcagattcatagaaataaattataaataaatataattaaacctgagatttatgctctttattgatgaaattaatcacatgctaacataggtaatatcggtacagtgtacaccattttcaaagctaattagcgtgtattaaactaattaagctgctgttaccttaattaataaataaaattaacaatatagtacatgtcgatctacgtgtattggtgaatttttcaagttttaaacagtgaattgtcattattatgaataaacgcactatatatatgcatgtgcatgcatgcatgcatggatataccttagtttattttcggccacgacaattaattagtggcaatattatcttcctagctaagctctttatattattatttaactttagagcctcttcaaaatttcagtaattagtataatttattgactttaattaaattttatcttcttaattcactatattactagtacttaaaaaaaaaaaataaaaaaaaaacaataatttttgtatattctcaataaaatattaattaattattaatataattaattatttttatttattttatatcttacatattgaaggacaattataaataatgagctaaaaatattacacaagcttatttttttgtgtcaaatttaatataaattttacattttggattaaaaatggtcttagttaaatatcatatatctcttctctactgaggatcatcgtggctcttaattggagatctaaattgcatcggcaattttgaggaaaaacaaggagggaggccggtttccttgagggacttctcgacacttaacaactttctcactgaaagtcggggtattgatttgcggtattcgggttgtaaatttacgtggcaaaacaaaagattcaatggtaatctgattcgagaaagacttgacagatcaattggttcgcctctttggatcaacgataacccgaaggctggtgttaaaaactttccaatctttgcttcagatcatggcgccatattgcttgatactttaatgtttcatcataaaggtttcatccattttcgttacttcgaggcttgggctctctcgaacgaatgtggggagattgttaaagctaactggcaaaacactatgaccaaagcaactgatcgttttctgaagaacagtgactctgtaaggagagaattggtgaaatggaaaaaatgcaatgtgaatgacatggataaaattattcaagagttagaagctaagctgacacgaattcaaaatcaacctgatggcttgcacaatgatactgcagacaagatggttcaggatgaacttaatactgcttggctcaagaaggaatgtaaagcccgcttagttaatttggaaattagcagttatttatgttaat

SEQ ID NO: 378138 - DNA, 3442 bp, Cannabis indica
aatattacttaaaattaaaaatagtaaaattaataaaatttaaaccatccttaatcacgtataatattatttacttttattatttttgctgtataattttatttaattggtcaatcacacccgtaatctttgatggagttctaagcacaattcatcatgacttgctacaaaagatttaaaaaattaaagcaaaaataactaatttgaaaacttttattccaacattctaaatctaatggaaaattattttgtacataaattaatatagtgcaacttgtgcaaattaagctgtctatatacaaagacaagcaatatctaaccactttcactaattataattctttcaaataataataataataattagatgtttttttttttttttttgtaagaataattagattttttttggttgcatacttgcatgcaatatatattccacgtaatatatatcaaacccctggtcaaaatccatagattatttattaatccaatgtccccaattattttgttttgttttattaaatcaaagctaagctgagctgtttaattagatttagaaaaaaaagaattaatcaatataattaattaataaataattaatgccaattcttaagccgaaatccaaggcctatatctagctagtatatagtacgtacacttgattatattatatatgtattattataataagtagctatatattgcactattggctactataaatacacacactcatctcataatttatagaagagaattaattcagatcaaaaacataataatattgtgtatttagatatgggtgacttaacaaagtcatgtgtattgatggtgtgtttcttggttgtgttaatctcaatggaattgggtgttgagggccaaggccaaggtggtggttataagaaggagaagaggccggtggattgggcggctaccacaaactacgacgttttaacgccgctagcatcaggaagagaacgagcattttgcaaagcaagagggaaatgtacttccaaaaccctaacttgccctgcgcaatgcccggagcgaaagcctaagaagaataagaagaacaagggttgttacattgattgtagcagcaagtgtgaagtcacttgtaaatgtaagccccactccttagatctcaaattagctatatataattttgtgtttttgtgttggaatatatacatgtattactataaaaaaaaatgttacttttgctaacttattagcgtaaaaatgcgttgataaaagttaattttattttaccagagcataatatctataatttttatcaacacaaaaatacattaacaaacgtctatttttgtagtaaatgcactgaaaatacatgtacatatattgcttctaattaaattgtgtattagaaaaattacttctaaaaagtgatttttatagtagtatatatagatcttatttttatgactgcacttacgatctaactaactatatattatatagttttacatgtcattttgttctataaataagtcaaccttctttttttagtacattacatattaaaactattttaaataatttccaactcaacacaaccttctcatgagaggagagtcacaattaatgcttttcttctttgatagaattaattattattggtagttgatgagaaaataccaacttcacaaatcactctccatatttaaaaaacacacattcaagttttatattattttccattaattagtttcttatattatttatttaattaaattaaataaaatttaatattaaattttactatatcgataaaatatttatttatagacatgtgattagaactcaatatgcatttgtgacatcttaaaaaaaatgatttttttttttttttaatttgttgtaatttttgcagttagaagacccaactgtaatggctatggttccctttgctacgacccacgttttgttggcggtgatggagtaatgttctacttccacggcgcaaagggtggaaatttcgccatagtctccgatgaaaaccttcaaataaatgcccacttcatcggaacaaggcctcaaggaaggacccgagatttcacatgggtccaagccttgtctgtcatgttcgacactcacacccttgttattggtgcaaaacgtgttcctctatggagggatgacgtggatgccctcaccgtcagctgggatggtgagtccatccaaatcccaactgacggtgaggctgaatggagaaccgacagttctctcacaaaacgacaagttgttttggagagaactgacgattttaacagtgttagagtaactgtgacaggtctagttcaaatggacattagagtgaaacctattgggaaagaagagaacagagtccataactatcaaatcccagaaggagattcttttgctcacttggaaactcaattcaaattcttggatttgtctgattctgtggaagggattttgggtaaaacttatagacctgggtatgtgagccccgtgaagattggagttccaatgccgatgatgggtggtgaagataagtaccaaacgacgtcgttgtattcaactctttgtaagttttgcaagtttcagaggccaatatctaattccgacgacattgataataatggtgaagaaattgctctatcttcttgatcaatataattaatctaattgattaaattaatggaaataatattaatactattttaattggtttggaaatattttaattaacatgtttggttttatgtgatattatgtaatttagcattgtatctgaactaaagcacgaataaagggttacaaatgtgtctatgtattcattattatttcattgaaagtcttattattagcttattattatttaaaatttgaatttatatcctcaattttgaatgagctatcacttgttacaacacgatatatatgataattttaaaaaataaaatggtgcaaaacattaacatacgggtgattttatttccttttttactttttttttttaatgtaggtatccttaatttatatcttttttttttggttgttttataaaaagatagtaattttatcaaaaatttcgtatgagtaaaattgtaaacttttactcaaattcagtatttttataaaaacccctatatttttcaaacaagtgtgggcttcaccattaaacgggcccatcaattacattacatgagccgtggcccacattttttctgtttgatcttatgattggaaatagaatcactattatttgtgaaatttcttttatttgatttgaatttaatcacaaggcaatataataatggatttgggcaatgtatttcattaagggctatttacaaaaatatgggaaaataaagataagttttgatatatatggcataaaaacttaattacactaaatatgacattttttaaaaaaacttacaaatat

SEQ ID NO: 378139 - DNA, 2446 bp, Cannabis indica
tgtgtgattatcatgaaattacagctcttaacggactttgtatgaccatttcccaagttgcttacagttttcgtctattaaatttggtctgttaatggtgcattagatagaagccatttactttatgtttgtaatgggttgttaatcttgaattgctggctttaatgggttttcttatacatttccttgttattttctttttttagattacgacctgcaaacacgaatatcatctccattgcattcttgaatggtaagtcaaaattgttcatttacttataattttttatcgttttgacttatgattgtttgtttcttattgaaataaattttcttttaggtctcaaaggagaaaagagtgcccaatatgctggcggttactttccttaaaggattctgttaggtatattactaccttgttcttatctctgttctttttcttttttcttttttcttttttcctggtaatcatttataaatgttgtgtgtagccaagagcttctgtctgcagttggaaaggaaaggcatttaaggtcaaagagtattgaaaggcctatatcgaggcctgctgattttggactgattgatgatgaggaagaccttgattctgaccctgtgagagtttattttagcttcaacaaatatgtgtttgattgatgtctttatcttcttacccgtttgcttctgttctacaacaatgtctttttttattgctttttcaggaactcggattagtgttcgatgagcctttcatgcggcatctagctgttgctgtgcaaagacatgagcttcgggaaagtagacagatacttagacattctggacttgatggctcccatggaaacagtgaggaccatacacatacaacatcttcaactgtaaccccacctgctcttaatgctcaatcgtctcatgtggagcccagaactgatataaatagtggtgttcccaagcccaagtacgttcataggacttgatttttagtttccaatagtacacaatttattgtagcataatatgttttctttactcgtttgtcttatcagtggggacgttaagatttcttttctttcttatgaaattctgaatagccccacaatcatgatcaacacattactatctattctattaatgtaagttactttttcggttgattatacagtgttctatatagtcagccaccgtctgttcgtccacagagaccaagtcccccatctgaaacatccactttatcggactcacttaaatctaagtggtctgctgcttcggccaggtaaattagcaattgtataccatttgtcattcagcaaaaaaaaaattgtataccatttctccagtcctttcgtactctctttttcctacactgacataaatgttaattaatgtgcgtcgattaggtacaaggaatcactatcgaaaagcaccaaaggccttaaggagaagctacttgctcgtaataactgtgtaaaagaactaagtaaaggagtacagcgtgagatgagtgcagggatatctggtgttgcacgaatgatagatcgcctcgatcttaccccaaaaagagctaatgcagccagtcgtgatggagttgcttcaaacatctctacaaagggtaaaggcatgctagagaatatgattgttcaatctcttagtaaaaataatagtaaggttgcagatgaaatgagttcagatgcagcagcctctcacccgtgtattgttattccaggcagagttgaggttttacaaccacaggtttgaatattttactattgccacattgcggaatgttatgttttctttctttcaaaaactaacaaaatccaagaaaacttattagtgctaacattgaaaacattgcatgtttgttcagaggagggagcaatgaaatgaatgatggtgggaagggaaaaggtctcagaagaagaagaagaagaaggcagttacgatgcaagtgatgtaataatgttgagagatcaatccccctggttggttatgcgtccggcattgcatacgcctgtatatgcgttaagttagattttagaggcgctgtgttgtgtgtgttttattatggatgatattttataagtgaattcttttgacaacttgtttgctttccattgttttcaacatttgaacaattaagtgtaggtgctttattgttttgcggtattgtgataaatgatataagtatatatttatgtttttttgttaataaatttggaattttattaatagcaaattagctatagtaataggggaacttacaaaaatagtagaatttaggttaagttttacaaaaatattgtcacacggatatcttttcaaaaatacatcagtaaaacacaaaatagtacagtgaaaacttaacaaagtatactgcagtatgaaatttataaaaaaatacagtaaaaaagtaagaaatatcgcttggcagtatttttgtaaaaaa

SEQ ID NO: 378140 - DNA, 937 bp, Cannabis indica
aaaaaaaaaaaaaacctttttttagatatatattttattattagaaaaaatgcttaatttatgttttataatatcatagtttacatttttaccactatacattagaaaaatacaattttttttctagggtccaattgttatttatgtgaaatatccctaattggctagctttctatatatgattatgcataacattattactatattttaagttgtaattaactaatagtgataaatgtgtatatatggtatataggtgggtattagatatggaacaacatcagaagacattttgacaagttatcttttacaatgtgagggatggaaaggaattttctgcaatccaaacaaggcagcattttatggtgatgcaccaatcaacctttttgatgtgttgaaccaacaaaaaagatgggccactggtctacttcagattctcttctctaaatattctccattcacatttggtatcaaatatattggtcttctcatggcctttacttatggacataatacattatggcccatttggtcaattccaattactatatatgcatttctacctcaacttgctctactcaatggggtctctctctttccaaaggtaaatgtccctaaactattctcattgatatagtgaaaatttataattatttttacaaaatgataattttttagtattgtttttggatatcagtgtgcccagtactttctagaggtgacaccgatctatgtgggctaggacaggcttaaggcccacctagcccagggtcctaaaaaaatttctctttttaaaattactcattttgaaaagtactatatatttatttttttctaaataagagtttaaaaatatttttttttctatgactgtctatattttatgatcgaccttaggtgatactctacaattggttaacaatatttcctaaaaact

SEQ ID NO: 378141 - DNA, 2373 bp, Cannabis indica
aataaatttataccgatagatatttgagatcaagacctgtaattagggtttcaaatccttctgttttcccaaattagtggaccaattttttcttctcagttctcttatttttgttattaaggtgattggatctgaatgcatgtctccaatttcacggaaaaattgaactattttaatgcttcctttaatataatttctcagaagagggactttcaattttgatttctgaattgttttaggtgggagattaagatgggtgctttcgtatcgaagttttggttcatgctttttcccgcgaaagagtataagctcgtggttgttggtttggataacgctggaaaaaccaccactctttacaaattacaccttggagaagttgttactacccaccctacggttggtagcaacgttgaggaacttgtgtataagaacattcgattcgaggtaccattatctgttccattctcaatttttttcttctttatatgatgtgtttgttttgccaaaatcggcacttatttctttagttatatggtaatagattggttacttggataatcacggttttgggctatgtttgtttacaagtaatgagtctattgcccataagggaacttgacatgtttctgtgaatttgattaaatttaggacgagaatatgattagttaatatgctctctagttatgaaattcagatgacagaaatctcatgttgtgctttaagtatttcttgtcagttgtaagttgcatctgggtagaattcgcaccatttgaagatctttgggatatgataccaagatcgtatagtgtatgtatctgttttcaggtgagtgtccttagttgactttaactgtggggtgctggttaagtcatagtttgcgctggcacgaattcaagaggcgttacaagtttggtttatgagcatttagtcacgattcacatctcgaaatcacatagttgttaactaattaccattttcttatgatgaataatggaatactaagtgctctctttttaaaagaaccagctctcattttaactttcctattaataatacaagcacttttgggtaatttactaactcgcattccatggtttttcctttgttatctggcgtggattttccatttgttcctcatctgccaatgctttttttatgtcaggtttgggatcttggagggcaagacaggctgaggacatcatgggctacatattatcgtggtactcattctattattgtggtaatagacagcactgatagagctaggatctctattatgaaagatgaactgttcaggttactgggacacgatgaccttcaaaactctgttttattggtctttgctaacaaacaagacctcaaggatgccatgacaccagctgagattactgatgccctttctctccatagtatcaagaatcatgactggcacatacaagcttgctctgctctcaccggagatggtttgtatgacggtctagggtggattgctcagcgagtaactggaaaagcaacgagctaaaagatggaacagaaaggcatattcagcacatggtagaagagtgttgtacatgccctttgtatcattaaactctttgaaagctgtttcttattaaatctgtagatggttttaaatgttaacatcctaaaatcctcttatttttctttgattttcaaatctgattgatatactatgcaaattacaaaggaaaagtttcaattgaaaaattgttacactctgcaaattggtgtcaatttcattaactgctcgccaaatgataaagtatcgctgtgcacaagtttttttttcatagaaatttgactacaaacagtaaaactgtaaacgcttgtgaatcaaagctgtagttaacaaatgatgatgagggttgtgtagctatcgataattgtcacaggatccagcatctgcaaccttttgaatcttgaggtccttcaaaccatcgatcccataatggactaagagggccatgtgttctgtcaagcagataaaagcagatgttcagatgaagttatgtttgataaatttatgaaatcatagagaggactagaagaaagcattacactgggagtaatggatcaggtcttgtttctatattactcagcattctgaaatcatcacagaaaattcagtttgaaaatctgaaatggtaaaaactaagatttagactaacgattcaataattcaaatatgcacatgcacggttttacgcttactcgttgcaagcggctgaggctctttccattctttcaagctgttcaagctcttcctgtgtgcaacacatacagagaagtcacttagcaatagcatacagttttgaatcaaaaatatatttggtctagtttttcacatcacaa

SEQ ID NO: 378142 - DNA, 6458 bp, Cannabis indica
tgttggattggatggaatcatggttgattagggaaaagtggaatcagttaagaactagccgagaccaaagtcagttattgaggttaaaagttttgaaggtttgttactttcttaataatgaatttttaatggctgctactgggggtatgtcatctttaacatggcatggtattagttggggacgagatctgttggtaaaaaggtttaggaatgaaggtgggtgatgtactaatattagatgtggtgtggacccttgcatcccaggaatctctattttcactcccttgcattatcagggtgatgctttgagtagagttttagattatataattgaaaatcaagaatggaacttggaacttttacaattagacttctctccagctaatgtggatcatattcttaccattcctctttcttttcttgctattgatgataaatggatttggcattataatggaacaagtgaatattcagtcaattcaggctaccattttgcgtgctcttttgaagaacaagagctggcttcaagttctacatctcaagcaacttggtgaaaaaagttttgggcttttaaacttccttcgaaagccaaaatatatcttcggttggagggtggctcaatcttccctttcagttgcgaagtcactgtttcatcaaaagatattaaactctgcaacatgtagcttgtgttctaatgcttgggaatctatacgacatgctttattttcatgtgatcatgccaaagctgtttggagagcagctagtttttctttcgagtacagattggcaaaccaaatacgtgatggagaatttcttatttatctttttcaatctattccactgatgatatggagaagattctttgtattatgtggtatatacggttagatagaaataattgctacagactccatttcaaatttattcaaaagctatggcttacattcgaaactttcagtatcatactaatgttgctatccctgttgcaataaactagtatggacttgctacacatcaaccttggttacctctccagagaataaattcaaattaaatgtcgatgctgctcttgccaaaccaattattggcaattttaaatctcaagaaatagaagcaaatgttattttttatggtttttgttgggttagacaacttgatttatgtattgactttgtagaaactgatttgatgattctcgctaattttctaaatggttctacatcaaacctttcttgttttcaagatttggtgctagatgtttcacattaattatcctattttttttttcagtttgtgtatttcatattcaatgggatgctaatcaagccgcacatgactaaacaaattttagtgttagataataattgtatatggttagaagaaatttaacccttttttttctattgtaaataactcagtttaatttataataattgacattttgtatataaaaaatataattaaattaaaaacattctaattactttttttttaattaattatataaacaaaataaaataattttcaacagaattatttcttctcttttcttccgataaagagaagttaattgccttatttcgccgtccgaacttgatcgtgttctttctccttttctcttttcgataacttcgaggtgtaatatacccacgcgcttgaaatagaatagcagtggaaattggtaaagggacataagcgggggcattattgtcattcggatcaaggtggtttatggttatataaaggaatgaaaattttgtttggcaactgggaaattttttgttgacctcacaaaagagtcagatatagttctcatcgagtaagaactcggggtcgaaagacaagagaatacagagctcagacatggaccttgccatggaatccatggcggcctcgatcggtgtatcggtcgcggtgctccgttttttactctgtttcgccgccacaatacctgttagcttcttatggcgattcgttccgggtcgattcgctaagaacctctacgcggcactatcgggggttctcctatcttatctctcatttgggttctcttcaaatttgcattttttggtccccatgttactgggttacgcttccatggtcttgtttcgccgtcattgtgggattatcaccttcttcttgggattcggctatctcattggctggtatttctttcttccgggcttttttatttgaatttcacattgttttgtttgatctattattttgcatagtgagtaaatgggcgagtggtaatgttatgttaaaaatctgttttttcttggtttggaggttttttgtttctcattatggcattgcataatacaaattgaaaaaaaaacagctcttggttgtgccacttactaaactcatgacaattcttatctgtatgtagccatgtctactatatgagcggggatgcatggaaggaaggaggaatcgatgcaactggtaagcaatccttttgtgactgacttgtactgtttagaggtgttgattgatttgttaagtaccttagtcagttaaaactaaagcttatttgttgtgtgaggcattcttctgcagagaaaagtgcgaccaaagttatcccttcttactattgatgaatatttatttatttttatgttaaatttgttgcgtttttctttttgggctaagttctaacttctgttcatggatttccttctcatatgtaggagccttaatggtgttaactctgaaagttatatcatgtgcaataaactacaatgatgggatgaaaaaagaggaagagttgagtgagactcagaagaaaaaccgattgattaagttaccttcaatcattgaatattttggttactgcctttgttgtggcagccactttgctggtccagtttatgaaatgaaggattaccttgattggacagagagaaaaggggtatgattttgtgatgttcttattctcacattttgtgttctttgtttaaatcattaagccatcctagttagcttatctctgaggaaataattttgtagatttggagcccatcagaaaaaggattgtcaccatctccttatggggcaactcttcgagctctactccaagctgcattttgtatgggtctgtatttgtacctggttccccagtttcctctgtcccgttttacagatccattataccaagaatggggattctggaaacgtttgggctaccagtacatgtctgggtttacagcacgatggaaatattattttatctggtcgctttcagaagcgtccatcattatttctggcctgggatttagtggctggaccgaatcttcaccaccaaagccgaaatgggatcgtgctaagaatgttgatattctaggtgttgagttagcaaagagttcagttcagttgcctcttgtgtggaatatacaagtcagcacctggcttcgtcattgtaagtttccctttgttgaatcttattggttgtggattgatttgtatatctaagattttgatgctattgatgtttaattagtcaacaaaatcttgtgaaattctatctaccacttgatccaacttccatgcattagttactgctaatatttgtaaccttttttttaacttgtgatttatgagtgaagctgcagatgactctttctgttgtgtagcattaacttgtgcatttttcttgtgttagatgtttatgagagactcgttcagaagggaaagaaaccgggtttctttcagttgctcgcaacacagactgttagcgccgtatggcacgtgagtatttatgttacttaagaatttgtaaaatactggtctagtttttactctttccccacaattatcatgttatatttatgaatgtgttttatgagcatcaccatcttttgtctggattattaaaatagccgttgctggctgttcaattcatctctagttactatttattaatgaaaaatagttaatgtttccataactgccaagcctgtcacctttaatggtgttaaagctcaactattttaatcacacctttgttatttatttatttttcctcagggattgtatcctggctatattatattctttgttcagtccgcattgatgattgctggttcaagaggtatttacaaagcctgcctttttctgcttagtgctttcctcaaatgacttaactctttttttttctgttgcttcttttgcaaccagtcatttacagatggcagcaagctataccgccgaagatgtccctgtttaagaacatacttgtactctttaactttgcttacacccttttggtcctcaactactcttgtgttggtttcatggtgtgtcttctcactttgtcatttcataactatacatatatatatgtctatacataatatttataggaggcttctatgttgggaatatgaaatttgatctactagtagaaactttttctattttctgtacatggataaattttaattttcaattttttatgggcaatgtacattatagggatctctcacaagttggaaaatttcggataatttatggtgtcgaaattagagtgaattctgatgtacattgttgtataaaaaagttgggaatacaatttatttttgtaccaaaaccagaaagaccagtaaataagtcctatcgtataagccctcgttatatattccatatatttacataaaacttaaatttggcagttaacaatataatgtttatttacatgaacagcttatgtacttttaaagtttctaatagatgtgctattctattttcttaaacaggtattaagcctccatgaaactcttgcttcgtacggaagtgtgtactatgtgggaaccattattcccatagcactgatcttacttagttatgtaatcaaaccagctaaggctgccagaccaaagtctcggaaagatgaatgaatgagaatgagaggtcgaaaatccttgtttcttcccttggcagtgtttggaaatgagaataggagaaacaaacaaccactcctctacaagttttttcttttttctttcttttttaacttatgcactaccttttttcgtttttggatctcaaaactgttaaaagttacctgcatatctgatttgaaatggcattaatttacatccaatcaatgcccacctacttactgcttctgtagttatttcttgtttttggaagtttggttgtagattcatcatatcccaccaaagcgtgaagccaaaaaagatggaggttcgattattagtcccttgagtgaattttgatatagctaaagttaattaaaggacttgactatataaacttttgtaagttcaagtattatgattatttaagaacaaaacaaaagttaatcactttattctctctttgactaagtaatcaaaatttgcttacttttttctactgatatagccttactcaaaatttaaacttcgaagatattgtacttttgatgctcgtttttttttttttttttattatttaagtgtgatactcctaaaaatagtattgtaaaaatactaaaatttaatcttcttggaaacactccattttaaaacttgtttgcagattgcatagtatgattttgctaacacactacatattttctctcctcctaattatgctctcttttctctccttttgagagtggattttatggcctttttggccatggaagataccgaaaccctataaatattggagctttcgtactgaacataaggtgttcatgatgactttgtcaaataacaagatatcaacaagaatctctgaaagaacaagaatatatagatatgaaatagcggtatccattgaggcaatggcgtagatgattgaaaacttggaggaattgcaaaagaaagaagggcagtgggggattgctttcacaagatccttcaagaatagcttggggagttgttttatagagtgcttcaccgacacgaagggagctttcctgaagatatctgtcttgaagaataataagataaagatggtgattatactaaaagaagaaagagctaaggggtagttggacttcagaactgtcttaatggggtgacaacaaaaagaagtgtagaaaggagttggtcaaaaaccacaatcatgggtcaatgttgccaagagctcaatgcaattagatatataacaacaggttgggagagtcaatatcccaaaaaatggtagaggggaaaagagagttcatccagtgtgttgctagaagagagtcaaataaactaggttattgggattttttttaccaaaggcaaattcgaatgtcaggccaaggaacttgtttatgcgaaagagaatggaacagaagaatgttcacgaatatctataatgaaacattgtgacagggtttggaacatggttgtgattatgtttagagacaatagcaagagatttcttgaagcgctattttttacaatctctcaagggatattggaagaaaattggtggttagccaaatgtacgatgat

SEQ ID NO: 378143 - DNA, 1894 bp, Cannabis indica
acggagcttactcaaaggaaaaagttgatgatacccacacttggctacaaacaactcacaagaaaaacatgacaatggatgcgtaccttcgtcaaatacgcacatggatagatactcttgcaatagcaggtgacccctaccctgaatctcacttacttactaatgtcttaaatggtcttggtctataatatctcaccattgtggtttagcttgagcctagaggtgcctcactgacctggctagaacttcaagacgtactgctcagctttgacaatcgattggagaggttgagtactcacaactccaacactaagttacttaaatatgttgtagctccatcagctaatcttgcacataaaactctatcacagcgaaatcctccaaaatgatagcaaaatcacccttccaatggtcatggcacatgtcatggaggctatcgtggtggtaatagatctcgtggaaggagtggtagaacatgcagccattcaacaacagtgtgttaaagtcgctataacttcatggtaagtgacccttgcaacaaacagaacacgcaacctcaatctggatctagcaatcccactgcctttgtcacagctccataggttattgaccatgaggtttagtttgcagatagcagagctagcaaccacctcattacagatcccaaccaattgactcaacgcactctgtatggtggtaaggagagattgactactagagatggtaactcattattaataacttatattggagcttgatctttaccttctctatctcaaaaacctctaatcttaaaatatcttttgcatgtacctcatattgcaaaaaacttagtgtattcaagctcactgcagataataatatactaatggaatttcactctgatttttactatgtgaaggacaacaccacaggaaaagtgatactctaaggagctctaagagatggcctctattagcttcaactaccatcctcaccttctgtgtcttcttttcaattttttattaactcgtttgttgtgtcgcaatgttattctagtgagtttaatgtaaattgatttgtgatcgatgagtctttaaattcaataaatggagtttggcatagacgactaggtcacccctcaactagagtcttgaaacatgttctagtttcaacaaatgtaagagtcctagttaatgaacaagttcctttttgtgatgtatgtcaaatggaaaaattgcatgctcttccttttactctttccactagcaaagccataaaagtcctagacatactagcctttggggtctgactccaatcatgtctaacaccaattatataaattatacacacttcttggacgactattttccccatttaaagacaagtttgaggctttgacacctttttctcagtttaaaaatcttgctgaaaatcaatttcaaactaaaataaaagtcttaagatcaaattgggggggagtatgttccatttggcaaagttttccaagatcatttttcaacactcatgtcccattacctcggcacaaaacgaatgtgttgaacgcaaacattgacatatagttgatatatggctcacattgcttgcacaagctagtatgccatgaaatttagcaaataaattttctaacttataaattcatcatgactccagtactatagattcataattacacttatgatttcatggaacactctgttggaattttatgtcctaaataaaactcatttcaatataatcagatttattaattaatagaagatcaaaaattattttatgatgcatggttcacatgattatactttcatgattatatgtttattatataaatctattaaatcctgaacatttagttattcacaattacagtgatgtcatcacagtagaaagtaat

SEQ ID NO: 378144 - DNA, 3988 bp, Cannabis indica
tttttttttgacaaagagcacttaattaattctagtattttcaattaattctacacatattaaccataaatttcataattaaaataagaaatgaaaaatattcgaaacaattatataaactaattataaatcaaatgcatgtgacaaaaacaaataattaattttctaaattctaactactaggtacgataagtacttatatatatattacactaaatttactttacacaaatatttgaacaagtcatgatgtagataatcttttatttggttattgtcttctcattaaaaatgcctacaaatattattgtgtactaattccaaaaataaaaattatcttaatctcttacaaaatgaaagacttataggcaaatatgtagcttttctggtcaagtagtgtagaatgtttcattttgcgatagaagccacgtggcaacatgcaattggtcaaatgatctgcaaaattaccgttactgccccgcgtccgacattagaaaattttggatccaaaattaaactctcctatattcaaaattctggtaattctgttgagccaccagctttaatgaaaatgtcataccaaaactccatatcatattcatcattaccattattcacgaacaataatgactcatcatcgtgatgatcatgaccgtcaaaactagacaccacttgatccaacggccagatcatgctctcatcatcaataataatattagtacaactcctagcagatgatgatgagacttgattattactattatcttcttcttcttcttcctcatccttaattacgacaatctctttattgtcgttttggtgtaataattcagccgtaacacttgaaaagtcactatcactactactacaactagttgtagtactaattggatgttggtcattatcatcaatacgctgtcgttttgaagatgatgatgataagttattactattattattatttaagagccttttcttcaagtgtgtatgccatacatttttaatttcattatcagttcttcccggtaatctagctgcgattgctgaccatctgaaattaaaataaataaattaatttctgaatatttcaaaatattctaattaataatatataatattgcatgattgtaattatgcatattgtatttttggcactatatatatacccgaatctttttttagctatatccccatataatcaacttttacttggtattttattaatttttgtttttgatttaatttttgtttttttgatataagcctagttgcatatatataaagtcaaaaatgttattctaataattagtttgagaaagagaaatagtaaaacatatttttgacctggaaattaattctaccccaccattaaaaaatatctaaaaacactttaattattttccccaaacatgttttgtttttttattgactcttatttctaaattgattggattaagatatggcatataaattaatagaccaataaaaaaagagaaaagtggaagatgtaagtgggcggctaattaatccatattataacatgatataattaattataattaattacctattgccaagcatttggtgtaagttgataatggtttgttcttcttctgctgtgaaatttcctcttttgatatctgggcgtaagtaattaatccacctcagtctacaactcttcccacatcttaaaagccctaataatattatcacaaaatataaaaataattaattaaataactttaaaacaattaagcattttcttttataacaattaacagaatcaaactctattttttttctatcaaaaaattttgtgaaaacagttgtttgctttcgggttgggcaataaaggtcggagaagggcaaagacaatcactcattcgtgaaatcagtattcttaagaccaaagagtcgatcgggggtggtaaaaagaagaacatatagtgaaataacaaattgaaagatttggttgaaattgttagatacgtaccggcttgtttagggagagcacgccaatttgcatggccaaatttttggacataattgatgagaatttgatcttcttcaggtgtccatggccctttcttcaaccccatcttctcacaacaaggagctcttcccatgatcttgatgatcttcaatatagaaatatatattaatttatttatataaataggtaggtagctctgtttggatatcgatatgtgagcttgaacttttttgtgagggttgtgtggtgtatttataatcgaagagagtagtggtggacaaggcaataatattgatgtataatatatataatataatgtcattaaattaattacttagttcattggtcaaattgaggagaaaaatatatgtaggcactttccacgaaggatcactctctttctgtgtaaattaacgaagataattagtgattaattaaatgtaataatgatatattataatttattgattaatgaattgaagattggagtttggagactattatttgatgtgatcatgtgtattggtttttgtcttgtagtaaattaactagtaagacatgagtatatgtatatatatagtccgtgttcgtgttcttgtagtgttctactatagtattataaagcagtgctattggttcgtgtttccatattagtgacgtatacactgctaaagctcaatattagtcaaaagcgggcccattcttgggcccagtccagttaatagatcaacccacacggagtcaaactacgacactagatctagatgtaagtgtagcttacaaactcaacaagggtggatcacttcagtccgggaaataatattgtttgtataggagtgtaaatgcaaccggtctcgagtccgagtttgggttcgagttcggatctgggttcgggttcaggttcaagtcctgtccggatcctggtttcgggttcgagtcgggtcacgggttcaggtcgggatctcgagtttgggttcaggtccgaatctgggtctgggtccaagtttgggtctggtccgggtccaagttcaaatttgggtccacgctctggtccgagtttgggtttgggtttgagtattgggtccgtgtctggcggtctgggtctgggttcgggtctgccggtccaggttcaggtccagaaatgatccgagatccaataagtattcaaatgttatgaattagaagtgatttgtcagatcgaagctcctacctgctctaactaaatgaattattttgacatccccaactgtttggcccagaaggcgaaaggtctattaggatttaggattcatccggatacattgaagagactagactgtagatatcatcttacgtggcatcctcaagatgcaggccccaccatgtcaggtcaggtattttgtcccttaagtcagacccagggagagcgcacaccaccaaaaggaaactacattttgtccaacgtcatattctctgacattctcggtaccaacacagcaacgcacgacatgtgacatcatcaatcagtccccacttgtacggatgaccgttatcttgtgaattggacctcatccaattgatctaacattaatatattttactttattagtgggcctagctgacacctctaaaccctatcaggtttgggttcacccatacccgattttaacctataaatagaacattatatctttatgcaaagggttggaaaatatttctgctataaaacttaagattttttcagctagagcaaaaacacttgtataaaaatactttagtgtttttctagctcaataatattgactcgtaaattaagactcattaacgtctcaactacgtaatattaatacttttttttaatttattttttttacttatttattttataattcatattgacaataatatataaagaaatgaaattgtaaacaatactaaaagcacttctataaattagtttttgttgttgttgttgttgttttttttttttttctatattatgtatatatttatatt

SEQ ID NO: 378145 - DNA, 6458 bp, Cannabis indica
aaaaaaaaaaaacttactaaataaatcatgcataaattattatcaaaacaaaaagaataaaataaatcgaagaaaagcaaagaatattcttactgaaagaagctaaaatattcaaaataaaattccagtaatcggtactggaagcaatttttgatcgatcgaataggactaaaaagcgttgatctcattaatgtcttgtaacgaaagtcgaggggtatccgaaaataaaattccaaaaagatgaaaaggtacgttggtcattgtaatgggggtattgagatagtatatatattagagttttagaggggttttagggtgtgaatcactttagttaagtgagctttagctcttgggagaaagctggatctctcgaatatctagcaacttgttctcttatcaccccaatatcaatatattagctattaaattcctcttttgctattttgccttcttttggctactgtttacacttaaatgataggaaattcgtatcaaagatcagcctgcaattatttatttgattttgatgaaaatgagtatatcaaacaatagtttcatgtctgttcaaaaaaataaaaaacaatagtttcatgtttcatgaaattagaaagatttagcactgaaaatttttagatattttacttcatgaacaagacttgatgttggatgctccaaatactgtgacacttgtcttgacttgtttcagggttgaaagaagaactatttgcgatataaatacataaatttaactctcgtttacaaataaatacttaagtttaattttgggaatttaattttgagcagtaataatacctaagttataattttggaacttctgtaagtaccttactgtgaagtgttaagtaaattgtcacatgacaattcctgattggttcaagtccttaaatttttatttttaaaaaaaataattagtttaaatataccaataagaaaatgacacgtgtataatgacttgacatttaattaccacgtagttacggagttctataaatataacttagtgattcttaccgccaaaaattaaatttaggtattttttgcaactaagagttaaacttaagtatttatggtgcaaattactcttgaaagaataaatatcttttgttccagaccaaaaaaatgaaatgatgagcacaaaaataaaacttggttatattgaatgatgagagaaagactcatgtcaaggagttagtaccgttggaattgattgacattctcttctcctcaatgcctgatagcactctacctgtgctttttcctcaccattttgaaccatccgactcatcaaaataagaaactcataatcgttccatttctgaataaaaaacacaagaacacatcacaccattattgagaaactcgccccctcaccatagcacagcagaaaagaaaaaagaagaaaaactcttacactagttaaattagatgtcacacacctgatcctggccactctgggttgaggttggtggatatggggttgggcttgaggaagataaaatttgtaggagagatttaagccgtccccatcgcaagccctccctgtcaagaattcctgctgaaagctcatcacccatggcgaagctgtccccgttgcgaagcaaagaccagaccagatctggagtttgtgggggggttgaaggtagagaacaatgatggttagagatgatcagggaagttattattttaaaaaaaaattaaaataatgaaactctatttgctaaaattaagtcccagtgactcctttgaggaatcccacaatagattcctcctgtatatatttatatatatactattcttacagaaagtatagtttagtcaaacatgagtgttaataaattgatggggttttaggacagacatactcaataataacaaacaaataaatatcaaattttagaaagagagagaggctgagctacctcaaacatcatcgtatgccctgaagtgttgtggcccaaggtagacatgtgaaatgtgctttatctttggccagtcctctccactatctttcttgcagcgctcctccaaatgaggacattcccggattgaaagatgttgaaggaaattcaaactctggaatcctccaggaagagacggcaaattgtgacaatctgataatgccagagatctgagcgaggtaagattagctatccactctggcaaagcttgcaggccaggacatccacgtatttccatgttttgtaaagcagtggcatattttaacccctccgatagacacattagctccggacagtgcaagattgacaaactcttgagtgcagatagatgctgccaatcattaggcaaagaattcaaatttggacagtacatgatagttaaatgctcaagggctactagggatttcatcctccacgacaatgttgtaatgttgttgcaattctcaattgataatgatcgaagggagatcaacccttccatactttcaggcaaagagatgaggctgtggcactctattatctccaatgactcgagtgcagtgaggtttcctagttcttctggcaatgaaagtaggtcaccacaccagctaattgttagtgttcttaacttgacaagttttcctaaatttgaagagatgcagctgagcctgggacaagaactgatttttagaaacaccagaggggcattattttgaagcaaaagatctaaagagatcagctgctctgaaaattcttcaatgataaggttggtaagagaagttaaattcaaagctgactccagtacaatatcattgcaacaacgaagctctagatgctgtagtgacggaaatgatggcatgctattcagtctcaagcatttactaactgaaagtctgaccagggaagggaatccctgtcctccattagcagtccaccaatattctaaattgggaagatctgtaagggttaattctttaagtgacggaaatgctatgccagtgccttcaccatagaattcactaccaatattcttcactacatctagtccttgcatgtacagaaccttaagaaatggaagttgacctaatgaagggagttttttgcatcttttgcagttaactagagtaacttcagttagatttgggagtttaagagctcccatccacgttgggaagccactgccttcaaaccctttaatagacaacactttcaaatatttgtgcggttggaggaaattaagcacttctgtttcaagtgggccatcataatcagtgttcctgtttaaaccattgtcatcacttccccaagatagacacagagattgcaggtttcttttacttactaaatcagcttcccttgcttctgatgcatccttcacattctccaatcgtctgatttttagatcaccgccaaggtttaaacattggagttgtttaaggtttttatctgcttcatttactactataaatattgagagagtctgaagatatatcagttttccaatatcagctggcattttggttattctgtcacaaccatttattatgagatgtctcagtttagacaaattcgacaggcgacttggcaagtcagtgagattgtagcaaccagaaaggttcataacctgtaaattaataagcttgcatacgccctcaggtaatgtttggatgtgagtattagagaggtcaataaacctcagaaataaaaaagaggaaattgattcatgtaccaatttgatgccacttccacttaaatccaggactcgaagatacctaaaactttctaatacaccagaaggaattcccccgaggttgcctttcgggatcaataagatgagagttcgcaacttttttgcttcgtacaaagcgttgggaattgtatgcaattcaaaattgcaaaccactgatgagtggcgaatatttgagtgatctctataggcactatcatgttccattgtcatgaaatcattttctgcaacagattgtgcaagatcatgaatgagatcatgcattttgcattcagttatgtttccattgtcacttttctgtatatcttgaaaaaagaacatccaaactagatcgttgaaatactcattggcaataaattctaaagatctttttccttcttgtgaccgaacaaagcctgctgctacccacagatggattaacttctccttcttgattacgtagtttttaggaaataatgagcaataagcaaagcatcgtttcagatgcggcggcaaatgactgtaactcaatcttagtgcaggtagagctccattttcgctttcgtacatattccaaacaccactctctgctacgaacagccattctctttcttcccttttgaaacgcattagacctcccaaagtcttcactgctaaaggaacacctgcacacttcttcactatttgtttaccaatggggaataagtttgatctatgttcttcgttgctgccaaatgctcgttgcttaaacaaatcccagcaactttcctcagacaaaccttttaaaggatagatacaagtagtacccattatagatgcaactttttcactgcgactagtgacaagaactgagcttccttctccaccacatctcaacatcttcagcaaatcatcatattcattttgatcttcactccacacgtcatctaacacaagcaagtacctcttccccttcaacaactcccggagatgaaattgaagaacatccattcctagaaactcatacttacacctccttgatccttcaatgatcgaaatcatgattttcaccatatcaaactcatcattcacgcagacccagatcctcaaatcaaaatgccttgataccctctcatcattatacgctaactgagcaagtgtcgttttaccgagaccgcctaacccaacaatggaaataatcaagacatccccatgattcctacaactcctgtcgtttgagactaatagcttcactaccccctctttgtcctcctctctaccaaaaacctcagattcaattatgaaagacccagtttgcttccctcgcttattcttatacccaccactattactaactacccactctctaagattgaatagagatttctctttaaccaaattctctaacgtctccttaacttggcacaatttcgctaaccaatcgttatagttcaaaagttgcccaaaagcggaagggatcagggtactcacctgctgaaaatagctcccgtttacggtccttgacataacagcttcagcagaaacctcgtcaatcaaatcttcaatatcagaagcaacttctttgagctcttccagccacaacctcaaagcacggttagtcatttgctgctcttcagcgtcggcgagtaccgcctgaatcatgtctaacgttcgccataatttattgacttcgctcttgatattatacaaatctgaaacctttaagaggaacggatcggctaacttatctaagactacttgtataactggggaaagaactacgtccgccattgttgccgactagagaaacaagtaatgcgtggtgctaactgctgccaaaagattgagttgattgaaagcactgtcataattaataagtagttgactactgaggtcaacaacatttaggacctattttaatttttaatttaaaagttatatgagacccacactaaaaaaaatacaaatcatcaataatattttttaaattctttgtaattaaagtattttaagactcatttacaaaaaaaaaaaagtattttaagacccaaatatttaaatatgagatgttataaagtataaagtttagggtgtttttacaatacaatgaccatctataattgtttaagatattttgtaaaattttaaaaaattcattagtttatttttcttgtgtataaaataaaatagttatgcatagagttgtacataaacttttgtaaactgcccaaatcaaaccgagataactcgacaaaaattataaactgaaaaacccgacgaaattataactcgttcaatctttatattgggcgggttgaaaataataccaatctgtccaatcaatccgaactaatccgaccaactcgattaagagagcctttttatatatatttatatatttttattatatatatatttatatatcatcattataatatgcacgactgtaaaaaaaaattctcgaaataaatataagtgtatcaatacattacttttagtgattacattgtagaattttcttaaaatttattttcaccttttgatttgtttcctttgatacgaatcatcccatattgtttggcaagtaaaatttttaaaagggaactttacataattatacactattataaactttattacaaaaacaacttataaaacatattataacgtgatatttagatattttatcaaatataccgaatattaattaattagtaactcataaaaaactttccatatttaaatttctttatttatttctatatatattttaaaactaataatatattaattaa

SEQ ID NO: 378146 - DNA, 1763 bp, Cannabis indica
tggtgctcatactcgggtatgataccgtactcctgttccattgatgaaaagacttggattccctcatcaacaagatttccgtagttgcaagctaacagtaccccgaatagggttatacgatccggttgtgaacctttggctaccatttccttgaaaatttccaaggccttgaatacatagccattgtgggttaatccaattatcatggtgttccaagatatcaaatctttctcactcatattaacaaaaactttcatagcatagtcaatcaatccaactttagaatacatttgcacaagtgagctagaaacaattgcatccgactccacacccattttaaccacagaagaatgaatttgactaccctgatctgctggaagaataccagagactgagctcaaaatactgctgaaagtaaattcagtgggcttgagattttctttcaacataagcacaaaaagttccattgccttctccccgaaaccgcgtcctgcataactcgaaatcatggaattgtacacggccgaatctaaattatttaattcattaaaaagatgtactgcatcttccaatctgttgcatttggaaagaaggtcaatagcagcactcaaaacaatgctattagacaaaaatcccaccttgcagcagaaagcaaagatttgcttacctttatttaaatctctcatgttacagcaaatgctgataactgtcgacattgtaaactgatcgggtttatgttgagtagttctcatcaaatagaactgatctaatgccagttctccataccctgatctataacaaccccaaattaaagagttccatgagatggtgtcaaccttcaccattgtcaaaaacactccaaaagcataatcaacatgtccaagttttccatacatggttatcaaggagtttccaagcacaacatttgataaatcaagaacatttcggattatgcagccatgaatttgcttaccctgataaacacacgaagcaagcgacaccaaaatcgaaaatgtgtattgattgggtctcacgcccgcattttgcattttcaagtaaagtcccagtgcataatcaacaagcccatgagacaaaaaacctgaaatcattgaattccaagtaaccacatctctaaggggcatttgatcgaataccatacgcaccctctcgagacagccatgtctaaacaatccctttaagcatatgttccaagatatacagttcttgtaataaatatcatcaaaaaccttcaatgcatcatcaacagtcccaaactggaagtaaacatcgagtgagcgatttcccagaaaggtatgagtgttaaacccgacttttatcaactgggcatgagtgatcttgacaaaatctaaagattttatcgtccaacatcggtctaagatgtaagagtaataagaaagagaagtcctgtggtaacaacttacttgccttagaattgggtgcatacaattgcactgtcactatttaagcaatagcacccaatttatgcacacaaaagtaaaaaaaaaaaaaagaaaaacaagattgattaggagttgtgaaacaataaaagttaaagtgtgtggataaatgaaaagatgagagaaagagagaaaaaactaccaatgatatagaattccaatatgtaaggtctatgattcattttcataaaggaaaatgtaataaagcattaatactgaattgatccctaattaaacaaaattgttttattaagaacaaataagaacaaaaaaatcacgagccct

SEQ ID NO: 378147 - DNA, 1071 bp, Cannabis indica
attaataatccttcctttctcagacttttttcaataactccaaaaacacaaatgaaattaatccatacatccatctctgaaatctgagccccactctcggccagtaataaataccctagctagtctgtccacacaatttacatcatcaactcctaattattaagccaaatatatcattaataataataccaaaatccaagaattgaatacgaggaaaacatctttcataaaaacaataaaagggaatactatatataggaaaacaaaacattccaactacacactaattatcacttaatcagcacattcttttatatatatatataaatcacatcaaacatattgtatttatctgattattaaaactcataggattaaaacttagaaactactaattagtataaataaacatcacagagcaatacgagataaatacacacagttttttttttcgataatttacattaaacataacatttatctaattacaaattatattcttataaaacttaatacaaaaatttaatatttaagtaatatttttatcacaaatataaaaattaatagttttatcattaattttattattattttattgtataaaataataaaaaattgtaagtgatttataattcaagataataattcaatttaataataaaatatttaaaatagtaaatgtagaaagtagaaacagtgcatttattatgatttaaatttacatcaacgtttacaactttatatcaattttggcatacaattggaacaaacttctaatgcatgtctttggtcattgtaaacttgtaataattatgagaaatactaaaaaagcattaaagtatattattggtgtttagtatctttctggatatcatatcactattagtgtagttaagtattgagtcttatataacttaagaaaatattttttaaaaatattattaactaattataatgtgtcacctataaaaggtgttggacactattggtgcctattagcaatgctcattataatatattgagtactattgctattgggtactagtcactacaagaaatgtcactttttcc

SEQ ID NO: 378148 - DNA, 4157 bp, Cannabis indica
gctggtactttttttctttccatttttcaatcttgttaggttgaaatcttaatgtgaaacatttgaattgtttactgatttcggtttggcggtgattgatgcagccgtcagcttgggaatcggtccaattgatcgaaccgtatggaagcgaaagtacgagcttatatatatatatatatatacacatgtttttgtgtatttgacattagtttattggtaactctaaattcgtgatctttattaggtcaatggttactcttgctttgactgttcttacgagttcgcaagcaattctgattgtatggtcaaagagagctggaagatacgagtacagtgttactactgcgaatttcttggtcagatttgagctggagttagctttgattttttaattttgatgttcatatcaaattcagacttattaagcttctttttttcttctttacttgaatgtaggtggagagtttgaaatgtgcattttcgcttgtggctttgggaagaatctggaataatgaaggtgttacagaagataacaggtgttcctttctctcattttttttatgactcggctttgttaatttgagaagaactcaccatatggattttcttacttctactatgaatctcttatgcaaaactttagtcatatgtatggttttttttacttcatattatctaaaattgtccatttgttctagtatttctaaacaaccccaaagaaatcttatccgattttataccctctgagaagtggtatgactgactccacccagattgtgtggaataattgctttttgttttttgtttctatgatgtttatagttttattgataggtaatttggtaaggatgaatcgagttatgcattaattttatgagtgtctgctgttgtattagattaagtacgacggtagaagaagtcatcgtttaccccattccggcagcactttacttagtgaaaaatttacttcaggttggtctcactaagttttatctcctcattgtagttctggtgttctttctttttgaaatttaactctctatctattgtttttaatgtggcagtattacatctttgcttatgtggatgctccgggttatcagattctgaagaacctgaatataataagtactggtgtattatacagaataatactcaagaaaaagtacgtgatcttattctgcttggcttgccaatgaccatatttgccattgttatgtaagattggggaaagaaatgactgaatttatggggggcaaagagagacattagtgagcaaataaagttcaattgaaattgagaaaacatgtacgtatgtattgtcaataaggagaaaaccatgttttatcggtacaaacatgaggagagctgcttttggatgtgagactggatggactaaacaatttaactttgtataaatgcagcggagagttgtcatattatccttgcaatattcttaacaagaatcgtgttctgattacttcatatattgcaggttaagtcagattcagtgggcggcgtttattctactatgtgcaggatgcaccacagcacaactgaactcaaagtaagagtctacagcatcattcaattacatctttgtgtctccttgagtatcaaatttagcatgctggccattagagtctgtttagggctctttggttgtttgttgactatcagtcaggggttgaggatccctattgcttatacactgtccatcactcttaggttaataagtttatatcattataaccttcccgaggataaaattcaactatcaggcaacattttaaagcagctgcattaaacgtctcttacacatatttatctcttgtttgtttggcagttctgatcatgttcttcaaacacctttacaaggttggatgatggcgattgtgagttttcaatagctttcaggctctcgtctctttccaaaaaaaaaaaaacaggttatttattcgtgatcacaagtgtttgtaccaattttgcaggtcatggcactcttaagtggttttgctggagtttacactgaggtgattttcttgtctttcttataatctctgctctttgttttaacctaggtttgggttcacattggattcaaatgatttttagaaacactaataaatagggactcaaacctccactgagtcaagtggtatctgagtgtactgaaactgaaacataactgtttacgaaaccttgttttatgctgcaggcgataattaaaaagcgcccttcaaggaatataaatgtgcaaaacttttggctgtatatttttggaatgatcttcaatgctgctgcaatattggttcaagattttgatgctgtgatgaacaagtaacttggactctttctgttttccgatcctgctttttgtaacaagttctacatgtctagctcaccaattaataaatttttgtctctgtgttttaggggtttcttccatggatattcgtttattacagtactgatgatactcaatcatgcaatgaggttcgttacatgtcaattctagcttgtttgatttagcaatagttttcttattctatccgcgctaacaggttcgcacctccagacatttcgatactggtctattaccactgtacacttttgctttaatgttgaaaacttattatgatgcaaaatctatccaaaatctgacttatggcatgaacattttttattttctcctcttcttatgagcatatatgttaatacttgagttttcgtaatcatttattttctttattctctgttgttttcagtggcattgctgtatccatggttatgaaatacgcagacaacattgtaaaggtaagacttggaataagcatatttatatgaaaaaaaaaacagtagacaattaattatgatcattagtacacttgtttcgtaattgagactttcgcatctatttatgtaatgcgctaagaaacaacataccctagcaagtccagtatcaccctattggtgctatgctattgttgttgttgctgttttcttctctctggtccatggtgctgtaatgaacaaatctctcttgttgatttagcttcatcatattctgcaggtgtattcaacgtcggtcgctatgctgctcacagcaattgtttccgtttttctatttggcttccatctatctcttgcctttttcctcggctcaacgtaagttcgcctgtcttatattcaactccaataaatattgtatagaatttgttcaaagtttatcttaatctaattaagaatgtttattatgttcatctcttaatcctttcccagtgtcgtctccgtatcgatatacctacactctatcgggaagctgcaaagatagtaagaaggaccagaccggacctcctcttgctacctctctatatcttatattcagtcgattttaacgacaacggttagttcatataacaaatttttcattcatatagtgtaaattaaagaagtatatgagctgagctcttgtgaagctgctgctggtacatggaacaacaacgatctctatttaagaagaagagcaacaatgtcttgtgataaccctttatattctcccttaaatacatacatgtatttgtgttatttatttatttatttattagagaagctttctatcatactgtctttttacacataaacatgtataagaatatatatatatatatatatatatttaatgagtagatgattaggattacagattaagcaatcaagagtagactagaacggtggttttttatattgacaaattatactgattgtttgtgaatgctttttcctccacagcaacagcagacgtaaagagatactcacaactttatgtgttttttttaatgaaagaataataataaatgatttttgtgttttttttaaaaataaaaaaataaaagaatttgaactttgcttagacgaattccaattagatgatcccattcccactagttataacctacattactacgtacatgaaattaaaaacccttttaaaagtgggaggaaagattaggggtaacattttgatttggagtaatgggcatccattcttatttgggatatgttacaaaatagcaatgctattaggcaatttaatgggaggtaattacactctataccctttttatattatcttcttttatttttgccttcttttt

SEQ ID NO: 378149 - DNA, 3159 bp, Cannabis indica
gtgattctggtaaccaggttccactttctgaaaatgttgagcctaccgatggtcatggtgtttgtgttgaggtatggttattttaccgtttttgttaagttgctcaacactttttgtattaacactaactttatgtttcctcccctatttgtttttatatttattcttagatgggtacaacaggtgtcaatgttgattctaatatttaacttgttgaagatcatccaattgtcgttgaagaaactcctcttcttgacaagaggaaatctaagaaaccaatagctttgacgtctccgtttatggagtttgactcttcacgatctgcccattttttttgtgtttgaaatctgacattgattatgggtttgtttttattttgagtactttttatctcaaatggttggaaggttttagatctaaatttgttgtttgagatctgatttttttgtttaaatttgatgtgatttttttgtggtataatttgaatattgaaaacaagttttggtggtaatggtggtgggtgatgctcctaggtggtgggtttgaagaagatgtggaaattttttggatttttattatttttgtataagttaaattaattaattttatttttatttgatttttaaaataattaatttatatattttaattttaaaattaattatttacaatttttaaataaaaatattatgtggaccaatcttaatatgtaacgtgtgtacaaaaatgtacacataagcaatcaatattggcaattaacggtaagaaatggatgacatcttaaatttgctaagattgaagaaaatacggcacccatttattctcttttagtacaaaagcggaacttctttcgcagttcaaccttaaccattatttttaaaatatttaatcgaatggttgattttttttaagggaggaattccctcaagggaaaagaagagaaacaagattaccaattcaaatatcaacttcatctaacctcaaaactaactttgccatttcgtgcgcaaaggtgttagtcgtacacttaacgtgggagattgaggcattgaggtgtgataaagtcaaacgaatctgcttgattaggtgtccaaagagggagaaatcttctttgttggttttcaaggcgccagtgatcattttgtagtcatttttgatttgatggatgggaaaacattcttgaaggcaccactgtagagatgtgagtatagactttgctacaagaattgttgcatctcctcctccactatgaggcaacgctattactgccactactcctccttcgctgttatgaatcactcctccaaaacctgctttatgattgatgtgcagacacgccgcatccgtgttaagctagaggaggtcgggggggggggggggggggctccaagagaccctggtagcttgtggagcatctagacctgttgtgtgtttgatggttgtagtgttttggaattctgtcaggaagtttttcgcaagaacaggtatggcatgcagcgggtccgtacgttgatgcttgatcgccttattcatgttgtgccaaataaaccaagaaatgcaaagaaaaaggtctacatctcttttgttcctgctagtataaatattataagcaatttcatgaaaagaaacataattaggaaaagaaaaataaggataaaaaatactacttttccagattcttcgaattctcttgcaaatgattaaagaatgagagatagattcttcttctctattgcaacaatcacaaataagggtgtaggtaatctttcttaaaaagaggttttgtttagttggaaaggtagcagtggaggctctgtacgtgaagttttttagtttagaggggaaattaaaatgccaaaaggctttccaccaatgggaaggggaagacggggtgggatatcagttggggaggtattggagtaacttaagtaataccccgatttggccgaataagctccagataagcttccagataagcttgtcttccatgggctggagagagggatggggattgaaaggatgttattgacaatgtgaagggggtaagattgacttaggtgagaaaagtcccatgtcatgttcttagtaacgaaggaccaatattaatttctcaaaatttctctagatgccataatacctcgggccccaagagacattgaactatgttccttcagagatcaaaaggtgaaagagtttttgctatacatagacaaaaacgtacgacacaaaagagccccgtctttcgaggccaacttccacccaaaattacataacaaagccatattaaagtcttcaaagtctaccattcaaataccttggagttccaatttgtgccaagagaatatcagcaaatgaatgctcaattctagttgagaagatgacttcaagaataaaagtgtggagctccaggaatctgtcttttgcttgaagaactgtgttgattaatttagttctattgacaattcatgcttattggagtcaaatccttatccttccaaagaaagtaataaaggagattgagagtatatgtagaagttttctttggacaggaaaaagcaacatgaatgggcctggaaacatcacttggaaaagtctatgcaaatcaaaaaaagttggagaaattggttttcaggatatagcaaagtggaatcaagctgctgtagcaaaacatgtctaggaaattgccaccaagaaggataatctttgggtgaagtgggttcataatgtgtacattgatcaagaggattggtgggggtacaaagcccctgcccacagcagttggtattggagcagaattgttaatacaaaagaagtagtgaagcttatcatggccccagatcagttcactgcctcagaattcaaaattgcttctctgtaaaagctgttaaaccagaagaagaggaatttccatgttagcaaacaagtatggaataggttaaatgtcccaaaacacagctttgtgctttagattgcagggcagaataagatgagaacaggagacaggctacaaatgtaatcaccgctttactaattggggttagtaaaggcaattagcactaatttctgacaattttacaattatttatgaaattaattatttgtggaccttgatattagaaatgagcattagagttataatttctcaatttcggagatttt

SEQ ID NO: 378150 - DNA, 6590 bp, Cannabis indica
aaaaaatctcttggtaaaagttccataagtaggtatgcttgaattaatacctttataaaaggatgcattactaaaattattgacaagtccaaaagaacttaggaagccaagtcctaaccgagagtttgaggtaagagcacaatgggatccatctccacaacttctgataagatgaaaattttgtccaattttcgcctgattggtcgagattatgctagacaatttgacttttttaaacctaatcagagaagattttctacctctgtcacttgtcccaaaagatgaacatggtaaacaagtaaccgggtatttacatattgcattgcactggagctgaaacaccaatacatccaacaacatcaaaaaaatattgtatactataaactaaactcagaaacaaaacagagtaaatcaagatattgaatttaaaagtaaaatccaagaaacaaacaaatgagaatatataactaacataaatagctcaaaatgatttgagacttcattgtttttaacatgaaacaatttttcttacggctaaattaacctacctagtatattattggtaaacacaaaagcaaaaagataaaagactcaaaattgatgtaaagttcctcattagaggagtgttacgacagcagccgaaaaaaaaaattgttatagctaagtattgaagagaagaagtttaatataataatgaaaaccataataaatttaagaaagcaggaagaagataatgaaatggagattaagaaccttagccatgaaagggcggagttgcagagctgatgaagtagaagggtttgagaaagaagcagaaactgtggttgtggttgtggttgaggtggccgaacacaaacccctctgaagctgaatcatagccattaaagtttcatggttttgatttaagatataaatttgtgatgatatatgtatacagttgagtatctagaaagagatggaactagaactggagctggagatggaaatggagaagagagagtagggtagggtagggtggctcgtgtatggcaagggtttttccttctggaagaaagggttttggatgtgttgtaaacacattttctttcatttatttttattttatttttatttttatttttattttaattgattattatttttagttgtaaaaaaagaacagttccatgattccatttttttcattttcaattttatactgtacctcctaaatcttgtctctccacttatctcaaaaaaataaataaataaataaaataaaatttctctcacccaactttttcatattcttatcttatttatttctaacaatttcactatgaatctataaagaatataaaaaatattcatttttttatcttttcattttaataaattttatagtaataataaatagtgacattataataaatattaaaatgaaatttactgtgtattaaatttaatacaatttttagcatgagtcatatattttttagaacactattttaagaaaataaaatataaatatatatgctaaaatatacttgtttacttagttttttggaaaccaattaaaaaatagattaagcttaaagaaaataattaaagataacgaagacaatgcgttttacgtgattggatcgttaatgagtcttagtccacaagtcaatattattgagctctttggtatgaagtattttacataaaagtgttcttgccaaatttttaatcagtgtttacaaccaaaaattataactccttgcatgaagggtgaatgcctatttataggctagagttgggttttcgagtgaacatagactcgttagagtttgcatgttgaataagctcactgatggggtaataatattataatattgacattgggtcgggtaagtgaggcccaaattagagggttttccgttgttcgtacgggttcgtacagtctgatgttgacaggtggccatgcgccaccgatcgtgtacaataaatgtcagagtagtggatgctggacaaaaggtgttttgcttttttgctgtgtgcctttctcaagtctgacacaggggacaaacccctaattttgttagatttagtgtcagaggggtgccacataggactgttcccagacactttcttgctcctggatgcctcttcgactactcttctgagattaccctcgactgtgtttctttgagtcttcacttctctaagcgaaagtcatccttccaggaccaaaaggtctgggttcgtcgatgtagggttacagttgaacccgaagctttaatttgactctatttgtgggctgacccattagttggtttgggcttggtgaatggacccgtgagttgatttaggactctaaaagcaaatgtgtcacctatctagaaactcgaataatatttacctcttaagccttgggttaggagtcgtaaaggcttgcaaccactatctagattcgttgcggtatgcggggccatgagttgttcaggccctttaaaatttcaaggtggaaggacgtaaaagtttgtggacctttcatattctatgagtggagtacaagtgtcattggttccttggttcgtgtgtaccacatgatttgtgggagcgcgtgaggtatcaggttgtaaactgacgactggttatgtcatcgagattttttaggtgaatgtcatcattattgcaccttaattatatactctgcatttaatggcaacttttggtattcctggattgttggatcttgaggattgcattttctcatatttgatctaggtcattggatcaaaagtatgcggatcaccactttgcatataaatgagagagaggatagcccgtcaccatttttagccatttcaattttttcacccatatttcagagagagaaaaccaaactaagatcccaacaaaattggtgtatgtctgatatcgatacagagcttcacaaccgtcttctctaactctaatcaagacttttcccgagcatgaccacattctcagagacaagtctcccctctatgttgttatcgtcagacttccaggcaaacaccgacgaattgataaagcattttaaaggctttcaggcaaggcttcatcttgcaacccagaactcgacacctcagtcccgactttgacacgtaagtacctttgtcttgtgcttttaatgtagttatttgtggggtagataggttttgggtagtgtttataggttgtgatgtcatgcattttggggtttttatggattttatggtgataatttgttgcatgtttcgccttgtagggtggtttttatgttacttgtttgtcgaagaccttaagaatcgataagaacacttgaacttagaaactttgccatgccttaggaaaattgatgctatgagaattttgtattttctattttttgcactatttgtcaattttgtgaggtttgacaaggtctttgtatgtgttataatgactggtttttcttgttcgggacccttatggtgtcgaacaatatggtcgtttagtccctttttgcttccttcttgtgttcccggtctatcgtacaggagcaaggttccttgagaaatttgctcctggatgtaaggtccgttagggacctctccgagtagttatcgagaaaggactatctcgtaccctttatacatgtcttattgtgggatactaactgcttggttttcttatcttttaactttcatgatggtcgatgaagatatgtttaccgagcaaatactaaatgatcaagacgcggaacaagttcccaacatggaggacttgacactagaggaaggcaatttgtcaccatgggaaattgatcacattcctaacaaatttcggaactatcacatgctgaaaagctttgagaaagaatgtggccttcagagcatccctttcctattctggaataggctttccttgaaggactggaaggcaaggtcattcatcgacgactttggcacttggagttggagccacgttacagttggagcccatttcccattgagggattatttcacccacttcatgactgcagtaggaataaccaatttccaactgatgtcgcaaagctacaagcttatgacaggatggtatattttctgcaaggagcgtgagattgaggttcctactccgaaagagatcctctacttctacaacttaaagtcaaatccaacgaagaaagatcgcacctgtaatatcccaaaaaatattgtaacatttaattgggtatattttattaactatgtgattatatttataatggggtaagattatgatcttacttaagttaattgtgtgataattagtgtaaatttaataaatgattaaacaaagcgtaatttattaattacgaaaattttattagattaagtgggtatagtaggtagataccatttttaaaataaaatattttttgggttcggggactgtagaaactcgacggtgtggtcggaagtatcacgacaataaaaggtgaactgaattagaatcataccgaactactttagattttaagttgtcggtttggcgagattagctagaaaggaccgaaatgcccctaagccttaacttattaagtgattagaaaaatggcaaattagtcttttcttagatgggattttgtccttttgtgattaatgtgtgctgaaatagaagttaattttaggtttatactattttagttgttagctagatagataaaagcttagtaacttagaaaaaaaatcaagaaagacctacacatttccttcttcctttctcttccttcgaaaccctaggaggcagcaggagtcaagcaaagttatcttcaattttaaccaattctaggttgagctagttaacctaagttgttctacaagtttgaggcaaattcttctttatttcctgagtttggattaagtttaggctagggttctttggattttagggttgcgaagttagattgagtttaggatgtgtttttagatctaatttggggtttgtttgagtttatattgagtgaatttagtggttgtttgacttgaattggtttagatgaagtttaatgagtttgatttcacttgattatgctattttgctcaaatggatgaattgttatgaatcggtactctgaatgcaatgtatttatggtattgaattattctgggaagtttaagcaggtttagaggcgatttggttggatttttagcgcaaaaccagagtttcccttttcctgtaggaaaaccagttaaccggtttcacaggtatagaaaccggtcaaccagttttgccagcaaggggaaaccctaattttggcttaattttgtttggggtgtttttcaaagcttaggtttgggtattttagtgatgtttgagttagtttggatcaatggggagttaggtttgtctagttacaagaattaggatttgttcctatatttttgactaagttatttattgagttttgttgtcgtgacataggacccgaaatcgtcgagctttgtttccattcaggtcggcgcacacctaattactagactgaggtaagaaaagctttaagcatcgttaagcatgttggtaagaaatgattattatcattggtgcctcgattatgattaaggtaatgattgttgttgttgtgactcaattatgatcgtgggatagatacggtcattactgttatgagtaattactcacttaaaactgcagataggtttcttacttatcgtttactttatgggcaacgatagtgacatatgtagctagtggataacgagtggtaggggtgctttatgaggcactgagattgtctcatcttatagacatttaattaattatgcattgctgattatgtgttgaataatgagtatgtttattatgtcatgttgtggttacttgcatttttacattaagtgtgatttgatagcttttcttgcagtctccgcgactcacgagtgcttcgtggtgcaggtaaagggaagggtaaagcggatcaaccatgagtcagaggttttccagcagtgtacatatcaactgcggggcctcggctaccagtggacaggatccacccttttggctgtattttgaattataaccctttgatgtaatactaatgttgaaatagactgtaaaagctttacacaggggatccccatacttaacagtggttatattttataaaagttatgttttatctttaataaaaagtttttaatttcactgcacttttcttagattaataaattagattataaataaatttacaaaagcacacatgtggcgtccctaagagacaggacgttacagcaccaatgtggccttttatcttttgaagaagcactccaaagtgaaatgtttgactagctcgtggcgccatcctcccgatatgagggagtattgatttttcacttctagatttcctttaaggaggcatccaacacctacattagacttcaacgtagttggtaagtgtcatctttctgtctctctttaatcgtacttttatatttaatgtgatctaacccaaaaattcccttttatcttcaatttatagatgaaatccctcgtcccaaatagtcataattccttaaagagtgacatgcccattgttgacctcgaaaagtggccaaccgaca

SEQ ID NO: 378151 - DNA, 8033 bp, Cannabis indica
tagtgaagtcatgacttttatagcaatggacgaagccacatttcagaattatatgattaaaacttttgtggatggattgcaggatggtcagctacctgagaactcaattcatgattttgctcatgaccttgtgaaagccttgcagtaagatattttagacacgaaacatctcttactggaattgtgcatatatttaactctttttgatctctcaatatgttaaggtatttgcattccaagggaactatttattgtgatttgaaaccttcaaacatcctaatggacgagaatgggaggacaaaggtactaacacagtatcttttgtcatgtggtggttattgttgtgtggtttttttttggaatgtttttgcttaggctattaaccagcagcttttatttttgttcaatgcagctatgtgattttggcttggctagaagactgaatgaaatatcaaaagttccttcttcttcggtaggtcattaaacacattatatttcaatcattgaatctaaatcctttatttccataatgcataaatattattgactggagctttcatcataatgcttatattcagttgccacaagcaaaacgtggaacaccttcttatatggcccctgagttatttgaagatggaggagttcattcatatgcttctgatttttgggctcttggctgtgtattgtatgagtgctatactggtagacctccttttgttggaagagaatttactcaactagtaaaatctattctctcagacccaactccacctttaccaggttctcctagtcgtccttttgtcaatctaatcaattctttactggttaaagatccagctgaaagaatacagtggccagagctttgtggacatgcattctggagaagcaagttaactccagtgccactgccatctcagcctgcttttgataacatgatagaactatctgagaagccatctctcacagagcgtaatggtgataataaacctcaccaaaatagaactcctcctaaatctcgtgaaagaaatgttaaaggtgctgtcaagcaagatgagaattctattttggcatcaaaaggttctgagacacctgttaagaatacaccaggtagtcgtagaattcaaccaaagggtgctggtagagttcttgaagagaaaccaaaaattaattctggtgctgctaggggtgtgaaccttttaagactctcaagaatagcaaaatcaaatttacagagggagaatgagaaggaaaactaccgcagacccatgtgtactactactgaaaatgattctgaagtcaaaatcgagaacactgatatggaacttgattttaatgagaacactgaagatgatggacaggatgaagttgatggaactgacaaccaagcttgtacacctgaagataagttgactaatgagaatcagtatcaaggaaaagctgaagagattgaaaacacgcaacaatcagataccagacatgtgggtgatgtgtctaccacagaggaaccaagaacattggaacatgaatcctctcaagatcacattgaagtggcagcaacccccctgcccagttatagtcctcaacttaaaaaccagaggatcagagaagctgcaggatcagttctcgagtctgattcaacaaagtcatctgataagctttcacaggctctttggcatccatcagatctttcagtgagacctgtaatgcccagtaggaagtctgacaaagtgctcgaggtgcttccctcacttccctttgaggctttgcaaacatctgagtttgtaaagatatctaaggagtctcttgatgcattcaataataagatcgtagccattctgcatggaaataatagcattatggagaaacaaaatgtgatcagataccttgagatgttgagctctaatgctgatgcagccaatctcttgaccaatggcccaataatgctcatgcttgttaaaatgctccggctgtccaaagtatcggccttgcgtatccaacttgcttcattgattggtttactgattcgacattccacttttattgaagacagtttagcaaattctggaattttaggttcactaacagatggactaagagataaacaagaaaaagttaggagattttctatggctgcattaggggagctgctattctatatatccacccaaaatgagcacacgaaagaaaaatgtcccttagaatctccatcgaaagacaacaagccctcatctggctggcaggtaagcgtccaaattttttgcagtcatatatcacatagttagcacacctgatcatgataacttgattggtattctgtgtacaagttatattttcattctcactgttcaaaacccagttcgcattttatgtaactcgaccttttattacatttttattcataatttgaagtcttaaattaattatgttgttttggggatgattctggctgttggatggtttatttcctatcttttatgtttttattttcttagccttacttttttttatgcaggtcccaaattcactaatttcattggtttcatcaattctgcggaaaggagaggatgatatgactcaactctatgcattgaggacaatagaaaacgtttttagtcaaggagcatactgggtgtctcgtttcaacagccaagatgtgataaataacttgtgctatatatacagggctgttggaaaacaggagagtgtgaggcttactgcagggtcatgtctggtccgccttgtttgtttcagccctcaaagcattcaatcagttgtagaaaagctttcttttaaggacatggcaacggcccttatcaagggtagtctacgggagcagcaaattggtttgaacctcttaaatacagccatgaatggaagtcaaatgtttacaaatggcagatatcttttaccattggctgaggataagaatcttgtgccaggtcttctgtctcttattgaacaagggagtgaagttttgaagggaaaagcacttgtttttgtagctctcctttgtaagaatggcaggaggtggctgccacaattcttttgcaatgcaagactactttctgtggtggatagattggcaaaagaaaaggatagatacgtgcagcagtgcttggaagctttcataaatgtcgttgcttctactatttctgggttattggatatcataactggagaaattcaacaaattatgggggggagacgccatggtcacacaggtaacctttccagtcgagctacttcaaagaataatatacagttacttcctgtggttcttcatttactgggaagctcatctttcaagcgcaaggtagttaatcctcaggtgctgcagcagctggcaaatctaattaaacttgctgagtctccatttcaggtaggttgctgaagtaacagagcaattaacgcattttcattagttttaagtacttgtgcattttcagtagtagaccatgttatacttattcatgtattctggacatgcctcgttttcaagtatatgcaattaactaaaaaaacataacaaaccctctcaagtttttcacactatttaactccgaagaaactagccacgtggatataaattaacaagttattactagaatattcaacagtagctttgaagttgaaactcattcatatttcaaaatgagagcattcattctggattttaaactttacgcatgatttgtatgctcgacttcttaccacgacccaaatagtaatctgatttcttatttatttatttttgaaacagcacatctttgctagcacaattatatcttcaaacaatataaagattttggatgtgattgatattagtacactgactttgcatatctttccatttgagttgcagggtcgggatgacttccaaatatccctcctcaggatacttgaatctgtctcagaggagtcacctgtaattgttgaaagccctgacatttttattcgtgaaatccttcctagtttggctgttctatataaaggcaacaaggatggtgatgccagatttttgtgtctgaaaattttgtttgatgttatgattaatctattaaatgaaaattttgtggagcataggtcaaaggatttggagctcatttccagcaagcatttccttcccctctatccctctcttattgaggatgaagatcccatccccatgtatgcacaaaagcttcttgtgatgctcatagagttcaatatcataaaaattccggacattctacatcttaagacggtttcacaatgctttgagtttttgcttggcgatctctcaagcgcaaatgatagtaatgtcaagctttgtctggctctagcttctgctcccgaaatggaatccaagttactttctgacttaaaggtagcaaggaggattggtaatcttctggagtttgtctacgctaaggacatggaagatttcctagaaccaacacttggcctctgcaaggcttttcttcttcgggcagtcaccagtaggaaagacttcaactacactgaagaggctgctctcttaggtgacagtactgctcaggcaatcagtgcagttgatgatcagtatggtattagagatattgcagattttggaagcaatgtttcggtcttgctggagttgtgtggacatcatggatcaagtttggcagatatagcttctgaatgtttgatcttgctgctcaagtcagctccaagagaagccactgctggtttattaactaatctacaaaaggtccttgtgatccttgagtcatggagtagtagtaggggcagttctcaattactggtgcagagaatgctacattctcttggttatgcttgtaagcagtatatctcacaagcaatgatactgtctatatccataccagagatttcaaagatagaaactattctttctgagctcaagagttcaggaattcctgctttaattactgcagcttcagatgttgccatggagttgcagcgcctgcctcgttgcatttgaaatcctggaggtttgtactatcttatttccttccatcatttctcgaaagaaattaaaaaatgttttttaatagctcttttcattgatttgcagcactgagcatgaaagaaagtcatgctatctgagtcccccacattagagagatcaatgactttacacatttgggtgagtcaaattctttctgcgttgtattgcaagatcaccaacctcatcttgagggctctctttttcttctttgtatacctttgtataaccattttaatgcaagtgaacttctaagaattttgataaattgaacccttctccgctatgtacctatctcaattatttccatattaatagggcagatactatataattcagaagaaattgtgagtgatgtgtttactcagttgcaataattggatgtttttctttctagcttggtggagtgtttcattagccccaatatcaattttttatttttagaatactactatctaatttctaatcatgtaagctggtttcacttagcaaatacctatcaatttgattaaactttattatggttaagagacttaagtgtccaaagtcctataatcaaaataatgattgttgataatgacaacattatgcatttcaaggcactttatttcgtattgtacaaggtctattttttaatattgaattttgtagaatcacggctctaaataattcagcacttttattgttaggcttgtgaagtgtgaacctatcttctcataattaaactcccaaacttttcaatgatttcccttttctccatcattattaataattttaaatttaattcaataggacctcctttgattccggattatcagaagacgccaaaatcaacgggccaaaaaagaaaattaatccccccactaaacaaatcattttaaaaatattttctaccatctctctcttgttaacatgctttgccaacctgtgttttctcatcatcttccaatctcctattgccacgtggtacttgaccccacgtagagtatgtagtcattccctttttaaaagcctcaaatcatagcttcaaccaaaaagctccacacactactacactcaaatccctctcacataaatattcatattctataggcaacactcactcactcactcattcattctccactaaagccctgataattgatgatcttgatcatcatcatcattagaatggcctcatctttttggttccatttagtactaatcattctcatgtccatattctcaatctcttattcttctcagctcaatactcaaccctcaacacttgttccttctccttcttcattctcctcaaatcaacctccttcatttcaacaactatccccagatatcaccccacttctgccttcccctggtggagttttgcctactccaacagtctcatctgttccaaccattccctccaatccaagtcctccaaatcctgatgaattagccgccaccgcagccggccctgccttttcgccatttggaccaatgccggtttctaaagcaacagcagctactaccttagcttggcctccaaacttggctgcttttgcaggctttgcagcatatgtgtatggctttatgcaactcctttggatgtgaatttaagaattttttctatttcatcttcaatgtttttcattcttttcattagtctaaaataataaataatattatgtatatgtaattaatttagtgcctctcctttgtaatgaaaagagcatatattatgtgatttagtattaactttctttctacttcaaaaacatacatcttttattgggaatagcatttaaagaaatgtctttttagcggtaataggtgttcttcttgtgactatttaatcttctattgtcacatgagttggaacaagggtctttaattaggcatattatatgaaaaactcaaaatatagtaccatgtgacacacaccaaaatgaccattaattaggttaaaatagtccacccacatgaagagcaatcaataatttttcttttcttttctttttttgacattaatcaaatgatcttttaggtgacctgtttttgtcttgttttcactgtcaagcatctttgccaccaaccctaacactttcacaatctttttcccactatactaaacacttattcttattataactattgccttcatcccttggattcttttttgtaattatttgtttattaagaatagtgcaaaaatgggttagtttagttagttcaaatagctctgaaaatttagtcacattttcacatcatattaaaactattcttcttactcaaactgtgtgtgactcattattcattcatgtgtctcaaattatcaattaataatttgaatctaaaacaagtgtaactttgataagtggataagaaattatgacatccccccctccttcctattatttttttcaaaatctcaaaataaatattgttagaaagtctcatattgattgtgtgtgagaatttaatactatttataagagtatgaactactctactaattatcaattaatttgtgataaaattatattaaatcacacttacacattctataatgtttatgattttagttttttttttccttaagaaaattattagacttttaagtgtggtttgttgagtgcagtgtgtagacagtggtaagtactaagcactaaacaaactactactcttgacaaaaccgaatatgtcccttagcagttagcactatagattatggagattattattattattttgaaattatgggttaatggtagtgtgaataatatttttgaattaataaaaaaatttaaatataattaatattatgatttattataaacaaaatatcatgaagtatatttaatttgtaagatcgattttttttaactaagttatttttatgttattgttaatggttgggtgaataatatttttgaattaataaacaaatttaaatataattaatattatgattcattataaacaaaatattatgaaatatatttagtttgtgagatcgattttttttttaactaaggtggcgtttggt

SEQ ID NO: 378152 - DNA, 8815 bp, Cannabis indica
aaattatttattttcttttctttggttaccatccaatatgctcacacactaacggagccttacgcccataaaacccatttattcttttttattgaaactactctgtagtgtagtgtagtgtagtgtaggtaattgatttacagatgagaaaatgagaagtcatcgagtgagtatactgacaaatcttgttaaactatcgagaatactttttagcctgttaatctgcatttttttttagttctaattgtttgtattatttggacatagagaaaagaaaacagaggaagagaaattatattgttaaatcatcttttttttattgccaaagtaaagttcagctaatactgttgaaaatacatcgttagatatcgttttgatagaaaatatacatttttgacacttacaaatatgttactaaaaacatagaaaattaaatttaaatctgtttggatcattgcaaacgcatcgttagatattatttttgccaaaagaaattaagtttttttggcactatcgcaatgtatcattgttttttttctgaccattgtagatatgcatcattagacatcgtgtttgttaattttgacatcgtgtattaaacaaaaaaaaaattctggcactaccgcacatacatcattaaagcattaattttttgttgtaaaaatcgtttcttaatattgtcgcaaagtcatcgtaagacatcattttactacaataaatggactttttatcctagtttttacacatgaaaaaaaataaaaagtgggataaaaacttttgatcccacttttacatttggagtcttaaaaaaaaattggaacaaaggccttgtttggcaaatggataaaaaacggtgttgaaatggctaattttatgcatttaccaaatacaactttagttcttaaaaaaaattggaacaagggccttgtttggcaaagagataaaaaaatagtgttgaaatggctaattttatgcatttgccaaatgtaactttagtttttaagtgagactttttattaaaaagttccacaatatctgggcctttacatatataaaaagaatattaggttttagggttttatttacacatctcattcccagtcgtctctctctcctatctctctctaagcgatggtgcaacctttctctctgctattttttttcttcttcgtgcttaagcaactcaacctccgaaacggtctactatttttttcttcaacctccaaagctcgagccatgactgaaccaaaaaatcaacgacaaatgacaaaggctctgctattttttttcttcattttatatatcgatccaaccactccaactgtagatccgagattccaaccccgaaaacccaaggttgacatcacttgaactctttttacttctctgtctctctttttacttctatgtttttatgtggctcacttgctttttttttcgtgcagtcggacggcgttgaacaacaaacttcagtgtggtgttgatagtttttaggtttattttgtttatatttattttttaactattatgaaaaaaaattaggttttattgagctccacacccatatttgagctatatgtattgaattttattgattcatgggaatatttcagttcaaaatattttgtattttttttaattaatttgtaaatcaatttttgttttgagtgtatatcgattatgtatatccatttcttatttaattttatggaactgatataaatttttttgggtttatttttttattatatttttgacatttaatttcggtttttacataaatattgggataaaagatctctttttatcttagtttttatatgattttttatcccactggcatatatcccgatttttattttagcgaaaaccaggataaaatgcccttaaaaactggggaaaaaagctttttttatagtagtgtttatggcactagaaaatatattgttagacattattttcatacaatttttttggggttttagatttaacaaaaaataaaaataaaattataaattttagtttattgaacgcgtgacttttttattttatacgagtgtgaaatagactctttgaacattgatttctatattgtaaattattcaaatttctccaaattttacaggatgtcttaaataactattgttgagcctattttttaccaaatacgtggcgaacatatgaagttccatgtggctggggggccctactcgtggggagattagcgcttcttctagagtgattttgcactcagcctcgctgattgtaaggtgcgtctgggagcaggtcccctatctctagaataaagtgtccacagattacttcagccatccggtaagcgataagctcccagaatagagactctccaggactccattatttgcataacacggattccaaagcaaataattgtatatgacgaattcgacgcatgattaacataactacaaagccatactgctctgacgacccatttacctaaacacaataaagtgacggcgatgcattgtcatgtcagctgcacatgtgacaaatcttgtctcaccaaactcctactatggaggttaggcagcacctagagaccgaagggagatgtaccttttccctccttttgactcttctttttccatataaatacctggaactttaatggaaaaggggagttttgaactcacacacaaaagtgagctcttatactataacttaaatattttttgatcaagggaacattctcaccataaataaaagtgacttgtagactatagttcattaatattggaaccatgtaaaaaatcattcttctattttgcaaatcattattgctcatattaaattaatagttgccaaaaatctcagtcaatattttggtgctttcattgagagttgtatgaaactttcacgaagaagaaacttgtatttaaatgttgttgacaaggaacaatcaacgacctcaacaaccgcctgataacccggcacgacccgaagaggagataacttctcggatagatggtgaagggggtgataccaatgatcctgattattcaagggaaggcatggcacgacctaccctcaagaaataaaaataaccatcagggaggcatggcacgacctacccacaaaaacaaatgtaaccaccaagcttaaagtttaatagaggtgaaaaataaaaagtgtcatgcacacttcaattaaaaataaaaggcttggacaaattctagctaaaaggaggcatcaaaggcctcattgtctcaaaaggaacatgattaaggccacatggccaacagttataaaaaaaaaagataaatatattgaagccctgggaaaggctattaaattgtccccccccccccaaaaaaataaaaaagtggctagacatatccacaagtaaaagaaaaagaaagagagaaaatgaaaaggttggtgaaagttgattcaataaacctagtcaattattgcctaggagaagccaaaagaagaagtcgaagaccaccaatcttttcttgcaatgccacttccagctctttgttcttttcccataagcgtttgtaaacctcctcaggatcaagcaagaagttgagagaaggcacaaacttgttggacctccagcacataaaaaccccgtcttcatagtgcttgacgcagtgtttgcaagtggccaaaggtggcacgtggatgactcatttggctgaaacctaatttactaacttattggagtcttgaatcaagagcaactcctttagctcaactgacatcttggcattggactcgaggtccgcctaatgaagctcttgcaggttcttcagttggccatgaagggtctcgatctccagcttggccttggacaggtctgcatcctttttaagactggcttatttagctgccaactattggacttggcagtcctagtaccctttcaaggagttctccaagttagtaaccttcttttcatccctttccctcagggtcttttcaactagaacgttgtccttcaagtcttccacgtccttcctagccttttccaactctgccaacatctccccagccacctgagatcctatagttgtcgcataactctgatctattaagttcttcgagaaacaaccaacctcaacagcagcctgaaaaaaagggaaaaatgtataaacattcgggaaaacgttagaaattgtggatatagagtaaggtagatgaacatgactcaccgaagccaaacttcaatcctgagcctagttgacagtgttcgttgaagcacaaacagcaaacctcttcacaggtagctgaaccaattcagctggaaagttacttatgatctcagagacaaacaaagccaaggcagaccccacatagttggagaaccagtcagtcacggggtccaagttcaaattcaaccttccccggtatactcccctcggagggccgcatcttgatatttatttatccaccactttaaaacatcagcctctgcagaccctttggtttgtgcatccacaaccaagttgtaccgagctagacgcaacgcggcatgatctgactccagatggacaagagtcagtgggattggggggacactcaagaactgctcagcttcagaaggaatgcctgaattagggggtgccttaaagaggagtcttgacaatttttgctcgttttgaagaagactctgaggaatccttctcttttcgtttccctctcctaggaatcaaaagggttatctccccctcctcgagtactactacctctaaatcctctaaactgacctcaacatgccctcttagagtcactacaacgtatagagcacttgtaggcggagtcgcttcacctcctgttggaccaacgtcaatcatgtaggatagcgaaagtctcatccatcaaaggaactgcaaaacacacaatcaattcgtcagcataaggcagtaacaaataaggcgtgtagccacaacaaggttagagaagcaacaaaggttatggagaggactagtcctacctcggcgccctaactctgtcttagaaaattggtaaaccaaatcactagagtcatcatcccctaagtagctatcaaaggggagaaactaactcgaaactaagtaagaagaatgatccagcaagatatggacatgaaggcttgatcccattcgggacctgcccaagagtcccctataaatgaaaaatacctaattttctatttgttaccccaccaaaagtgggacatccttaacctattgagcctctcagcgaagcctacaggtcgtacatgggagtactctcgaacagatggaacatgaaacaaagttagcagagacttactgaccccagaagggctggttcttggagtccctatgttgggcacagggaaaggaaattatgggcgtggagccttggggctctttcctgcacctgcttccctctccattcgctccgcgacactttaggccctagcgatcaatcatcctccgccttctgcctgtgacaggcgttgtaactcgtctccgcatcctggatagttttagccttgagccctctaccgccttatctcgagcattggggcaagtgtctacactgaggttaaagtcttgcacactttgaggacccaccaagaggcctaccctacgacaatttttggtggtcactaggtctctgacgttgagctcttccttggacaaagtttggaatacaacctcatggtctcgaaagagttgcgtgggggctgttcagagtagaggagggattccggtccactcagtgaggagattcggattttcaaaggcctagaaaccagaggaaaagaaaaatctatgtctaaagccttttacattcttctaaaagttatacggtactttcccatcaataatgtcataacaaggttgtaaagaataaaagtcatccttaaatttgtctctattttttgggagagtaacgagttcagaaaaatataaaattttaccgagagtgggaacatcccacccctatcgctataaaaataaataaaccggctagaagtctgtagccaataaattctacttattgaaaacaatgtagaaaggttattagatgtaaagaagtggttagccgataaattccaaataaaagatttggaagaagtaagttatgttctcgggattaaaatttatagagatagaaagtagagaacattagcactttctcaagcaacttttatagataaggtgctagaaagattctcgatggagaattcaaagaaaggacaattaccgtctagacgtgggattactctgtgcaaggatcaatgtccatagagtccgcaagaggaagaggacttgagaaagtacccttatgcatcagcagttgggagcttaatgtatgtttgttgtgtacaaggcttgacatgtgctacgctatagggattattaatcgttatcaaactaatctaggtttggaacactagattgttgtaaagcacattctcaagtatcttcggagaacaagagatctcatacttgcataatccggtggagagttgaatcctactggatatactaattatgattttcaatcagacaaagatagtcgaaagttgacatctggatctgtatttactcttggtggaggatttgtagactggagaagcattaagcaaaccagtattatagattcaaccatggaagccaaatatctagcagcttgcgaagcagctaaggtgtaatgccctgactcacagggacgccacgtgtgtgcttttacaaaataaacttatagttaatctatctgtttaagaagggtgcggcttaattaaaaacttttgagcataacttttatacgaaatactgctgaatacggggatcccgtatttagaaattttaaaaacctggcccaaaaccattattacaaaatacggttacattttcaaaatataatcaaaagggtggatcctgtccactggaagccgagacaccacggttgatatgtacatcgttgggagacctaactcatggctggtccactttcccccttccattttacctgcaccacaaatcacccgtgaattgcaaagactcggcaagaaaagcaagtaaacacaaacacatacattacacattacaagaaaatcatggcaatgcatagccaacaatttcatcatctaaaatagatattcatccaatacattattaggcattacacaaacaattaattgtcttataagacaacccaactttgatgatttgtaaagcatccctaccattcgttacccacgatctccgtatgtcactatcattgcccgataaagcaatcgataagtaagaaacctatatgcagtttcaagcgagtaattactcattcacaataaacggtaatgactgtatctttacctcgatcataatcgagtcacaaacgatgataattgtttctcacttaacatgcttaacagtgcaattggctttcttacctcagtccagtaatcaagtgtgcacaccgaattgagtggaataaagctcgatgatcctgggtcctatgtcacgacaacaaatctagtaaataacttaaccaaactctagaacaaaccctaattccaaaactgggcaaaccctaaccttcaatggcttaaaatagactatacaacacctaaataccctaaactaggtcaaggaaaacacccgagccaaaaaccacactcgaagaaaatcgagattttcccctgcaaaccaaccggtcgatcggttcaccagtacctatagagacggtcgaccagttctggcaagtaagaagaattctagttttcttccctaaaatcgatccaaatctccaccaaacctattaaaactctccagaacagttttatatcataaaaacaatgcatttcaacaataaaaaactcaacaatttatcaaaatcatcaattcaacattaaagagcaagattgagttcttaaactcaactcactctaaactcaatcaaccaagaaatcattcaattcacacacaaatagtcccaaattaaacttaaaatacaatctaaactcaaaccaaactcacaaacccaaaatcatagaaacacccccatcaaacctaactcaaaacttaggaaatccacgagaaaagaggaagaactcacctcaaagctttgagcagcagctagggtaagcaaatttagtttagaattggttgattgtgaagaaaattgctttaactcttgctggctcctagggcttcgaaggaaagaagatagaaggagaaagtttataggattttccttagttaagagttatcttaaattttctaaataaaaacaattaatataaacctaaaattaatccctatttcagcctaaaataaactcatgtaggacaaaatcttaaattaagtgaaaatactattttgcccctcttaaaccctaaaatctaaataaagcctaggggtattttagtcattctaactaccccgactaaactactatctaacaaatactactagttcggtataattccaatatacctcaacttttatcgcaatgacatttttgaccactctatcgagttttcacggccgccgaacccgaaaatattttatttcaaatggtatttacaatacccccataatccgataataacttcgtaattaataaattacattttatttattcatttattagattttcactaattaacttacaattagcgtaagtaagattataattttactccaatatccgtataatcacatatttaataaaatatgcctaattaaatattattatattttccaaatattgcataagggatcagttgttggaaatattttaccaagatctagatttactaccaagtatgttttattaacatcct

SEQ ID NO: 378153 - DNA, 5751 bp, Cannabis indica
gctccaaggacttagacaagtgaagagcctgcaacaacttcgtatatggcggtgtgatagcttagaggaaattccaagttggatcaacgactctaattcgcttaagacaatttcgatcaagctatgccccaagttgacagtatcgcgtgacaaacttagcctcattatcagttcaaaaaaggtggagattgaggactgtcctcgactttctcacattgcaaccatgcttaaagatcctctctacactcaataattcaaactcccctgttgtttcaggtattgtttatcagtttttcaatttcatatttgttaaatgttgttcttttgcttatgatattttcattaacaacttgtctgaatttattcagtcttatgaagctgtttgtttagctcaattttctttcatttttacaaaaatgagctttgcttggaaaagataaccctacatattcattttaattattggaaaagaaaaaacacactttaatatttaaataaattgcaagaagaagaaatcttctgaagcatgcatgaagaaatctttgtgctaaataattgtttttatgataagcaaacttaaagtcacttgcttggttaccatggaaattggaaaataatcattcttgttatggttcttggatgattaaacatgcctatagcttcatcgcattcacattatcttactctggttttgataattgattttcagtttttttacttattcaggtggaattgcatggttgatggtgttgcttctaaggcttgttttctggattctccaagttggtggttttggttgtgttgagtttgtaataatgtcattattgtgttgtgttggctttgtttggtttgtgtttttatttctgatgacattattgtattatgatttcttagtttgatgaatgaaagtatagtgtatggatagtgccttggggttttttcagcatatgattatcttatgctactttttctccttgattcttactctaaaacttacctaatgagctttctgattctaattggttctacagttttgctgttatgctatacatgagttatacaatcactataattttttctttcatttaataatcttaataaaagattttggaattaaccaacaaaatattttcttacctaatatttgtgggaaccaaaaaacttagcctaagtccaaaaaagtatgggagcccaccagaaaagaaaatagaaagacttgtcacctatgcaataccatcctataataaaaatgtaatcaatttttgagattaaaaacttatctatatcaaattggactttttaaagacttatgccgcaattatctttctctaatcattaattaattatttatgtctcaataattttaaatagttatgtaataaaatagttatggttaatggggagcattttaaaatttatgctcaaagaactcattgaagaaggtagggaaaatgtaagaaaaataaaaagtggacaacaaaaataataaattaattttaaaatttaatttgaaatttttttttgaattaagtgacttttatacaatttttctttccaaatgacaatttattatgttttattttctactttcttttcttctacattttctctactcgttttttcttcaccaaaatttggaagccttgtggtctcgaggtgcaacacagaaaccagaaaaactacaagttatggtaaagattatctgattttgaagaatactagttccccaaacaaggtatatatttttttctaacaaattctaaagaaaaaaaaaaagaaatcaacaagagaatttgtaaaatgaacaacaacaaaagaatttgagctcagtgcagtacttcaccatctagccacttaagtgctggaaaagacttgcccaaaattgacttaaactgttcatcagcaatggcattacccttgacatctaattgtttcaggtttaatcctttaagtatcagaacggcatcccaatatttcattacattgtcgttcccagcaacgatctcgttagagttccaactattttcttcagtatgagacagaggagaaggacatatataccttgttgtatcaatcgagtgtgaacctatctcgttatacgaaacatccaacacttttagtgactttatcggtcttaaaggtgccagcgcggtaaaactacgaagtttgttgtaactcagatttaagcaagagagaagctgcatggcctccaatccttgagaaaagagcccaaaagttagcttccaaataagtggttgatgatatgaacaaaaacttccactacaaaaatctaaagagtaataattcactttataggatgaagtaaatgggtgtaccttcaattgattgaagttggttgtgactgagatccagtacttgaacccacaataatttctcaatagagccaatccttgataaggataagttatttaaacgtaaacaaacagagttaccaagtggtgacaaagtcaagtctcttctatagtgataacaatatctcagcaaagactcccaactggaagttacctgaaaataatcgaaataacagaataaataaggctttgagaattcaggcattcagcaaatgaaagttctctctgctaagaatgcatggtacctatgacacgtacttttgcaatgaagaaacattacataacccgacaaagcatgatgaaaatatacttaggaatcaccatcatgaatagagagtcctaaccagaacagtacttccataaacagaaaaaagtaatgttagagaaaaaaaactatacaaactagcaacttcctaccccagaaattggacttgattaagcagtgtgagcagtgaactaacagactaaaaattgcctatctatgaatcagattcctaattgctacagcatcgtcaaaagcgaaagttaaaaactaaagagaaacaatcacctgctcaagaagcactaggctatattcatccttgtaatacaatgagtggaatggatctagctcaatcaaatcagtataaagtgcaagagattcttctgaatggaccctcttgttagcagattgagacaaaagagcatcatgagccttcagcagccttgctagtgtaagctttccaattttactatccccagagagagaaaaaaaaaaagcgccgttattaaggtacaaaattgcttaagcatatttctttattcaatgaataagacaagcttaccaggttatctctgacaataattccctaaagagggctatttcattagttatagtctctgcacgccagtcagaagcagtaggctcatgatcctcattaatattaagtttacccaaattaacaaatggactaagctctggagattgtgtttcaaaattgtgaaaattttcatctttccatgaaatcaacccttcatcctgcacttcattcttctccttgctaagagactgtacacaaactttaaaggctatctttgtatgatgattatatctaaagccacctgaagacataatgccttgagaatttccgaggctaatctccatatgaaaagtttctgaatgctggggctctgtgctagggaacttcacatgtgcaatccaaactttggaagcattagaattatttgtggaaatcggtttccagacaagatcgttgcttgtgcaaaatgaagattcaacagttactgtagttgagcttactccttcaactacttcactaaaataaagaataagtggaaatgtttctgaatctgaatggagattttgagacgaagacaccgaaaagctagcatggcaccactcttttgatagagagacatcagaaccatgagtgggccaagaagaaataagtaaaggagattctattttcatcgtttgatcaagaagccagagataataaaaccaagcactctgatcatctgggtcagtaaaaatagcttgatgcacaagctcatattcatcactcaaagccttctctttcggaaagaacccttgaaccttcttttccagcaaagaagaaagaagtaaactgcatgttttcaattaattgaaaaacagttttgttgacattttacacaaagaactataggtgtataattttgtgcatgaaatacgcaaaaagtgaacaacccacacattaaatatacttgcatatcatttatttaaaaatgtaacctaagttgatgcttgaaacacatagctcttgaaccaccaaaaccaatgccagtatttgactagaagcatgacagaaagaatagcatgatctcagcttgctcaatcagacaaaatatgggatcgacatcaatcttgtcaactaaagatttttatgtacatacctgcgattatgccacgctgaataattactaaaattgtgctctatcatatcagttgtataattcaattcatcctcctctgatctcttcataaatgctgccacaaatctaagaaaatttgtaatcagtacacacacattaagaattcaacaattgcagtagatctaaatgggagacccctaaaacttcacctcctgtaattccaagcatggaaattcctggcatctgctttctggaatcggtccagaagccgtaattcatgatctattgaagaatggcccttgctgagcacccatttcctatgatgccaagcaccataagacttgaaattctgcctcaatgcgccctctacctaaacaaaaccaactcaaatcatcaaaagttgattctcagcattggttactcagaaacctaaccttggcaacagtttcgcagaaacacaccaccactaaaataacaacaataataacaatataatagagtaccactctgagttcttcatcaagaacagatttgaccgagtcaggatctaagtcggactgagtgagtttgtgctggaccgcgagctttctgtaattccaagccgtataggactcaggattaatctcaagaagcttcgcattcacatctagggcttccttactgtaactgaaacagtttctttccaatgaaaaaaccaaacgacaaaacatatgcatagatatgtacatctaaatatatatatatatataatcagagtattagagtaataaagaaagaaatcgaatgggaagaaatgaagaataaacttacttgcggttatggtgattcgaaagaaagagagattggagagcttgaagcttttgagctttggcagcagaagcaacttcatcttctggttttaaggctttacgggggcgtccgtgcatttcttcagttatggatcaccaattaaactaatagactggtgaagacagtgaatggggagtgagacagaggacgagagagaagagatgagcagatcagagaccgtggaactggaatgtggtgaagactgaaaagtacaaagaaaacaggtttcttttcgggtacaaccaaaagcatgataacagcgtgtgaaaccatcagtctacccaattaggagcccttctcaatgtttcggtttggtagcaagagatagtagtggcattctcaattgggaaatttgcggcaaaagtctccaaaaagttcgcgttgatacagattagtccccaaggtccaaaaatagcggcaatagtatcacactttttatttgtctgttggtctccaagttaacagatagttaaactcaattcaaatgccacgtgtcgaaatatatggtgggtattattatttaatttaaaaaaataaaataaaaaataaaataattttaaaaaaaaattaactttttttttcttttacttttttcttttttctttcttttcttctt

SEQ ID NO: 378154 - DNA, 2737 bp, Cannabis indica
aacaaacaaacaaaaaaaaatagccacaataaactaattaaggtaatttagtgaattttgatagatgcttatttgaaaccactatgaacaaacaagtgaataatttaaatggtttcatgatgaggaaggttcagcaccatcatgtagagcacaacaaacagtggctttgtggtgcccttgatacactcttatatattcaccagttgacatggaccaaagccttgctgttgtatcagaggaagctgcaacaatggaagacttttgagacaacaacattaaagaaaatgacattgttcatcatattacttattgaacctaaaaaatgtacaagagataatgaaccagttggtttggtttgaagtttttagtagcaaaacaagggtaattagagtaacaacctcgagataaacaacgaattcaatacctgttataagataagcaccgtcaactgagaacacacaatcccacacccaccgttgatgtcctacaatattaggaaagaaaaagtaacacatcaggtcaatgagagaatatgaaattgatttattgaagattctaaatttgcaagaattaccaactagagtcttctccaatgtaaaaccatcaacattccaaatcttgacagtgtgatcagaagatgcagtggccaggtatctaaagtaaacaaaaccagcacaaataactaaataaaaccatgacaaaataaagaagagaatgaataggtataaaaacggggggtttcctgaacgaacctgtgtggctcgcagaattcaggcgaaagaaggcacttaagaatgtaacccttgtgtgcttgtagcttatgaagtggctcaaaatttgtcattgtctgcaagggaaatggaagttatgacacaagtcaaacatgacacaccagacgtcaaatgaagtgtgtctatgaagataccaacctgagtccctcgcaacaagcgccaaacataacaagtcccatgattatttgctgcaactaccaggctcccatcccacatgacagttagggacctcactgctgtatccacctctggcacctatgttaccatgtatagaaaaaaaaatgttcttgagatggatcaaaagaaaattatgacacatggaaactatgtttgctagagaatgcctacacgaggggaaacagctaggagaattttaaaagcatcaatcatcaagtaatatcttgacttgaggaagctaatagtaatagacaagagattatgacactgatgtaaaatatggtattaggagtggattatagaatcattgttaaaataaaacactgttttaagggtttcgatgattgaatcatatgcggttggtggtattatattgttttcctcaaatttcattgcgagtttctctggaatgctaagtgatgctattccatgtatcatatgccatttaaaaagactctaaatttttactcaaagccgttcccaaacaaatgggtaaatgtaatatataagtgcccaaggctagaatttgtgtgatggaacaatttagattcctaatgaaaatcttatacgccacaaaatgaagaataaataagtccaatataaacttactaattcacagctgcatgaatttgctgtcaaatcccagacacgaatgtttccattttgatccccagatatgagctctgtctgcaaaataacattcaagccagttattaacacattatagctatcaattatctaatgagaataaagaagcttcatcggaaaaatcctaattggccaatcacaacaacagatcaattagctttttgtttttgaaacatattgagaaagttttccatcactcacaatccttccactttttttgagtgacgtcaacctatccttcttatgcatttggttcctatctctttaagaaaaacagagtctttttcgttttagtttgtttaatatgggttaaaagacaatcttttaaaactatcctttattgattatgggtttcactattcttggtgagattcatatattatctccaaaatgttaaaaattcatttttttaagtggtgcataagaagagttattccatatgtgaaaaagaaacggctcgaaaacagcatttcactcaaaagagcttggaaaaacataaacaaatcatggcaacaaataagtgagtcatgtaagaagcagcattaacaaatgcaaagcatttaaaagcgtaagacggcatcaatacctgattagggtgcagaacaacagtgttaacggcagcacggctttcatattccctttgacaccctggagctctttttcaaatattaaatataaatagaaccaaatgaaaggcagaaacattagataatcacatttgcaatctaccttatgtcccaaatctttactgtgccatcctcggaacctgaatacatccatttaccatcacactggaatcccactgccatcacattaccagtatgtaaatcatagctcatttcctgttaccacaataaaataagggttatcagatgatactaaaatagtatatcccttttcccccttctaagaaaaaaggaaaaaagcagcaagggaacccgtgataaactcaccggctgagggctgttcgaattaacatcgaataatcgaatatgagaattacccgctgcagctaggtgtcttttatctggacttatctcaagcctattaacttgctaatgacaaacaaaaaatcagatccacaaatagcagagatacagaaattaaatttaaacccatta

SEQ ID NO: 378155 - DNA, 2365 bp, Cannabis indica
atcaacagcaagcctcgtcgcagtcccagattggtaatggaacctcaaagaccgagtcaagttaaggatgttcggaaaaaaaaaagataaaaaaaaaacttaaatggtatttattcatttggttggtcttctttaattgagtcatcggtgttagtatttattaagtgcatttattcattagttcttttgtctacaacaaaaacaagaagtagaagaaaaagtgttgaaggtgtgttgttttttaattaaatgtccagctcgggcagtttgtttttgagtcatcttagtcttttttcttattattatacaagttaaatttgtgttttgtaatgttttaatgttcttttttgttttgttattattattattatttatttattagtatatatttgttggaatgtgaaagtgttgtgtaggcatgatttgttttgttgtgatactagaagagtgaaactcttctttgttttcattaaggaattcattattgttattttattattatttgcattatactattagaataaaaggattgaatgaaggtctttgattccatcattgttgatattaaaagattatgaggtcataatttcacttagtgagtgagcttagatttttttgagaaatattaataatataagtgatgtttaaaacacaaagaacacaaagaatgaacaagtaaaattctcctatataatctatcaaatcccatgaatgctcttcttcacaaccccacaccacaagaatgaaaataattaacaattggatttacaaaatttactaagcattagtgttgctttccagattgcaatagctaaaattttgataaattctaaacaacacttgtagtgacagtgtctttatataatttaagagaaatattaaaggcactactagtgtttagcactcttttaggtgttatatcgatatttggtgcaattaggattagtatctaggcctaactagcgtcctaacttcaaaattgggccttacaaacatgcttcatgacactaacacttctagatcgcaatacttaaatttatggaaaatgctaaaagatatcagtggtgcttaatattctttacgatgtcatattattattgaagaaattaagtatcaatataactttatataataattttatagaatattattaagtaatgacaatgcgctaccttattaaaattcattatatgagtaactttgggtaggttgacggaggatttcggcttctagttctagggttcaattccaatggtactctctctctccaaggcactccaaatagataaaaatcatgaaaaaagtaaaacaaaattctgtttggttttctaattctatgctaaatatcatggttttaaaaagtattttttggtgcaccaagaagccataccatagtagatagcattttgtttcaagttattctcaaagcaagcatgtgaatataatggtggaggtctattcaatgaaattctctttgaaaaaagaaatttttcttttcgttttaaaagcatataatttattttattttgtttttgatattctagaatacaaataaataaataaaaattgggagtagatgaggatattaaagagtagttatgatgttaaaatgggagatgttgatagaagggatcaaaataagatgagaagattcttttgatttgtttgcataaagtagaatagaggtatccaattacttcactataaacttgtatatatcaatgcatgcacgatctatttttatacatttatttggataatataatttaattataccacctttatatatatatatataaatatttaattagtccataaatatgtttgtgatgttttatatatataaacaaatttataaaataatgggtcgcaatgattttgtttaaataatttgagactgatatatatatatataatatttataatatccgttttaatgtataagttcttgaatggagaatgtattacttcttttaagtgatagaatatatattattgctatattatttgttgtttaacaaataatatgatattaaactaaaataaatgtgatatatatgtcatgttttatattaaaatatgttgggtatatcttacatcaaaagaataagtgagagttatttttgatataagtattttacttattctattagtatgagacttttcgggaaggtgctcaaaaacaaaacaacgaagacttaaactcaaaacggaaatgtcatactactatgacatatgtgacatgctatataaaatgtatgtgacatgttatataaaatgtgatatgtattagaggcgttcggtaatatttttgttttttaattttttaattacaaatataaagtaaaatttatatttttaaaaa

SEQ ID NO: 378156 - DNA, 1759 bp, Cannabis indica
aaaaaaaaaaaaaaaactgaaaacaatatactacaataaaatcacgatgaacaaaaaaaagtagagaaagcatacaaaacgtaccagataaaaaagcaaacaaagagaaggaaacagaggggattaatggtccgataccccaaaccaatcttctgcctagtgttgctcttgaatcgttttcaatgttccaaaaacgaaacggggtttggggatggaggtggaggtgacgagatgcctatgttatagatagaattgggtgtggttcaaagtgggtgcgatgattataggcagtggggttgggtttggcccatctgggtttggaatgagatgtatgatttcacgcaatgtcggttaagaaagagaattttgcttttaatatttttattttgggtttgggaaattttatcgaacactttatgggtgccaactgccaaagccaaggattgagacgagagagatttgctctacgctgtttgggtttgagaagataagactttgctaaaataaataaatgaggtccctttcgtttcggagggaggcaaaaagagtctccatcaatcttcattcttaaatcaaattaattaattgattaattaagcaaactactaatactatactatagtgctacttccaatttattattattattattatagactctagcttgcttggacacttccttcattttggctaataaataaatttataatattattttgagaaagaaaacaaattagaacaagatgtaatgaggttaccaatacaatactctctcttatcctcctaaattttatctcttcccatattcttaaatttagatattttattttagaataattagtaattttattattaaatttttagcaatattaattatgtctcataaaatatgcagtgtgttaaaaaaaaaattggaattttatatttataaaaatttggtctttttattaagttttatctcattattctattttaacattaacgtgtctttataaattagcaacgttaccagttaatttttcgacaactatcaaatcatactcctttaaaataaaaatgagaaagattcaataattttttttggtaaatcttaaaaaaaaaaatagatcttaaagaaaattaaaaataagttataattttaaaactaattaagcgatttaaagatattatttatttattattaaaaaatctatttaaatataaaaaaatatattaaaaatttaatttttgtaaaaactaaattttactagaaaaagtttgagtttatttttttctctaaaaatttaaatttgtttaagagaacataacattttttttattggaattttaataatttttggtttaattttttgaaatatgtatctataaataaaataagttttaagaaaataggaataataagtaaactgaatattttttaatttaatattttatcaagttttaaataatttttattaattttttagaattaatatgacattataattcttaaaattaattttttttaataaaaggggataaaatttgtattggtcaaaatttatggggtaaatatactaatttttaacggtaaaatgaatagaatcttataaaagagacataattatataactattatattttaggagaaatttttaacaagtcgtatattttaggggacatgattagttagtatcaaaagtttaagcggcaaaagtatacatattttacaataatatatttttagggaccggatttttgtcccgttactgtacggaca

SEQ ID NO: 378157 - DNA, 8649 bp, Cannabis indica
tctctctctctctctctctatggtacggtacatgtgtgatatgtagttctttcctgaattttctttttaggcgtaatttctgtaattttcctttgtattgcttttctttgtgatatcgtttgttattgatacaatacaatacctcgtaaattgcttactatgccatcgatttgctacaacttcatttcattaattttgcttttttaagaaattatgaatagttttgttgctgaagttaatccgaaaatatagagctttatcattgttactgagagaattaggggttagagaaaagtatatatgcaatttaaaactttgaaaattgaaacttggtacatattttgggtaccatttggcaactgacctgagaatagactgacgaggaagatttgctcatttcattttatgacaccattgttggatagtgatgagaaagttgaagctgcaagcaaaatttttgttgttatgtttaaaaaattataagaagttaattaattataaaagtgtttgtagttatggtgtggtccatgaattttcatactctggcctattcaaagttttcatactattaaaatctagtgtttaatactgaaagctcaaccattaaagcaagcttgtttttatattgtatggaacaatgacaaactttgttgggttattgtgctccttctttatttctggttgtctttttttatgcatattcactacaatagcatactttttttgttagcattctgtaacactaatggatcacatgtatgtttatatataatctgagtaaggttattttttctggtcgagaagtactttaattttgctctggttttgttgatggttattatagcttatcattttggaaactgctttagtgtttgtttcacttatagtagtgatatatgtagatacatgcagaataaagaggaacttctgcatcactaacaagtggactacaggctctcacttcgtcttcccaagaacccggtaaggttattccactctgtcccagttagggctgctgtgtgtcgttgaaaaatatagagatgggaaccaatgattttcagaagaagaagaagaggaaaaataacaagcttattgagctttcccaagaaggtttgtctgcttaacttatgactttttttgttatatttttatttggtgtttgtatgtatcatattagttcttcaaaattgtttttgggtcttattgggaagacacatggttattgaatttaacaagtcacagccatggtttagtatatgcttttaaattgcatttttctagtttgggttctgtcctttgttgcttgagagcatagattttttgttctgcagtacaccagatttctagggtttttagcaaataggatttacaaacttatttagtaaaattttgaatatgagagttaattaaccaaatttgtttagctttttcaaaccaaatgtttaaagcaacgaaggatcaatcaagaatgatatcttttgtatgaattcagtaaagggtgtcaaccttctaactcttatttggcttatgtctagatagaaaattaaatgaaaaggatgtcgaacctaaagcgaaccgacatttggagaagagaaaaaggaagaaggaacataatgtgggtgttggcaaatatgttcaagttccttttgatggtaaatttgtgtttttttcttactcgttaaattattttttaattgcctttgtggttgataacttataaccattgtctctaaattgcttcagacgatatttcaataagaaaagagaaaaagaagaaaggggagaaatcaccaaggaagggaaaattgaagaatacagagaacaacaatgctttgattgaaaaaacagaccaaattgattctgagactgctgatggttcaaacgaacaacacggtacacccaactcgtacatttgtttattttcctagaaccctgaattttatgtaggctaggatattctttggtttttccctgtagaagggtagtaaaatctgaagtgtcaagattagaatattgttcttttaagaaatttaataagtcacaacccaaagcaccttgttcgcactaaggaaagtgtcattaaaaccaacaccattttgattgtacctcacctaaaattgtcttttgattaggtatttcttctctagtaggtagatcaaagaaatctttgaagaagaaaaaatatcaaaattcttcgaaggaagatgactccgcagaagatcaaatagaagatactcagaatgaggttttccatgccccttcaacagatgaacccattttgataaggaagaaaggtatttagtcggttttgaacatttactagttttgaataatttgcattctagagacaacaaatactctttttatgttatcattcaacatagagggattactaaacaaaactgtcattgtaggcaagtcaaaggaagcaaagaaaaacaaaaagaaactgaagaaggatcatgattcattaaaagagttgaagtcactagaaaaggaagaagtgattaatgaagatgatgtttatcttatctcttcgggggatgaagactgttccaaaggaatgaaaagtatgcattctcaatttgaaagacttgtttttgatgtgcagtagtacttataatctgtactaacaaacacactccacttgcagtgtagaaatatatgcattttatttagaaaaaagcaagtaatataacgtttgtcgtcaacggaatctgatttttgtgcaattaggccatctctcatagcctgattaaaataaacgtttctgctaagatgtgtagatatgccttctttatgtagtttggtgggaaatctgctttgttcaaaccgtcttctgtacaccataatattttccgtctttttattgatggggaacacttgaatattttgctcacttataagaatttcataaatgcagaatggattacaaggtatcacgaaagtcgaccagggttgaccatacttcaagagagaatagatgagttcataactgttcacgaagcaaaattagaagaggtatatctttcaaagacttttgagtcacattcagtttctcttactcttttcaaccattttcttttaagcaatgtcataatcaacatgcaccataatttcttatatatgcaaacattgatgataattgcatgtttcattctcataatgatgtttccataattcgtatcaatttgaaaaactcggggttgtagggtttggcaggaagataagtgtatttggaaaaagtttattaaataaatcatatttaggaaagaacattagatgtgaaattataattcttatgtttcatggctctggaatatgcaggaaagaaaagcaagagaagctcgtgttgccgaagggggatggacagttgttacccatcataaaggaagaaaaaagacaaccgatgctgaaagtggaatcactgtcggttctgttgcccaagctgttgcagataacaagttggccaagaagaaaaccaatgaagttggtcttgacttctaccgcttccaaagaaaagaatcccagaggaatggtatgttgactcctacaactataaacttttaaagaaatgttcaaaatctatagttattatccgaaatcgttggttaaaatgatgcgccaactgaaacaaaaatctttgatttgtttcagagattatgttgctccaaagcaaatttgagcaggacaaaaagaaaatacagcagctcagagcagcgaggaagttccggccttactgagttctttcctcgtgtggagagactcgtcaagaattcattgatttttgtggtcttaagtctaaaccagaattttgacatgttgtaagaactctggcctgtagcataacattttttttggatgcaaattgtgtttttctagttaaaatcttcttatttatataaaatatgacaattttcatactatcatgaagattagaatagtatttattagaatttcggataaggtgaataggttctatctcaaaattaattggttatgagaggagtaggtcatttatacaatttattttcacattttagcaatgtgggactaactctaatacattcttctcacgtttgagcttagaaagtgtgggtacaataaacgacctttaagaaactataaggtcgaaacgtgacatttgaagaattcctacaaggccaaattgcaaaatttgtgggtgtacatgttgagaaatatgtggatattgaaacaggttgaaaaccttaacactgaaaattgacacacattaattgaaaacattttaaattgaggttaaaggggagacaacgaagtttttaagtttggctcgtctttttggactggggatactttgggattacaacggatcacaatcggcttgatactttgttagaattcgggataaggtgaatgtgggttttatctcaaaaccaattgactatattaagaggagtaggtcattcatcttatatatgataatttatttccgctaaaaattcaaacattatcatataacttaggtattattaccgctaaattccaacattactattctaattaaatcaaattataattaagaaattagctcaatatttgaaatcattattcaaatactattagtcaattggttaagtaactacaaaattcaagaaatataacttaggtattattaccgctaaaaattaaacttaaatatttatttacaaccagaaattaaacttatatatttatgccacaaattactcaaatccttttgaaatatcccaaataaaatttctaaaatcttccactatagtattttcataaaatacgttttgtcatataaatatttttttaaagatattttattttatattattttaagaagtgtccctaaaaaaaagaagtgaccctaaatgcaaatttcttttgtaaagaaaaaggggtgtagaatcccaaacgtgcacccaaacactcactaaactatccccaaccttaaagtacacccaatacaaaagcccaaaggatcttcaatcttcttaactataataattaatattaattaaattaaatataatccaaacactaatcaaatttattgcattaaattaaatttaaataaaaaaaaaacaaaataaaaagacaagaagaaccagtttgaatgggactttttgtgctatacgcaagtcttaatttttttggataattcgaagaagaagaagaatcaacaacaactttaactacctttactctatttctttccttttggtaagtcttaactttcactaatcattacacgttttttgttttattcaatgaatctttacttagattgggtccattcgcatgatcgactagtttttgggggcggaatctttgttgcccacatgattattttgtgttttgatgatttgggtgtcactgatttttgtgggatttcgtttattgaaggtcaattcgcatggttagatcataaagcttcagtttttattaaggtaactgtatgatttcagtgcaagattgtttcttttttgagtttgaatatttacgtgtgtgtgtgtgtatatatgttcatctgggattttgttgattttaatttggtgaaattgggtttttagtttttaaaggttgtgaatttgactttgagctttttggttttatggtttttctgggaatagattgcttctaatttgggatggtttgaaagaggagaaggagatgtgattggagttttagctttctaagaatatggatttgcatagtaatcctcaatctgaattggggaaattggaacatattgtttctcaatttcttttgaagagtttgcatattattttggactctaggattccctctttgtgtcgaaatgatcatagtggcgatctttcgttggtatctcgggtgaaaaagagtgacaaatggttcaatttaatactaggagatcgccctccagcattagaaaatttgaacttttggcatagaaatgtgatggatccaatgataatcgacataatacttgttcatgaagggctcaactcttcatctgtggacaatctgtacaccggttcaacagttggaacgcctgttgagacggttatagagaggtgggttgttcagtatgaatctcctagggtggtagctcctcaaagtggtgaaatttctgtctcttacaaaaagacttatcagaaatcgatagtacttcttcgtgctctatgttcgttgatgagacttttgccagcccacaagatctttaaacagctaactagttctagtcatacttataattttgatattatttacaaagtttcttcttttggggatccattcactagaccagaggagaaattcatggaagaatatagtttcacgcctgtggaggctttccctggtcgtctttgtatgtctgtaacttaccattcaagcctatcagattttaatcttgagccttcaacagcaatgccacctaagataattaaagattatgttggcagtcctgctactgaccctatgagatctttccctgcttcggataagggtgttcgtgcaacttcctttccattgagaggagttcaatcttcatctcccgtaccagctgaacgcccacacagttggacaagcggttttcacaggcctggaccctttgttcaaaaccaaacacttttcggatctccacctgcatatcgtccatctcctacatcatccgattttccatcatcacctaacgatatgtatcccaacagagttcataaccgattgctaagctatcaaaagccaattagttttgatgagtatcagctttcacctccattttcgtcgtccccatctccatctccatcgcctcctacatacttctacaatggtaataatcctaattcaatgcaaggtcgtagacattcagaaaccgcccctgtatctattccatcaacaatgacaaccagaggttctagatacctttcttcaaatttttccgatccaagtagaaattctcttcctccattatcccccagaagcactagaaacgataattcatcgcaagagtctccatctgggataaggtcattacggagattagatccttcaagagctggagaaaccccgactggaaattcaaaccatttcagtggcccgaaggtagttatgatctttctaatttagcacttttctctacatttatagcatttcagtcatttgttgtattgttgtctttgctgataactttaattaattttccttgtaggccataaaagatagtagagatgattcagggcggttttcaggaccattatcttccagcggctcaccacgtgttgggttctctcctggctccggcagattgtcttttcaggatgacatggatgatattggcttctcatgtcctttcgatgtcgatgatttaccagattttcatcacaggtacttaaattttgcgaattactatgggctatggctatcaatcgagtcattagccgttacaattttagacttggttggttctttgggtgtttgaataagctatctggaattgaagcatgtctgttttttagttattttgcattagtacaaataaacaagcaaaatgctatgatgatatttgatcaagggaaaaaaatatcttagtactattccactatctgaattgaacttttgatatttagatgattttgtggcattttaattattcagacacaattccttatgaacttttatgttagcaagctaaaatctagacttcgtttcagtgacaatcattttaagttgtttaaaatcggtttagaccatactttattttgtatcttatatgtttatttctccctattggtaattttcgattgagcagtcaaaatcttcctggcagaaaaccttccgaccccgcttcacaatcactgccaatggttcgaaaatcacagtcacacgatgcagctgtcggtgttctcgttcacatgcttaggaatgcacctcccctgcgtcaagattcgagctgttactcaacgaactcctttaaggccgaacctgatggaggaatcactactgcttcaggcttctttgtgccccgaaaggcagctgatgcactcgaagagcttcgaagttatagagaaatgaaagacctcctcctctctaaaagtggaactagggtggtttctaaagaagaagcataataataagcctgtgattttgataatgggaaaaattgcatttggtttggttacctaacacaaaaactaagaaaaactccattttggagggaggaatttaagacttgtacatatctttgactgtaaatttgttattatcatttaaacatttaatgtaatctcccacattttatttgttttatgtgtttttaaactttgatgcttaactgagttattctttcatgtgaaaatttttgtaagaaaataaaataagttgaaaagaattatatgtatgaatatgtgtatgtatgtgtattgctattggtgcctagtactattataaattatcataatattgctattagtgtaatttaatatcaagttatacatttgtatcagttaaacactaagcgtttggttagaggtaatgaaatggaatggaatagaaaggaaataattttcattctattcttttgtttggttgcattttaaagtattggaatggcattccaatggaatgctctttccaccattttggtggaatggctattcc

SEQ ID NO: 378158 - DNA, 954 bp, Cannabis indica
taactggaaggaaaccagtagacatgtcacaaccacctggtcaagaaaatctagttgcatgggcccgtccactccttgcgagtaaagaaggtctggaaacaattattgatccttcgctagtatctgaggtcccttttgaaagtgtagccaaggtagcagcaatcgcatccatgtgtgtacaaccggaggtatcaaaccgtccttttatgggtgaagttgttcaggccttgaaactggtgtgtaacgagattgaggaggcaaaaaacctaggatcaagaacttcaagtcgagatgatttgtccattgatttcagtgcctcagaacagtttccaggccccccacaaagccaatattcagttcatagctatgagtctgaacttgatgttggaaggggaatgtcagtatcagaattgttcagttcatctgcaagattaggcacagaacaatccgaatcgttcaggcgtcactctagttctggtcctctgggaagcagaaagagcaagcatttctgggaaagagtaaggagattatcaggtggcagtgttagtgatcatggttctgcatttagattttggtcaggttcccattgaatgacagattgacttttccttgtttgatttttcggtgacaagaagaagaagctcaagaagacctcctaagggaaatcatgaaaaggttaataaggggtaacatttctccatactaatgctcaaatgggatggaatttggtgtttgaatcgtaatacaaaatttctcatggcacagaaggagctactctcggctgacgtgaccaaatcctttgcgtttgagagtgaaggagaacttttgattgtaaatccagtgagtgcatttagagacaagttttctctagttacagtctacagatttgtacagaatattttgcactatgaaaatgaaatgcctgctttcaccacttccaaaatactccaaatg

SEQ ID NO: 378159 - DNA, 18873 bp, Cannabis indica
atatatatatatatatatcatatgcagaacaaacctttgttgccactttgaatcaaaagtgaaagagcaagtagtttgaattggactttttcatggcctataaatcctcatagttcttgagacctgtagccgacagaatggacacctagaaacagctgaagagcatctcctacaaaggacatgcccacaaggcaccattgtcatatcaacttccgccgtcaagcacactcgacatacccacgctgcctttgctgtatccgcttcctttgctgctacatcagccttttcctgcaaaattgttcaaaatcaaacaaacaaacaacaacacttttcacttgaatgaaccaaagttgaaaaaaaacaacaaatgatgtaataaatgaaaatgtcaaactataatactattttccatgattaaaaagatgagcattaatgagtgactgatagcacagagctcactaacaagtaacaacactaacctgctcaagcaaaagtgctgtctctgaatcttttagttgttcttgaagtgttattgttttttgcagaagtgattgcttctctgcatccatatggatcccaactgcagaaagcatctcatctactgcttgcaccagttcggctgctgacactcgaccgtactggagctcattcccgagttggcgctgctaaaagagaaggctttcagtttgatgtgtttgaccatatgaatcaatataaaaaagtatcatattatccggactttttaagataaaatgtaaacgatgaaacaatgaatgaaaacacatcccaaaaatgaaaggaaaaaggaaaaggtgaaaaagagagagagattgaacatctgaaaagacagccatgtgaggagagtagagaagcccaaacctgggaagatcttgcttggactcttccagagctttctggaacttcgctatgacctacgccatgagctctatgactctcatctggcaacattactgtggtctcacttcccattgatgtgcttctgaatgacataacttgtgaagagagaagtggctgtgtttcgccaggtgaggtttccaccttgaatctgtatagtgcttgtcctgctgatggtctaacatcctcagggaccctaccatacttgagtttttctccattttgagatcgccatgccactatttctccagcataaaatggtcttaatgggtgaaattgcacttgaagagtatcttggggcagtaaatctttccctatcaaactatttcttccacctgaagcttccatttcatttttgtcagaacgaagtttcaaaatatcaacaattgccgtttcagagcctccaggacagacaaataaaggtccaatgggtaatggggtaggggaacctaaaacctggctaacaacaattgcaatcacatcaaaaactgaaaggaatgctggaggttcagcaacaacaatacgagatttagatcggtcaacaaaataaagtctttgatcatgggatccagcagtacactccgggataatagaagcattggctgcacgagtaatttctatagaattcggaagaagcaagaaacgagtatgaaggcacttaacaaactgcaattttccagcaacagattctaaagaattttgtatggtctccaaaactacattatttagtgcaggaatgtagctcgccatgctgtttacaacagtccaaagagcaccctgaaatgatctgtttaatagtttttctctgatggctaagagcgtaactgagccaatacattcaagtgtttgtaaatgctcctcatgaactaattcctgcaaccataatcaatatttaatcaaagactcaaaaaattctcccttgtgagataattccaaaaatatgtacatattcataaagatagtgtataatcataaacaaaaacaaagaagtttcattatataaaattacctctgttactacatcagacaactttttaatccccagaactaaacataatctctctggaagatcggggtgaataaatctgatccttgaagtttcaatgcttttgacaaatcgggagccataggagtcaatatatacacaagatttcgcatgaacgagtctgcagccatcatctggaactattgcttctgacgtccaatgggacccatcagccccatcacagataaaatataaaatttcaaacaccgcacgaagctcatttgggtttaacctctgataaccacaagcattctgaagattcaaaagaagatccttggcagatgcaactgataatgtatcttgtagtcccaaatctttgagaacctttacgaaaggaagataaggggtaggaagttcaaaagcaaaaggagacaagttaattgacagacgtgcaaatagtagatttgctatcaccaagcgtgtcccatttgcagcaggtataaaaggcactttctccaattcttttatatctgcataccattagacatgaattgagtgataaagttgcattcttacaacatgtgtaattaagaggtaaaaaaagaagagagattaacacctaccagaagaagagagagaaccccaaatctgatccagatacttcagaacttcacaagaagcttcatcaatggtcatcatgcctgatgcagttggccagtgagcaagtgtgtcttccccaccattctttccgataacctataacacaactatgcaagttaatttcatttcatgcattaaccttcatattcttttatgattgcaaaataggcccaacagttacctgcaagtgctttaaaactgttgaaaaagctggagggcttctcagctggagtgagccccaagagtactgaggaggtaccaaagttttcttcgaaagaataggagcacaactccaagccaggggccaatcctttgacaaaatagcttcactatatgaagtgagcactctcttgccacccttcctgccaccgacatctggaaagccaaattcagcaggtacacacgcaatcttgccaagatgattacagaaattattgccatatagaacagcaaaatttgataaaattgtttcaatgactgaaccggctaatgtccatatttccactgaaacttcagcctgtgagccagatgagttgtcaaaatcatctaaatcatcagatttcatgcattcacttccaaggaactccattcttttcgcacattccagtataacatctgcatctgcagtagttcggagcccaacctttcttaaaatatggagccaaccatctgtgctaaatctttctccgggaaatctttttctctcaccagagaaaacagatgtaataaagaatcaccagatcaaacaattctttaggcttagatagatccatgcaaaattcatcagcacttcttacaaatttagtttcttttaaagcttcaactaaagaagaatcttgttgaatctcatgccaatttgtaaacagatatattagtatgtcttcccgttcagactcaggtttgtttttcgaacccaggcaacccaaatcgaagtaaaatctgttgatcatgcaattcagaaactccaagtgcttgaagtagtgaaaattcaattgagtctctggaataagaaaggcattgctcatcatatggtttgagaaaagaatttgaagagacaatacagtgatcatttccttgcaaacttgtgtatgaccccacaactgttttatatatagatagagaacgcaaaacctcaagttcctcccttctgtaattagaaccattagaccagtaatcattggcaaaaagtgcaagaagttcatctctacttgaagatgcaaacgaagataattcagtaaaataaccagcatctttggctgcaaccagctttgaagcaataacttgacccaatgattgactggaagttggtaaacaattgcagggagcagcacagtccaggaatgctacatcaaaaattgggatgttgcattgattcagcaatggtaacagccaagggtatctgtttttggccacttcaaaagcagaaatataagattgaactgattcagtgtcagaagcaacactattttctgtagcatttgtctccaaggcaccttctacagggccaaaattggtaagggcaggtggaacaaataccaaattacgctccctaacacggcagaggattggtctaccaaggaaagcaggaattatgggccagtctgaaaaaagttggaggtcatccaaagagcctgtaaaatttttccaaaagagccttatccattcagatgaaggaccctcttcacctcctgaacttgatgtattctcccatgaaaaccaaggagcaatatttggggccatcacatgactcacccacttttcatgaaagaccagtttcatatgactagcaagtaactgaagagagaagttctgcagcttcaataatgtttgcatcgagccatttgaaaaaatgtccgccaaggttgatctgtccagtacgtttagggtgcataaaccttgcacctaaaggtttcatcagtatttgttgttcttgattccctacccatagttcagcaatccccaactttgttaaattgtttgttgcagttggacacggtacacctttgagttcatttgcaattaagataaggttctgatccccatattcgtatctgttgtaaccattgacaacatcagttctcctgtgagtcgagggccctccggtcctaccaatatcctccacaactccccggccaaaatcaaataaagccttccccaaacttgtcaccatttcaatggcatctcctggactgtttgcattatgggtggacggatgattaggattattggtgcctgtaacagaagcagaagtactcccaacaacatgatccgctctgtaaaatgaagaatttccatttgaaatggatgcttccccaatttgaatgtcagacaaacagtactcaagaacatctagatatgtatcaactgatcgtagaacaatagatgttttagaaactcttagaagatctcggaccattttaggtttcacttctcgtataggagtccccactgcttggatttctgtcaccaactcccatggtactgaaaataccgggtaatgctcctttacaaagccacaaacagttgctggaagaagattaccgcctaccccattaccaggttgtgaaagaaacataccttcttcagccttgactaaatttcccgagtatagttgccataggggaaggtcaacagcacgagcatagaaaggctttattacctgctcaattatacaatcccaatctgctttaagaatttgtggtggaattaaattattaccatcagcaggttgactaatcaaatcatggctgtaactccttggccaaaagttataaatctgatccccataagctttcaacaatagactgaatgttcgtcctgttgactcaattgcagaactggaatgatctcgtcttaacctcaggatctctaatattaactcaacatatgaatcacggacacaagacataagctctgtgttccaagcttcaattaactgattaccagcatcagtccatgcttcagcggaggcttcccgatcctggtatttgaagagatgacgaccgccattatgacaaaccaagaaacatcctagtatagtgacaggtaactttatgccaccagatagagaaagaggagacatcagagaactcatcacacaaaaatcaacaggattgccattccgagatatatgagctgcaactccaccaataggtgccaagttgtatgccagataccgcctggatgtattaaaacaattgtgagcaaacaaaaccaagagaatacgcagattaactagcaaatattgtggggaagtgcaacagccagaactataaccaatagaaagatggcatacacaaataaatactaaatgggagctggaacagaagtaatgtattcataaggaaattacgaaactcatcaccatgattaatcatgtaagcaaattcgtcctatgtttgttgactaggcatggcaaaaattagaaaaccactaatcttacaaaggcatgtagagcacttgtggcataaatgatccattattcaaagatgatttattaatataaactacattcattgtcagaatattgaatcttgcttcacctggtattgttattgcttagctaagcaactactcttacctataatccccttaaatcaatgagtgtaaattccatgaaaaattcccaaactgaatgagataaagcatcacgcatatgagaccatttttcatatccacatagtggaaggtaaagtttcccaacgtacctatcaagagccatgtttcttgtttgcccagaacctagggtgagcacaacaagccattgatcaataaaactggtgtctccttgtttagtggtcacatctagtacattcaattttattgcggcatttgagctactaaatagcctagaaatttggaacttcctccactttttttcagaaaaaggatttctcatgatagcagatgaaggatcaatgcaaattgaaaattcttcacatggcatgtgaccttcttcctcccatgtcaagagtgaaacctgataatattttaaactacaaatgttagccatcatcaaacctacttataaaactatcaaggaggcaatgaatgactgttcacttctttacaagaaacaaaactgggaggacagaaaaattctaaacaacaccaaatagagagcttttccagctaaaagagtccaccacacgatcacattatagtgaaccatcatcaattatgttcgcttttaacttaataaaaaaatttgagttgtcaagaaagtattttgagctttcaggaccatatttgtagagttgcagaatttgttgagacctagcagcatggcaagaaacattcaacacttacaatacctgcataactgacttcaagaataaaagtgttctagacccttgctccaaaaatctgtcatttatctgttttattcttcttagtccaagctcaagtccatctttaagacagtctgatgaaaggggcatgcggataatcgttgaatctgatgatgaccatagtgtattttgatcaagaagcataggactgaattgatcatgaaaccgctcaaccaagtttgtacctgaaaatgcagcagccaagccttttagttaaaggagggcaactgaatgtaaaagttaatcatggatttcttaacgcacatacttatatagtattggaggtgacacaaggaagtgaggcaaaagaataattatcataacattaattggatcttttaactattttacacgagttccaaattgaaaaggatgaaaaatgtacagtataatgcaataaaacgaggtataacaaaagtacctgtcaaggaaaacactttggcagccggagaacgagatggaggaacagaaaatgctgaaccacgaggatcaaatatgtaaaaatagccaccggaaaccattgacagaagatcacagacaaaataggagctaagtaaacccaaaccatagttaagagtattccctcgtaatctccagggaggtagaaattggagactactaacttcctctctgctcaaaacagtgccttccaaaacagctactaaagcaggcccttgaaaatcacctgtagaacagacaatgtagggaagaagtgtcagtaattcaagaatataagaatgcttatattgcccaaataaaagaacctagagaaatagcaagaaagtttttttcattgcattctgtttcactaaaaattcataataaactaataacaaaagaatgacaccacattttatgcaaagtttgagttacctaaattgtgttgcagtaaagactggcgaggatgttccctcttgtcaaagattaggtgtagcttcttggctttgcaactatctgccaactcaagcagatcaaaaaataaaagatcattgtccccatacaaagccaacagctcattgattctagcatagtccatgcaaggaaggtctttagtcatttcttcatctactaaagagacacatcggagcgattgtacccccaacctacttgccaaatcattactaacacttggatgaacaaaacgctttccaattggagtattgttttccatccatggagcatcattatacaccagatttgacatattcattaaaactccagaaaaatcaggaattaggagtggagtgctagaaatctcagacaatttctgatctaaacaacaatctgctacagcatcaaggatgcaatggacaaaacttaactgatctgctgacagtggaaatcctttcacatcactttgtaaccgttgcaacacacgcagatagtctggaacatcaaaactaagcccaacacccaattccaagagtagatttctaaaatctgatagttcggatggaacaacatacaaatatggagagaatttcacaggagaatcaaacgcaagtgcatctgagcttacaaaatcatccccaatccaaacccaacaaacaccttctagagcatatttacgctcattgaactcaatggtaccaacatattcctgcatcttcatatataaagatggaattcccttttgtaattcagcatcaacaacagctcgtggaattgaggttagcttgagttggccatagaatgtagagagctcgatcaactgagtaaataaaacatctatgttgatctgatccgtccagccaagcctaagttgtaggtacgatgattggcattcaccatctaatatatgcattgaataggacaccatccacatctgtgacttaggtctcactagggttggtggtgctacttgacaagtagattttagccatgggagcccttctataggtggatcagcacaaacgggacaccaagcaatttctctcatttcagaccaaaattcttcttctggtttatcatcagtgtcgccaattaacaagtcaatgtttagattatctatcagattgttcttctctctcttgggagatgtaacaagtgcaatatcatcaacttcagcagtaaaattattatttaagttggtatcatgtgattcattaaaatttccttctttctgattcgacagcttgagtgacagggcatccatacaaacaagtaaattcctcccataatttgatgtttcagattgtctagaatcctggaacagagaaactgatctggcacagtcaagtaagccagtaaagccaagagttcttctaagtccaaagataactaaagtgtccaaagttacgttgtccgaaaatatttcagaggggaaatagactttattgtgtagtaccgtttgcagctcaggtattcgtggatcatatagcctgaaaagagaaaagtattacaagagtcgacgtatcaaatacccatttaatttcaacttaaagagaatacaaaagatcaggttgacttgttcatgaaggattcattaaaataaatagggagggcaatcgaaaatcgccagttatgacttaaagtatgcaagggaaaaaaatgatcatgcgccaaaatatcggatgtcccttttggggacatcaagcgccaaactataaaaacaatagttcataaaaaattataaaaaaccaaaaccttctacagtattggaatttgggaatcatagaaactgcataagttgtacctggatggctgctgccaagacccatcagctgccaaaacaaaagctaccgtagaaaatgaagatttaacagaaatatcctcttcgactagaagcttcagctcatgcaaaataactgaaatgacttcactttgcaagaagaattttgacatgcaactgagcacatgattcttgtaaaattccaccttggtaggttcttctatctctaaatactttctcaaaataatattttctttgtcagagtctgtgcgaacaaagtcatcatctaaaagatcctctcgaacaccataaggtttaagccacttaataggattgctcaaacttactagttttctacttttataggattcaaatatcggtaggtgtttgatgatgtcaacatgtagttttgccacttgcccttccaaaaaccacttggactggagaatgaaacttcgaaattcatggagctcagcttcagatgcatcacggaaaagctcctcaatgttctctaatttaccagcaatagcaaaaactgcatttaatataccagtcattgtaggtggctgaacaaaattttccaattgtggatggtctattgggaggtcagaccttaagaaaaggcatcctatcttcagcaataaagaagccatgttctcactccatgcatcatctctaatcacatgtgaattttcaacaagttgcaagagacaattgttcccaacaggcaataagggccacttagaaaaaagtgacagatcagcatgtgaagacttgagatagtcccatagaagtcttaaccattccaaactcggttgaccttgagcaccaggaatccaagtcacctgttttgcatgttgccactctgctggtagtaatttcaggaggagtttctcgagtaaatggtaagataaaaatgagatatttgaatcctctcttcgagctatgtcgcaaagtttcccataaacttcttctgggatctcattgtccacaagttgatttggaattgaaaccttgaggagaccatactcttctccctgtgcaatgtatattctttcaccaaacccattcttttcaaatattgtaaatgaaccatcagaaaggggaagcaaaggcaagccatacaaacaagtagtttgaattggcacctttaagtcaaacaagcaatattcaagagtcaagatcatagcatttctgtccttgaattcgcgtcgctttcgaatcagcaaagtacgcaataattgaggtgttaagaaatgcaatgatgggcacacctccataaatatttcaacaattggctttaaaacattaacaaggggtaaaccagtgtctgatagtacttcagtgagctcttgtgctttgttaaacataaaatctggaaatatagcatgtttggttgaaatccattggccccctctagcctctgtgtacaatacccgcaaacttaaatctgcaatgaatacatagagctttcgtacaactgatgcccaaggttgtaatcctattgttttaggccaatatgaaaagaacaaatcagatggaccaatatccaatgcaattttctctagcatacgaccataagctggggctacaacatcttcaagcaagtagagattccagtctgagcgctttttaccacccccagccatatcattaccaaaccagatgtctcttctatttgacgacaattcaaaatatgcattaacatgagctggaagaccagtattcattggcaacggcagaaagcagaaagcacgaccttgaaaatctttcctatcttgaatggaatccgtcggaacttgaaacaaatcgttattactcatatgtccactatcaacattgacagagtgtaaatatgcagcaactgacgcccatgggataaaagcatttgatctgtcatttgagtgtgtagatttattctttgttgggcctctacctagacattcagaggttacccaacagtgtgataaattaccacaagacccttcctcctttattataatcttttgacatctgtatggcaaatctttatcagtgactttgtttaacttttgtaagatttgatctttatctattccactgcggtgagtcccatcaagaaagctaaacataccatgtggtgaatttgattccatttgagactctctaatgcaatctttctgcacacgatgtaaaagttgcatttcatgtccgctgccttccttgacaaaaacagatacagttttcacattttgtagaaaaagtaaggcatcagaaacaacttgagagaaagaagcaaacaatgaaacaacatcttcgggtgcatatccttctttctttatttggcttctagcagcagcattagcactcctgaggggaaatcgaaagagggttccgggaaatggatgttgcaagtcacagccaaagtgtaagaatggagagaattggtcaggaaattgttccaaaatctttcttcccgcaaatttaatacgtagaccagggtgagatggagatattccaggcaaatgacaagcatgaggatcaaacattacaatgttttcaccagaaacaaacgtgggaatgtctgtaaaatgatagacacaattaaaacctagaccaaatcttccaattgcaaaaggcttctctagtttactttcttggccaatacgtgagattgcataaaggtcttgaggagtgaatacagaattgttgaaacagtacaatgcagggccttgccaatctgccatttcaggagaaagaatagaagaagtcccatattgagttttatccaaaagaaagcttacttcagaagctcctgcatcctccgcattttgcacaagctcatacagaatcccagggccatctgcatacatttcaagaatgtgtttaagtctagttgtcagggcttcatgctgaccaaaagcttcagcagccccagataaactcaaattcattgaatcagcactctcagctaataagatcctgcgaagagagcacacgccaagtttttctgcaacatcattagatatgtttccatgcacaaatttctgaatggttttctgtgcagtcaaggccactgtagatttaacattaaaaaggttatccggatcctctgaaccaagcaaccatggtgcatcattgtaaaccaagtcaccagcaagaaatagtctgcatgatacatctggtaaatagatcttcactttctgttcatgcaacggaacttcagcaagatgttgtacaattaatatggctgccctaagttcatgtgcatcaagaggagatgaatctttcttcacatacattctacacaaaatatcaccaaaatctatggatttcaaggattgtcgaatgccaagttcagaaaataattccttgaaaactgctaaatcaatcggtataacacgaatataaggagccaagtgcaggggaccatccaggacaacctcatcagcggttgcaaatccatcaccaacccaaatccatcgacaaccttcaagtactgccttaacaatctccatctcatctgagccgatcaagtttgttagtatagcataaatccttggcattgccaaagctaattcctgccgcaatacctgatcattaacaatctcattattttttccaagctcaagtaattgagcagcaattacacttccacctggtggaatcgaccatcccaagcaatatgataatgcagttgatgagcattctccatctagtatacgcatacttgctgaagtaagccacaaatcagtctgtagcctaacaagctttggaggagcaaccatggatgaaactacaggccatggtaaagcttgaaatggagcatgaactaatacaggacaccagcttatcaaccgtagatcattccaaaacttttcaaggttggactttaagttggaaggcttgaatatataagcagctcgggaaaacattttattcactttaccttgttcaccatccattgtatcaggtatccactttattgcattcacttctaagtaggacaaaagaaccttgcctcttgaatatgcctgttgttgatccttgtgcattaagtgttctacttgtcgggcactatgaataattgtctcatgggaaactgatgttctaaggcctaaaccttgtagcatgtccaaaatgtgagactcttggaaaataccataagggaaactatcagaatcttccaacaatgcaaataattcttcattacgtggatcatacaacatatctggacgcttaacagtgccactatgggttgggacaaattccaagcttctcaaataatctctgaaagatacatcctcgatgcacaattgtggtagattttgcaatatagaaagaataacattgtcacgaacttcagactccagctctaaaattctatttaacacatatttcttgtagaaatgcgccttccccattctctcaatgccaaaatatcttacaaaaatctcttcttcactacttgaagtgctgataataaagtcatctcccaaaaagtgctcaggtatatctgttggaggcaagtatttttgtgaactttcaaggtcagaaaagttaaactggggtgtagaacccacagcgtgaactttaaaaataggcagccttttgcaattccttatgtcagacacgttcatagagtcgctaaaataccactttgaatcaagaagaaaacctcgaagttcgtccctctcttctgcatcgaaattgttaaaaaatgttggtattacaccaccacctgaggtaacgacatcataaatggattccaaaatacatacaccattacaatcatttacataatcagataaatccgagtgatcaattccataatcaggacttagtatcttgcatccgattttaatgagtatgtctcgcatcttcttcattagcttttctgcattaatcatttttgattgtttagaagttctataaagatgcccagatatggatggtaagatgggccaatcgctgaacaacgataactcttcacaatggtttttgagatactgccaaaatagcactacccatgcagaagtcggatgttcacaagtctgtgcatcccaagagactttgttcttatatttccattcagcaggcatgaaccttgggaaaaagtgaagcatgtaatggacattgaaaatacaaaggtttgctttcaatgactttgcaatagctgaaagtctactcatcaaattatgaggaagattccggtcaatgactcgatcatgtattggttgaagcaacacgtattctaattcattgcatataaaataggaaaatccttttgacgcttcagagaataatccaaaatcaccatttgccaatggaagcaaaggcaagttagaagcatgtctaccaacatctatgtcaaccaagtcttcaagacaatattccagcaacacaagcttgtaagatttactcaaagtcgacagagatttgcattctctgagaaaatgacgcactgtatgaggagtgacaaccttctgctgaaacgtagtggcacatttcaaaagcatgttaaataaagatgtgggcaaacgcacaatgggcattcctagttgcatcagagcatcaccaagttctttactttttgaaaattcttcatcatgtagaaaagcatcaattggtgaaacccatctcccacccccaatatctgaatacagtacaggagcatcagaaatatttgcgtacaccttctcaaccaatatgttccatggctcttcaaaagaaccagaaggccacaaagaatagtacatttgtttggaatctagcaatccttgtacaccaagcagtagttgtctaaaacttggagctacaacatcttctaaaagcagcctgttccagaccgaacgaatttttccacctctgtccatgtcttctccataccagatgccacgacgatttgatgccacctcaaagtatccattaacttgcacagacaaaccagttcttacaggcaaaggaagaaaacagaaagctcgaccaatcctgagactgtcatcatcctgttaaacatcaaattaaagaagtatagggtttgaaactacaataaataatttaaataaacgttgaaaaaatagctcttgacttttttgtgtgctttcccatgaaatgaaatatgtctgatgtgtgcgaaataaatttgacaattatgaaggacaatatgacatcaattcaatgagatcctaatgcgcattgtaaagagaatctaaattcatattagtcacatcacaattagacaatatagcatacatacctaattgcgaacacgcattagaatttagagaaacaatagtagccaattatttatactacagttgcaatgtgatgcattacatgaagcttgttccatcatgcacaactatagaaataatatccaaatatagaaaattcaataaattgttaagaatcgtaaattacctgcgatgaactatcagacgtgcatgctgcaactgatgcccatggcagcaagtgaatatcatattctttagaagcagtggcagcaaaagagccaatcctactggttgctgatgccatggtttgtacaatataaaaagaatccaccttcttctcagtaaggttcccagttgctgcttccctcacaaagttcaatgaatagcagtccatttcagtatctgtagaattgattgactttgacaacctcaatactgtttgtcgatgccaaacaatatcatgattcgctggagtaacacaacatgagtaaagctttctaggatgaggttcattggcatcccatacatacatttcaacagataatacactctttagaaaaagtaatgcaaatactccttcctcgtaaagctgaagaaacatggaagaaatgtcatcctccagatatgcctgccttgatagcttacttccgacagcctgatctgcatttcttagtgggaaacggaataaagttcccggaaaaggacttgtcatgtcacatccaaaagcacaatatggaaaaaattggtctctgtacactgagatggctgaagaattaacaaaatcaattcgtttgccaggattggatgcagacacgttaggaagataaattccctgaggatcgaataatacaacatagttcccactcacaaatgatggcaaaatctgttaaatggtacactgagttgaagccaaccctgaaaggcaacacaatttaagtcttaaaaagaataacaaatccaggaacttggtcagagaaacatccatcttatataattttaaaattaaaacaaacaacaattagtttaagaataagttactatgtttttgaaaatctaaattggaagttcactatttgtaaattatatccaaacaatgacacagagaaaattaattgtttctcctagtcctagtttcttcttccacaagctttcttttcaacctgctaaagttgctatagacctctacacatttgtgaatataatgctctaaaatactctacagccttcattgcagacaattccaatccaaacaacttccactttttttcaactacgaatcttcactcaccacctctttattcatccaaaaccaaaatccacattctccattaccgtaaaaccgtaatgcatcatccacaagttttcaaacaaaacaagaatcatcaaattgaaaagtttctacatatagtaagattgaacactcgcataatataatagacagtgggaaaatcgttatatggattcccttcaaccaactgtaacttcaaataaattaaaaagcacggaacaaaacgaaacattctgtatcacattctgagaaaccaagcattcgaacactttacgtacttataattcatattgtacctttctcaaactacattaacaatgcatttacaaaaaaaaaaacaaaactacattaaccatggagaaattacccgaatcggccagtcttccaagcctggctgtgtttagtactcccaccgatcctcgaaatgctaacgaaatcatcctcagtaaaaacagcatcgttgtaagccaaaagcgaaggcccctgccactgagacaaactctgagaaagcaatgagcccgagccatggaccctacgatccagacaaagacagaccttcgtagctccggcatcatccgcgttctgaattagctccttgagcaccgtcgtcccttccggatagttaaccagaacctctcggattcgcctagtaaggtcaaccttttgaccgaagtcttctagaaggatcatcgactccgcctgagacgatgactccatcggctcttgttccctcccttcgcaatcggttaaggttcaaagtggtagaccatagaaacagatttaatcagaataaacagagaaactgaaagtgaaagaagaagaaatctcttctctcgtttgagtgttgatgaggttagggaagatagtgaccatggaaattgaggttcgtagaagtaaagagcaccgccgctgactatggcagtgagcttatctcagttttgagataacaaaaaatgactgaattttagttacttttgttttaagaaaattcacaaaacgatgaccggtgccggaggccgtcgttgaaaccgacttatcgattgctttggtgagatttgatgtcgtttgatttggagtaaaaagcaacatgtcgttttcacctttcctttcggtccaagtttttattcttctctcgtataaaagtaaaacgacaggtgaaagcttaagctcgtgtcaattttcctgtcgtttttcatgtagactttgaaagtaaaaaattgaccgtttcgttcgttcctataaacgacactaaaaaaatatattatttttttttttgggaaaaaatatatatgttattattacacaagaatgttaaggactagtttgttattttatagtaagtcttattcttattgtgttatattatattaaattaaattatatattatatttttatgtaatattatgttaaattttaatttatattaaaatattatatatttaggtatctataaaaattaatattatttttaattttaaaaaaaaaattacataaaatttaatttaatataatacaatgtaatatagtgtactaaataaaccctaaatgggctattttatcggatcgagcccgccgcaatccaaatgttccgattcattattcgaatctttggccagcccaacccgacctgccacttttgacaataatttttcggaaaatttacatgaaatatgggatttcataacaaagttagaaaaaatatggcatttttaggtttaccactcttctatggcatttcttcacatttaaaattttttatggtatttgatatgctatatttttataaact

SEQ ID NO: 378160 - DNA, 3400 bp, Cannabis indica
gtcgtagagttgactagttctatttctgctgttgtaagctcatccctgtaatctagacttttcagtctttttcaatcttggtaaaaatcttctgttttttgtatttatttttcttttttgatatataaaagcaagttgagtaggttagaaatgagaaagattaaaatgaaaaaaaaaaattaatatatgtgagatatttaattaattaatttcttaaatatagacaataactcacgtagtctttttctgtttttatatttcatttgttggttttttactatttttaataatcaataatacctttattgtaatattaaatattgatttgtttgttctagctggcctcaataataataaaaaatgggaagccaaagttgactggtcaaagagatttgtagtagttgatgacatcagacggttcatgttgcatctttttttttaattatttaataactcttccatttaagttaattacaatcagtgcaagaaatattagagggtgaaatatatataaataactattcctacactaactcacaatcaaaggctctaaacaaaatcctattgactaatttttttacaatatgactctacaatagaaattggtaaacaggcttttctttataacaaagaaggtaattacagcttttccaaaatcagtcaataaatcttgatactcgtcaaatttctatatttatttttgcagctatatagataaaagaatgctatttttaaaatttgcattgatgttacagaataacattgatgttattttttttatacaataaaaaatattttttttatacaataaaaattaaaagtacaatatatatatataatagtttaataaaaaaaaaattatatatataataatatgtgatattataattataatatttttaaaaaatattataccattgaagtgttcttagaagtaaaggtgccaaaaataatatggaagaaaaataaaataaaatattatattttagatgatgtggagatatagagcatctttaaaaaatgctaccattaaagatgctcataaaaccttaattagtgcctaacgtataattaatgttatgtatagcagtataacagtttttggtggtgtatttataatttataatagtgagccacatgaaattaatgataaccaaccttcccgataaaatgtttaatcttttattgggtaggacttttgaaattccaaagcaatcaattgccatttcttacctacaagctaattagaagaggaagggacttagaataaaaagcaagatggtatcccaatttcttttcctttttctttgaagaaaaatagcctaagagaaaagagtgtttgagaattcattaatcaatagtagtctatctgtaaagcagcatatatacaatttagatagccatgtcaccaaacataataatcacagagctagctttatagagtgtgcaatattattagtaatcttaggacaataaaatagataataggaaagtgttatcccaatttaacacatcctattgagagtgacactaaccaaaggtaaagcaacacctcaatttacaaacatcccaagagcaagaaagagttatggaataaagataactgaggaaggaagatttgttatgcattttattacgtatacataattggattgttatgcctataaatttatttgatctaacaaagaagtgatcccacacaccagaaaacaaatctccaagaacttgttagcacacacacaaaaaatacaacaaaagagagaaaccagctatggagttctttagtgcttgtgttacatcaaattagtatttacagagaggtctagagcatttttatagatagactcttggactctaaccagaacattactaacaaaactatctaacatgatcatcaaaagatacccgtgttagtaacagaaaaactaaataataaaccatctatattaattaattaacagtgaatattaactacaatatattctacacctattaactgataatttgtatagaaactgtgtgaatttgatcactacgattagtcttgagtgattagaagcaagtttagactttgttgttggtgtgcatatattatatatttgaagggctatcatgtgtcgacaccttgttgagttcaaaggttatattaaattttgtggctcatctcgcatttcctatgaataatttttcatcttttgaactagtgaaaaactattcataagtaatgtgggactaatcacaaaaagcaaatcatatttcactttttccaagttataatataatctaagtaattagggatgtaaatagctagggcggggtcggatggctttctagtttctacccttgcttcgtttaagggttagggatctaatcaatccctgtttaataaaaaaggttttttttaatcagtaaaatgatgctaaaatatccaatgtttacctttttatcttataagaaaatcataatcaaaaaatcttttttaaaaaaataatagctgtttaccttaccaaaattaataataatattttatagtatactaagtagatatttctcatggagaagataatattctaaatgtatttatataactttttaatttaaccatttttaaacttatctttgatgaaggcttgggtgggcgaaaccacatagagcgggtggtcgctctatctgaaatttagtttgattttaagtaatttgggacttatgcttaaattgggcatttatacaaatattgtacttttatttgagttacattaataatttaattgttttattaaaatatgagttgatgaatagttatttgccattttaactcatatatagttggtgatctatagttaatagacttagaatctgtgtaaagtctagctgaagtaaaagtagaagtagaagtgtgtgagcttttactgaaacctctaataaagagacccagtccaactataggatttttgttgctaaatcttctcccttactctataaataatatattgtactaccaaactctatcatttctcaattatttctatagagcgatgagatatgtttattatatcattcaattatttgtagtattctaagttatatgtaatattgtatcatgatatttaataaattttctaacatgaagtatcaaattgtaaattgtgcataatttagggccagtttggcacagctgtactgtgagaaaaagcagttgtagctgtgctgtgagaaaaaacagctgtagcaaaactgtgagaaaaaaccgagctgagtgtttggaaaattataaattttaaagtactatgagttgttaagatctattataatgataatgttataatttagtttattataatgtaaaaacttattttatataatactttattttttatatatttttaatttttttctaaat

SEQ ID NO: 378161 - DNA, 5874 bp, Cannabis indica
tttttttagaaaaaataagaaattggtcaaaaaaactccatatcctaatattttgtaaactttccacatagtatttttgtaagttctcttttagtttacggggcccaaaagtttttgagctcatatctctatcgggcataaagtcttcgggtcaacccaatttagaaagatccgaatgggatcagtatcgttggaagttggaaacttgggcgagatggcggaggagaattcgagaatatagcggttggtagtggtgccaacttcataaggcaaacaaatttcaaaaccaagtctcagtctcgctcaaacacactcactcaaaatgagacccaacattgtttctgaggtgagttctatctgatccaccactttcctttttccaatagtgtgtttagctctcaacattcatcatttcttcatgctcccagctcaattttagattcccaataggaaccctagcttttttttaatgaaggatccttttgattgctggcaagaatatgcctaaatttagattcaaaaaatgaaattaaacggtgtgattattgttaattttgattaaattttaattccagaaaagaaatactcatttattcggtttgaacatctatatattctgtacagtgaataaattgttttgaagaagtgggcttctacttttaagttttaaaacatggtcaagggtttcagttgtcttgatggattattgggttttgtttaaaatttgattttgttttcttattatgctatggaatggtaatctttaggcagggttgcagacaaggttggggcaatggtgggaaagcattccggtccttacttctgggattgtggccgtttgtgggattatttacttggtgtgtctcttggtaggatatgactcttttgttgaagtatgcttcttgccttctgcagttgcatcacatttccaaggtaataatatctctaagtttttaatgtaaaagaagttaaataaagagacttaattatttactgtatttttttttctcttgttcatgtaaatttgttttatttgtttgaaaattagctcaacccttggttatgcttgctaatccgtaatgagaaacgaaatggggaaagtgtttatcctctgctaatggttcataggttttcttacatgacttttggtgattctcacttaattgacaaaaattaggatgagaaaaatccatttttttttatttcttactgtattttttgcataattactttcttacaaagtaatgaacattctaaaatgctgaagatgaaaaactgttttgttactacttggttttcttatctctcattccatgtttgtaataagggaaagagatcgatccttcaagaatgaagagctggataaattaaagagcacgatttcattaatgtattttagtattctgaattgtgggattatatttaacatgcgcttcaaatttgtttttaattctctctcgcagtctacaggatttttacctcggttctgtttcacggctcaatacttcacgtgctcttcaacatgatggcattcgttcctttgggttctgagcttgagagaatcatgggatctgtccgcttgttgtacttgattattttgttggccatcagcaatgctctttttcatcttctaattgcacttttggtcatgtataacccaatccactcggatggttatctgatgaatgagtgtgcaataggcttttcaggaatattgttctctatgattgttatagaaacaagtctcagtggagtccaatctagaaggtggtctttcgtatcatttatatgaaatatatttatgatactattttcattagtcactctaatttatagagaaacgtttttatacatatatagatacaaatagatagatgggtattctttttgggtaaagactgtatcatctctgagtttggatgacactactggaaacaggacacatgcaaatttatgcacttataaatagacatagtgaagccagtccttaagagagagaaacagaactgataagagagtggaagctcctgatttttttttcttttttccttttattgttttcaatatattaggatagaaaaaacatagcctaaaattttgaagaaaatatgtcgatgaagctcccctaaaatattaaaaatgctattagccctccacaaaacaatttctggctccatcactgcagacatgtggactaggacaactgtgtatgctcaagggaatctctgccctacatataactctcttcttaaagaattagttagtttgtgcaactgcatatggtttactaattaaagtttggtccattttgcagtgtgtttggactatttaatgtgcctgctaagtggtaagtttataaacatgcattgatgatgactagtcaatttatatgctgatatttctataaaatgttgttatgtaactatcgaatttcatgtttcaggtatgcatggatcttgttgattgtgtttcagcttcttatgacaaacgtctcattactaggacacctaagtggcatattatctggctttgcatgtcagtttcttcgtcttctgaacactactctcctcttgtgctgccatataatttgagaatacaaatgatgtcttacatgctgtcttggcaattatgatgcagatacttatggcttcttcaacttcctaatgcctggagcagcattctattctgctattgaggcctcatcttggcttgtacgtatgcctaatggtttattgcaagtatcaattcaagacattgattttttattatattcatattgtggctttagaaggcaaaaatttcccgcttttgacattatgtcttcttgtctacagtccagacaagaaactaagtgagatattattaacattgctaaatcttgttcaggctctttattcagtattgaatagcaagtttttattgtaccaatttattcttttgtgaaccttaaaaagccacttaatgtgtcaaccttaaaacgtcttcaaaggaaacgaaaaaaagagatttaagtaattgagcttttgtttaatgaatcatttcttggtaagtgtataaatacatgtgcaataccttaataaagacgtttaaatgataattatttataaatttatatgttcaggcatgttgtgttaggcgacccaaatttattttgtgcactggtgggaatcctactagctacatcccaacacattcaacccaaaatacaacatccaggtgagttctcctttagagttaatattgatcctctatgagttacataacttgatacgttttctcttgcagtggattgttttctggaaatgcgtggaggaacttgtcttcttggatgccacagagaggaacatctactgaggtattaggtttcaaggactttttctttgtataattttggttttccatttgcactttgactagcctcgacagaggaaactgaacttttaaaccacgcatatcgatgtgcttaatcattgatgtttagggtcaactatcaacttggttttcatgagaagtcaaatctactagagtgtctatcaagatttatatttctgtctatcactatgaaattggtttggtccaactttattgaattatatcaccgaatttcctggtttgacaatgataaatatatgttgccatacctactgctttttttaaaaaaaaaaaaatagaaaattatctgagttgttttgtggaaaaaatgaaagaaagatgacaaccaagctgtggaattatggatttagtgaatatgaatggattttcagtgtaggttttgggttataatgggggaaaaaacagagataaaaatcttggagataatgttcgaaaggcatgttgttagacccttcgatcgcttcacttatgctaggagaagtaaaaggtttcactagaattaatttgttggtcagtttctctagtatatttattgtgtgtttattgttggcttttggtttggctttttgagtgtgtgagtgctatgtatatttgtgttgagtggtttagtggggggtgcttgatctgattattgattttagcatcaattggagagaccccaggctctcgaaacctgtggtaattgtggcagcttatttacttaatatcaatatcagatttcccttcactcttatattcctataagtattattttatactgctatatgtgttactaacctagcagcagcagttgggatcatatcacatgcagttgaagtataatactcaaaagtcttttaacttttggtattgaaaagtaaactactactgctagtgcttcggcctatgctctgtttccttccttaatctcatattctcaaagcatctggctgatttgatttgtgttgaatctaataaaatttgtgcctaaatgatacagtcaactgtagacagtagatttcctggggcaggaaggacacttggatctacaagaactcagacgggccctgctgataattcagattcaaaccttcaggttagacttttggatgatagtagtccaccatcagacacagcagcaactggcacaggacagccattatctgatggaaggtgttacaataataaacttaatgcacttgctttgctaaaatggatttataaatatgcttgtcaattgtttccttatcactatgacattttacttttcgtgatcaatgaccattcaatatcgaagcagtttctgtagctatgactgaaagtggtttctattgtcaatcctttttaggcgagtagtacaacatgcagcaacaactcccgggatcccaatacaaggttcagtcgcatctgaagaagaaatccagaaacttgtagctatgggatttgaaaaggtataagtctaacctactgttcttatctttctgttgcatcatcttctgtatataatatagtccctgttagaaaattgagttttgactacaaaacaccttcaaatgatttcagacacaggtagaagttgctctggaagctgcagaaggagacctgaatgtggcagtggaaattcttatgagccaacaggttcgtctttaagatttagttttcgccagtgtttgatgattcgtcattttattttgactaatggtgattttgacttgatctgcagggttaatttgttgaacctctagtgaccagtttcagttagcttgtttctcctctcaatctcatgtatgtttgatttttgtttttttacatgtgggtgtactttgtatgtagtagtttttactaattctaaactctgacattgtttggaacagaggagaaaatattctgaaacatagtaaaaacaaaactgtacactaacgaaatacttcagaagatatatcacaaaaatggtcttgtaaagatgtttggagacgtatacatgaaccggaaaattattcaattgaaaatatgttttgtagcttttgtttctcccagtagtatttgtgtttttattaattgtccctagtctaaaactagaagcagcattcatatttattgtaaccaaatatatatacaaatgttcaaacagataaaatcgcaatttcaaaagacattagatcttcaagtgtaaaactgtgcaatcaaattaattatagaaattgcaattatgaagatcttttaaatgctgggtccctagtttatcttctgtaaagttctcattcgttaagacctattattaaggtttttatagtttagaagtttggacattttttcttacttggctttattttatttttctactatatacaattggtcggctgtaatttatcaaaagaagaaacaaaacgaaacaatgaaactttatccacattactttatttgactgttactaattagtatttttgtcccttaaacctttaacatgtattaaatcatattctctgaacttttaagatcgtt

SEQ ID NO: 378162 - DNA, 2636 bp, Cannabis indica
atatatacttgagacaaaagagccatttttgttgagatgtcaagctaagctttcgtatgaactaaaactcatctcactatatatatattatataattgtatatatcatattcattatgagtattatatacatctatatagatatagacccatttcaggtaaatagtcaccttcaaagaagactaatgttaatatatattatgtatgaatgtatgtatttatttattattattattatatataataaaaaggttacttgaaaagtgaagctaaggaaaagcgacttggggcttgtaattagttattgagtcgctacatctattttcttcaccttctccctctcttctttccaccacctccaaaatccaacaactctttttattattattatttaaaaataaataagtgtgtttgttgcaattctcacctatttatatgattaaaataaaaaaaactcatagtagtgtatatactataggagtaactcaacaatatgaaaaaaatttagtctatttttattatgtaagttatagttagttttacctgtaaaattttaaaaaattttaaagtacgttttattatttttttctataattttactataaaagagtgatttgtaatataaatatctaaatttaactaaaattactgataataatacttaaattatattttcaaaaagtactaagtgttaagtaaatccacatgaattattaaaaatatttacgacataaattatcaggtaaataattaatttaatatagtagttgtgtggaagaataatatttaattttagtatagtttaagtaattaattattattattattattattatattaaattggttttctagaaatgaagaaacaaatggtatattgcgtaagatgaaaactctcacgttttaattggtctttctctttcactctcaacaaaacaccccatttcttcttcttctcccaatctttataactcaaatcatctaattcatttctcaccacaaccaaaacagaaaaaccctaaccctaacttcttcttcttcttcaaaatccaacaaaaatgaagaacactaacaacagtagcaacacaaagctcattctcctccacccttacattctcaaacaagggaactcaaaccgtctatggcttctcgcaatcgtatcattcttcacagtagcatttctcctcaccttaatctacaccagagactccacaacaacaaccgccgccaccgccgctgcaaccgctgccatcacaacagctggtttctcttcaaattcaccttcttcttcttcttcgttaccgacgaacgtagtcaacacactcttacactacgcttaagatcaaacgacactttcaagatgtcgtttgccgaactcaaaccgatcgccgatgttatcagaaaatgttcttcttcttcttctccttgtaatcttctggttttcggtctcacacacgaaactcttctctggaaagccttaaatcacaacggccgtacagtcttcatcgatgaaaatcgttactacgccgcttactacgaacaactccatcccgaaatcgacgcttacgatgttcaatacactacgaaaacgagcgaaatcaaggatctgatttccacggcgagagatcagatcaagaacgagtgccgtccggttcagaatttgctcttctccgattgtaaattagggctaaacgatttgcctaaccacgtgtacgaaatcgattgggacgttatcatcgttgatgggcctagaggtgattgggccgacgcaccgggccggatccagcccattttcactgccggggttttggcacgtagtaaaaaaggcgggaacgctaaaacacacgtgttcgttcacgatttcagaaaaggtttggagagagtttgtggtgatgagtttttgtgtagagaaaatcttgttgagtcttctgatttgcttggtcattacgtggttgagaaaatggaagaaactagttaccaattctgtcgcaacaacgacaataatcacactgtcgtttcgaataatacgtcgtcgttttcgtagttgtttgccgaattcggtgtcgttttttgtttttttttttacatatacgtacaaaataataatagtgatgatgttatataaaatactcttttgggacgggaaaagagaagaggtgaagataatggtggctatttatgatcaatttggtcacatcctttttagattttttttttcttcgtttgggaatgtaaaaaataattcttttcttttttggtaaaaaaaaattgtcatctttacgaaatgaaagtaaatgaaatatccaagttttcattatatttttacatttagtgtcgttttatacatttcatgtcgttttgtaacatctaccattgtttttttttgggagagaaaacagctattgtggattgatgaatgatttcatttacaacaataatatgtataggactaggaaaatcagcccttcgaacataatcagtgtccacttaaaaagcaaatctagcaaaagttagtctcaataaaatgaatagagacactgaggtggcgtttggttggaagtaatgaaatggaatggaatggaatggaaacaatttttattctattcctttgtttggttgcatttttaagtattggaat

SEQ ID NO: 378163 - DNA, 2053 bp, Cannabis indica
gcgactcagacctctcttcctccaccttcttcaggcccacctctggccaatcagctagtaattgttgatctggccctgaggtcaacttccctcctatggcacctagtaaaggccactaagacaaggtcaagcaactttctctggtacaatgaacaaagcaaaagaagttgcctacagctacatcgacaggtacaatcttgctgccggtgactagctcttcaaattagaaggagactccttagactgcctaacctcctctattttgagagactttgcctagttaaagtcttttagacctgcccagtacatggtattacccatgtaccgagcagctactttgtgcagcttttactaacctcatttctttctttatttcagagctttgtaaaacttggccatgcccatgcccgagtcaaaggcacaactgcaacctttaagaagaaacttgaggataaggatgtctagcttgctgtgaaggacaaagagcttgacgaggtgaacatgcatttggaggaggtggacaagaaagtgaggcaactacaaaactattatgatggtgtgggtcagatgctttgtgttagcaatcatgaggtgacttatttgactgtagaggtttccaagctgaggaaggagtttgatgcagcagaagttacttacaaggagaagcaggagacattggatgcttccttacagggttaagatgaccttatagccgaaattcgtgacttggctatggagacattctactagtgttacctccacaatcttggggacaagttttcttatgtagagtctcctcatcgttagaacatgattgattagggcaaggagctgtatacagccagagtagcaaagaaaagtgctccagaagcatctgtcggtcagcctagccatgcttcttttgaggtgcaggctagccaggttggggagattggtcaggtctctgtgggtgtacatgtcagctaggactttgtcgagtaagccactgatgaggcttcccgggctgttgattctgctcacaagactcttcatgttaaggccgccacccatctactttagactcacctgcacctaaaaatgtttaaaggctttagttttattattttttcatgctattatttcgcactttttcgctttattcctgtatggccataaggccttttacttttgaactagtgaccgaccatgcaatctttaatcctagctttatcttcttgtaattttgaacatgtagctggttgggcagcctttaatcccagacttagaattttatgttcaccttgaagctttccattcacaagtacttagctatcaatttcttgctttcaaagcatcaaatttttagccattaatttctttctttcaaagcttcaattttttgcttaagtatatttgtggttgttcgatgcagggtgtgtgtgccctcaagtgatcgaacatatttatggtctcttagtcacttgcaattaacaaagtatatagatcgtttgcttgtgttttttcttgggaggaccgatttacacgcatgtttaactaaaaagaaaattaactttaaaaagctaatttgttagcaagttatttgacacaatttgaaaagaaaaattattttattcattaattggtcttgcatatgcgttgttgctgtgaaatgtatattttttgtgtaataaaagcttacaaatctaaagtttgattttaaaacctaagttttggctacccctgcgcgacataccgtgcaagggccatcactgaagagtgatggtcatatagctctaatctgaattcctatacggtgagctgtgcaggaaccactagtgaagagtagtattttttacaagtgggttgtcggtagtacttttggagatatcttggtaggagaactaatgtaacgccctgtccaacagggacgccacgtgtgtgcaatttaataaaatactgattattatataatatgtaattatactaaaagtgtgggtaattaaatttttatagttaaaactcaacttttaaactgtttaacaaaagataagtaacatggattacggggtccccc

SEQ ID NO: 378164 - DNA, 3064 bp, Cannabis indica
tttttttttttttgtgtgtagtgccattatagctacagcgcttgtgggcttggctcggacggaacagataggcttgtacagttggtacaggaattgcaacacagtaaagtctctcaatctgatgaagggacgttgtttggagccaagataacaggaggcggctcaggaggaacagtttgtgtgattggaaggaactgcttacagagcagccaacaaattcttgaggtaacattttagcactaaacaaagactgttacgataagttatatttgaactttgcatttacttgatattcattttttgaacaatatattgatgaagacaaatgttactgttgttagaagaagaagaacaaccaaaccaaacgattttcttgtctcaagttttatacatctttctatgaaatgtgtcttattagattactgaggtgtcaatttgttttgatgataacgttcaggttcagcagagatacaaagctgcaactggctacttgccctttatttttgagggttcatccccaggtgctggcaagtttgggtatctcaaattacgccgccgcaattctgccaaccaaaattaattgaaagactatagtgcactgatttatttacttttattagtttaaactctttccaataagaaagatgcattattgattaataaaagttaggtatgcttctgtagttctatttattaaattctctttgcttttgatttttgagaaattactcattgcttcttcattaatacagttaaaggtatgtaaagagagagagtaattcattctttttgttcttcctttatctgtagttcatctttttataagttacgaatcctaaaatgtgtctttttataatttgcccaaacacttgtcttttttttcccctattttaattaagctcaaatcagcttattttaagctttaccaaaccgtaccatcattatcatttcctttttagaagtcctaacttttcacataatcgttttaaattacaaattgatgaaggatcatttatttcttagaagcttaaatgttgtttggcaggggatcaattcatatatagtaatagtaggtttacatctgaaatagaaaagataaatagatttaggagtaggcaggatggttgtcgtcaccttcctgctgcttatagaaagattcatatgtagaaactcttgtcttcgactcaggcaggtccagctcttccacaaaacccttggtcatcccaacaaattccttcatgtgtagttgtttccactcctagtttttaacaaaccacaataataattataaattaacaaaactcaaaatttcattggtcgtggaaaacagtgatcacacagaattttacctcaaaattccattctccatataagttgggatcgtctatgttgctccaaacgtaagtgtaaacttgcaacttttcagaactatcctgcaaaaaattggagtgcttctttcaagtctcaactcaatttgtggacaaaatctataaaaatgcattatcattattagaagcttgttggtgaagggatagcttttgagtgggaataggaaagtataaataggtgagtataaaaggcatgcaagaattaagtggttatttctctgcatcacaggggcctaagggctcagataatttgtatgaaacttgagtcctgtttcctttcactggctactgttctattgctgggttttctagtgttgactgctggtttgttattaattgaggcaggttcttatcaaaattcaatcaagcaaaaaagaagcatgaatgtatgtatgtacatgtaccatgtacacaacttaaaagaaacaaatagtgactactttgataacacacttacctctaatgaaacctcaacagtttgtctttcatactcatcatcctcaaatgcatctaagatatatagctcaggttctgtgatacccttcaaaacctgcatacaaattttctcatgagaacgcaaatttccacaacttatatagtattgataggtaccccaaaatgaacatgatcttacactagcatgaccactgtttggatcactgaatggcatgaaggaaaaatacaagaataaaacactatttttcactaaaactaagaaaagggagtaacaccagtcaataggcctgaatgtttaagaaaataaaatacagctatataaacactagtgataaacagtcactgggcagccattaaagaaatcaacaaaccattccagagactttcttgttctccactggtagtatagccggataaacacgtcctttgatactataccgatgactgaaaacgaaagttcgattcaataatcacaacccaaataaattaaaattatttatttacccaaagatcaaatcttttaccccaaatcaaaattgggtttgactaaaaaagaaaaatctgagacatgaatagaaaagccaaggataaaatttgtagagtgtgagaaggagattcatacaagccgttgagaagagcgatggatgaaagggggacacggttaaggagaagacgaacgacgtcgtcggccatgagactgccatagacgaacacattgtgaaggttcccattcccaagcccagcagattgaggagctacactcatgtttcacttcacttcaattcttcttctgtgcctttgatttatttatttgggtattctttcatcaactcaaccacaatcaatgagtaagtcattagtcaccatttatttatttttttttttttgttttttgaagagactttattttgctgtttattcaattgataatgaataacaaaaaggaatttttgtacatggcagatgataactggacaaatgattgagaccatttatttcctacataaattttttttgtttgttttaagaaaaaaatatatctattttatatattttagaaaaaatatatctattttataaaatatggttatgtaacataattcttgatccaaactctgatcttgacctggaccctaacctcagactctggaccctaacttgacctgaccccaaccccgaaccccggacctagacctggaccctcaccccagactccagac

SEQ ID NO: 378165 - DNA, 1361 bp, Cannabis indica
gttgtggttacaacttctcatgttttcttcttagatttagctgttgctagaagaacattatgtactattttcaataacatggttctataatagcaataactaaatagtagcaagaaaagtgaagaagaaaatggtgattttcagctatgaaataaaatcccctctcgatgggatgtaataattatgctatgatgaatgacttgactgatcccatgtgagaccttttcttcgacaggtgtgaagaacatgtgaaaaaacagactgaattaaaacagatggtaggtatttataattgtagctaagtaacacttatatatatatatttatacacatacgaaaatgtgatgaaactgtgattgaatagattgcaggcttggagaagcatctggaagaatccaaaaggaagtgcattcaacttgcagcttatgttgaatccaaaaagaaccaaacttgtcaaatccaacctctgaaaaggtttgaatcaggtgaaactacaatatgaacccgacgatcacctttgccatatgttttggtctgtacagtttcctgtgtaaatgttcttaaatgtggtggtgcaggcttagtagtaagttggtcagttttaaggccatttgaagctcaggttttccatggaaagttcaggattttgtttcgaaattttgaattttgcagatgaaaaatcttgtgagaaatgaagaccaggcaaattatatataagaaattttatgaaaaaaagaatagaaaaacaagttttcaagctttattttatctaagtgtatgtatcaagttcaaaacaattcgagtgattttcaagtatgtagaactggtttatagttctaggaatataggattgtaatagaaacatatatggttatcttcagcaggattatattttatgcttttttatttaacgtattatacaaccaatagtagtaataaataaaaaaaaaaaaacttattaatattgtgttatgaaactgatcaattatgtttttgaaactgatcaattatgttagtttatactaaaaatgaagacgaactcttaatatgtacaaactcagaagccttcactaaaaaggaaaacagaggtcaattattttccaaactaatacaaaaatccttacatcacatataaatataggcatatgattgttgcattgtatttttttctacatatggaaattgaaaatacaattttttattttttaaaaaaataaaaaattaataaataatacaagtttttaaatttgttaagggtgatatgaatttaagaccaaatagaagtgtactagactactagtctacataaatttttaagggtttttttttttattcttttggttaggggtgttcacaaagta

SEQ ID NO: 378166 - DNA, 7307 bp, Cannabis indica
taaattacatatatcattactcataataaaaaccgccagaaactacatcctttgaacaacattaaaatgctagctaccactgcttgatatgtgtactcctcgtgccatgcagtgagacatgagaatgtaaagacaagtaaaagaaatccatacctccaaccattttcatttttgcagtgcaaaagcacatggacttcgacttcaaaatcactatcattctgaacagcaagagctattacactgacggcatcaaattgaggatcaggtcgaagatctcccctagaggcagcttgaatctatgattgaacgatactcaagatgtcaaacactagaacaaatcataattctcaacacataaggatcaggaaatggcaactaaaggaaatgatgagtcgtctaacatttatgcagtaattttgcagaagaagaatttaaattgatatctattttattttattttatgttgcaataagtttcaatatgattagcagaattaaacaaacctctacacttaacagtgtcagctgctgcccaccaccaagacttgcagggtctctaaatccaatctgactaaggggagtgggctttgatctcccatctggccctgatatctgagaaacatcttgtgagcaactagaatattgtttaagtttattagaatctcctttcctcagcatcggtgatgtatcctcattacaaggaatgttccttgtcaaatcagggtctttatggttctcttgtgacccttgtgcctgaatatgtagttgatgagatacatagccagattcacaagaagccttattgcaatcatcagatgaagaacttggtgaatcaattagagcagtagaacttcctgtagtttattattattatcacaaaaagtttcaaattttataaaatctagaccaaggaacgcatggaaatacattacctgtcttagatgaaacctttgttaatactgtattgccttctacagaagtacctagatgtccaaaacaaaagaattgatttagattccaaaatcaatgtgcaaaaaataaaatttatagcaactacttttcttaccagatgccagccatctcataacattttcagctgaaggaggtgaaaccagaggtgtcagcagatacaaaaatgagccatcattttgataatgaatggggacaccaacaggagcttcttgttgagaagtagagtcacaaactttcatgcttttgttctgaatttctgtcttttctttcaagtcttccatgaaaaatgggagacaatcatccaaagctgttccttataataagatggaaatttatttgtgagcactgattttaaaagacacttatttttttgtaataaaaaataaaaacaaaaaccaatatcaaagcagttgtacaacttgatgattatttaatttaatttcaatgataatattcataaaatgccaacataaaaaatctcataaaactcgcctaatctaattatcaaaagtgctttgactcaattagaggtgaagcatatcaagtaaactataaaatttaatataaacaccaaagaaataaggacaaagaggtagaaatggcttttgggcgctccaaattctcaatgagaatatctttcaaactatctagctaaagaaagagaaatagtttataaccgacaccatcctagttaggcaaacaatgcatttaagtaaataacaataacctgatgttccaccttgagaatccttatctggacaaggaagataagaggtaacaggacaagaaaaagtttttcttgagtgatctatccattcagtagcaggaggtttcttgcataaggtcaagctaattaagtcctcgtcttgtggattgctcttaatgaccatggaaacatcctttccagggttttgtccactgtttaaaaaacatatgttcgatctattcctaaccactggttttatggatgacattttattggcccactccccaaaaggttggccttcaatgccacttttcatatctaataatttctcgtgcccaacagtatgaaaacagcttgaagcagtaggcaaagtgttttccttatcaggcttcaacacctgaatattacagtcttgatcattttcacaatttccagaagcatcttcagcaggaatcccatgctcagcaagtgaagaacttatatgcacatcaggacctctgtctaagaagtccctggatcgagtgatcatactgctgctatcatcatcacctttatgagaaccaaaatttatatcatctaatgtactaggatttatgaagctatcatcaattgcctttacatcataaaactcacgatgcagtgattctggaccagtaaatgatggacacaagttaagaggctcaagaggcctcttgttaggctcaccaatttgaaaatccaaacttgtaggaacgatattgatatcttctttttctttcttttctaaagaaaccttttctaccccaagagaacagaactcaactggctcaacacgatagtgtcgttttctcctcattaagtctcttacagagcattcaaccaatggtgtaccctccttaatgccagaaacatcatccctcacatttttcattgaagaatcctcatgttgtcccatcttaaattcagctgaggaactttcagtgacaggaactttggcttcactgcaggaatagacagtgtctctatcaatgtttgatttttggtttatcgaaaaaggtaaagagccccagaataattttttccttttatgtttatgagtaaaacttgagtgagcatcatccttttcctgttttccaataaaagaatcctccaatatcatctggtgttcacaagtctcatcaaatttactcttagaatccatttcagatatattttcagatgatccagcacagggagtatctaacatgtcatccccagcaccatccagttgaggaataattttttcagatgaaattctgcgagtatggttatattcaggtgaatcctttacgtcaactgaatcatcaatcgaatcaagaatgtcttggcactccttttgggattcactctcatagtccatattagctttctccaacacctcttcaatggtagttgcaggaaacaatgaacttaacatggtcacacaaagaagttcatcgtcggcgtttatatcgtcagctgcctgagaagtggcaagacacttaagaagaaccaaggcttccttatctgcagcctaaatatatatatgtacataaatcttagtaacaaatagtagaaattttttctctaaacagccaccaaccacaaaatcaaacaacacccaaaactatataatatgaaacatgtactgcattattagttcctgaaaatcaaatctgaagcacagttaggaacattacaccagctttgaattggatcttcaaacatagtcaatcaacttaacaaataaaaatgaggtaggtttaatagaatgagctaataattttctaaaaatattgagcaacatatatacagaagtttgtaaacagcacccggaatagtgggaagatgtttgacatataactatggccctgtcaaggagaagaaaagttcgaggagcatctaataaacagtgaaacatataacaaaatctaatagatacattaaatcactgctttagtaactaaacaaatatattttagcccaaaacttgtatctcatcaatcacaatcagttatgactcatgtgcaataccaatggcacaacttttgcttatacttataacttatcataaaggtcttttttgagaagctaggaatattagcttcacataaaagatcttaaaattaatgaaaaaaaaggtctttttaattattacccaaacactcctaaaagtgttttttaattctaaaagctataagaagcttaaaaaaagcttacctaaacagggcctaaaagaggagaaaaacagaaatgacttcctatttctacgacaaagtagcaagtaaaacagagaaatgcaaaaccttaatggattaccttcttatctgaagtctcagtcatttcagatggtgaaagttgatcgttagttgataatttaacgaatgtgtccctctctgtagataatactgccccatcttcctcttgtgatgacagagattgaattacacttttttgtttaaggcactttgaaggctccatatcaacactattacaaacatgatcaagtccaaccaaatttctctcattttttgaaattttcactaactgcaaagattgctcatctttatcattatgtgattccataagtttatttgtaaactcttgaccaagtgaaaatgtttttagaacatcttcaggtggtggtttgctaggatcaaaaagcattgccacatctctcaacccagtcctttcatgctcctcctatgagacccaagaggattacacaatcagtcataaaattgtaaaaacataatctaactcattacgagcaaataaatgaaacatgtacctcccaaattggcacaagtgactgaaccattttcacatctgaaatagtttgtgataaggatgtaaacactttcaactgctgattaagaatctctgcaaaacgacaaatatcatataattttaaccacaacacaagatgataatgtagatagatacgagtagaggaaattcaaggtaagcaaaccatctacagtagcatccccttccagttgacaaagactttgacgtttaacagaattaatgtctatgtctggagttggtgatgcatcatattcacaagaagaatgccacatccaatcatccggaacattagaagatatccaaacaggtgaatcaaaagatgaactgccacttatatctgcctaatgcaaaattccatataaagaaattagaatagaaacgaaaactcatttagttccattctccaataagtatgggtaatgtcataagaatgacctgcgattcaggagggaggcatgtcatgggatccacattttgtcttggatgttcattgtaaaaagatctcctcgggcagaatacatctggtacaggatgacgaaacctcatcttagacagatgtacatgacccatcccatacaaattgtagtcaatctaccatatcaaaagttcacatcataaagatgagggaaagaggcagtaatagagggaaaaaacaagccagcagtatggggtataatataaacttggagtagctgtagtagtaaatagtaataaatccgttggaattgtgtatgtaagaagctaccagaaactggagaataaatggaatgtgtgcttcatggggctgtaaacttttatcaagaactccaccaccctgcaaacaaagtattactacaataaaaatcataaaagaaaaacagtaataaaagaaatatccattaattgtgtatagagacaaaaaaaataggtacaacaactattgtgcaacatatgatagatacagtgccataaatcgtatgttgcacaactatttgacaacagctaatgctggatcaaatgtaagctaaatataatttgaggggagaaaaaaagaggccctctgttgaaaaataaaggaacattaatttgacacttaaagtagcttttagcaaaaaataaattacacctaattagttttttacataatatacttatagtaataatatagggggtggggaaatctgaaatgcaatgaccatttcaaccacaaagagtaaaactgaacttgaacaaaaatatacaaaattccaaagcatagcggcaactgaacataagagaaagattagatcttcaccagaagaagattagcagcacgagagacatcatgtgggtagtagcttataatttgtcaaggcgttttaaacaggactaccagattatcaatgagtaaataatatggaaaggatacaggtatgttactcccagattatcaatgagtatataatacgaaaaggatacaggtatatcttaacaaacagttcctctgaggaatgataaccataaaatttttttgctcgaacaaggctacaaccatgaacatactgtcgctttgaacacgccttacttttaagctggaagatatgaagcacgtataagtaaaactttaacaagtacaattttgatataatccaaaaaaaaacaagcatagaaaacaagtaactagaattcaagtagagaactgaatcggatacctttaaggctttctctaaagctagtgatatgtcatgcatgtatgcgtcacctatgaaaacccaaaaaaaaaaattatttccacaaagcaagcctgcaagtccatctaagccaaaaaaaaagtctacccaattatataccttcttgccgatgttgaacaggtaaatcggcccatggcacgtatagatacggcaaaacctacagaaaaattcgatagacatacatcaaaacatgagaaattagaccactgtataaaactgatacaaaacatggcattcaaaactctatgactttgtccaaattcatgaaaaactatgaagctatcggagaattgaataatatacacagcgatcttactcgatggatgtgcaagcaagctttctgaccagccggagttgacccaaatattctgataacaggaacctcactcactctcccgcctaaaatatccacacaaaaatcaaaatagaagatattttccaaaaaaaaaaagaaaatagatacacccatttagtttctataaacattaagaccgtaaagtgttcttagaaaattgaccgtcaaatattcaaattcctcagcttcgactaaaccctaaacccctgcatggtagaaggaaaagctacgaaaatgggtaataaaaaaattacacagttccagaaaagaaaacagaacgagtagtaaaatagaaaagaatgaaacggcgtggtgttctgaccgtggaagctactgtaagagatatcgaggtctggaatcggcggtgccatgtagtggtcgagagagacgatccggaggctaaagaccttggaatctgccattcgattgtcttcaaatttagagtctctgagttttggggatttggaaaaagaaatgaaataacaaaatagcgcacaacacaaccaactaatttggcgcaaactaactcaactcaagtccgcggtttaattaatttttcttttcaaaagcttgttcagcactctttttacatataaagcccccgaaaatttaataatatcagtttgatccacgggatcactcctcgttccgatacgaatatttctcccgcgctattttaagatagacattagcaaatcacaattaatggatttaaaatggtttacaccataaaaaattaatttttaaataattaaaat

SEQ ID NO: 378167 - DNA, 10363 bp, Cannabis indica
ttgggtaaggtcgtggtggaagcgacgcgctaaggcgacgggcaccccacgtttgctctggtgacggagaccacactgaatgaccctgcaggacaactcgttcaaaaattcaaagacttgggtgtcactttgcttcacgtatgtatatatatatatataatattattggcatattatttggtcatttaggtgtactaattgtattctatctatgtatttaaattaacgtgttctattacatgcagggtgatctttatgagcatgagagtttggtcaaggccatcaagcaagttgatgtggtgatatcaacggtgggtcacatgcaggtggctgatcaggttaaaatcatcgctgccattaaagaagctggaaatattaaggttagttaattatattaatttttgatcacttccctgttttagtactaattttaattttactacgtgattaattaatgttttgatttccccagagattttttccatcggagtttggtacagatgtggatcgtaacaatgcagtagaaccagccaaatcagcctttgaaatgaaggtccaaatccgtcgagcggtggaggctgaaggaatcccttacacatacgtggctagcaactgcttcgctggctattttcttcccacattgattcagccaggagccacttctcctcctagagacaaagtcattatcttaggcgatggaaatccaaagggtacgatacataactaattaaaacttaattactatcatgttttacacttgccatttctatgtatgcatacaggcgaaagagattgaaaattattttattttattcatttgctgagtctgttcgtattttgggaaataaatatatatagcggttttcaacaaggaggatgacattgggacgtacaccatcagggctgtggatgacccaagaaccttgaacaagatactctacattaggcccccaaagaactgttactcatttaatgaactcgttgccctttgggaaaaaaagattggtaaaactcttgacaaagtctatgtttcagaggagcaaattctcaaagacatccaaggtacgtagttatattatatattatatacattttgatcttacatttactcatcagatatatattgtttgataattgttttcattattttcagagtctccaattccaatcaacattttcctatcaatcaaccactcggcatttgtgaagggagaccttaccaactttgaaattgaaccatcatttggagtggaggcttctcaactctacccagatgtcaaatacaccactgtcgaagaataccttgaccagtttgtatgagaagattaattatatggttattttccaaataagtttttaatcatatattatatgtatttaattacttgctattccagcggatcaaatcagtggttgtgttgtttacaagttccttgtttctcttcccttactttgagcttgtattgtgtaatttcatcattaaataataaaaaaaaataaaaaggtctgtgctatatatattggcttattatatacataagtactgtgtttgatgatgtaatttcccgataatgacagctaaaagaaacaaggtaaaaaatgaagtgtatccaaataaataaataaatatttatatatacatatagactatagtaggttgaagttgtttgtattatttagttgtatgattaattaatttttagataatatattttgatttttaattgttacatataatagaaaatattttatataatttaattacaataaaaaatgggaattttaaaaaaaataataaaataataaacatttaactctaaaacaataataatggtcatgacaaatagacataaaatagcttccaaaaaaggaggccaacatatacatcaaaaaaatattcataatagaataataaaatgagatgggcagtgatatagcatgaaaattaaggaaaaaaactaatcaatctgctcactcaaacacagcaatgttatcccaagaaccatgttaaatagaaggccaaaaacattaaaccacctcatagtatatctccacttgtttctcttatttttctaacaagaggggaaaaataataattatcctacatactatttaattttttttaaaaaaattatggcttggttattccaataatttttatgtgagttgctatacggattttagttgcggtttatgttgctctattaattgttataaaggtttttgtgtagaacttcttaaaaaaatttgttttgaagtttaaaatttttttttgttttgtttttaattacagctgtaactcaaaaaaattaatgattaagtgattaacaatgagtagagaaatgtgtgtacttatttgtgaattctctccaattggaaactttcgtatggattgaaggttgagggcatttttcccgtttcgagattcacaaattctatttcactggacaccttaattacgatcaacatatgtaaaaagaagcataatcaatgtagaacaatgtactaacacaccacaaattcaattcttcgtgatattagttgttgatatatttatatcatccccttcttcattgagaaaagaaattgcatatgctaaagatgttctaacagactaaacaccacaagtaatatattatttttggtgccataatactgagtcataggtcccatcccatctcttcccaattggaatactcaaagaaaacgacgtgaaaccaaagtggcaatgaacgtggccatttgccaacaatcaacgacatagaaaaaattaatgttgaaagcactagcactaggcaccatagttcgtgtaattaagtattataatttgatgtgataattattatagaatattgctaataattttctataataattattattttgttgataaccatgctcaacaaacaaaagccaaatattaacaagagagtgggttggtatatggtggtgcaaacttgtgtgtggtctattgggttttgggaaagcggtaataaatgagccaaaccatttctcaatacgaatagactcttcagatcaaaaatagactctgtaatgaattctaggctttcttacatctctagaagaaaaaaaatatttatatagaagaggcttggtctgcctaagtaagagtaagagaccaaccaatgattctgacaacttccgtaaggatattgtcttgcaaagctaataatttagaaacatattaatttaaacctttcttctctctgctgagataaaggacaagccaaaattaaccccttaactacttttccggaaacaaacagaaaaagcttataacattcaaatagttaaatagatgcaccaaaatatttattttcattcggccatttttaatatattttaaaagaaaacgttcataaaatcattaacaatagccttgtcctgttttgatacaacacctgtttaggacgtacattcttgtttgttttaagagttaagggttttctgaatattcaagtttgaataccaaagtcttttatattttcatatacgaacagacatataattcattatcacctttaagcaaaagtaagagtacttgagaaaagttatttacctattcatagagagtgctgtaaaagtatgcattacttattttttttttagccaacaaattaaattttactttttctattggagatagtcttatatacaatcatgtttttatatttttactcaactcttttacattaatcttgggataatgattctaaatgcggctcaactcaatctcaaaatagtaactaaaagagtctagtactttcaaacaaacaaaaaaagaagatatatattgtatgattgaatggtatttctcaaggctcaaattacaccaactctagtcttattgaccaataatttcattgattcagtcaagactttgccaagagagatttttctatttcctggagattttatagtgggagctggagctggaactggtgatggagctggtgaattaatagctggggctattggtgttctaaccggatgtttctctgccatgattcttctggccttaatttcttcatttttctcatctgtcaaagtttgaataaagaattaattaatatttcatttatttatgtcacaacaacaagaaaaagaaaattgttactttattttgtttgtatagaaagacagaatcgctcttaccatttaactgctgagcctgagacttggcagtctcggacaactgaactagtgtaggcgtgataatagtgagaaaggcccagaaaaagaatatcacaacaaaggttcttccactcatttgtggtggggtttttgagggtagagagaggaataaaagggagaggcctttagggatagccaaaaatgttaaagtgggttttaaatggtgagtttaggacaagttgttaatattgggtggggggaggttgagagaaagagagacagagataggagcggacctagaaatgaaacattagctggccatgtttcatgatcattggcttggctattataaaattcgaatcctctgtttcatgccaattatttaatattcaaagtcaagtattttaaacaaataaaacttgtgcattttcattgctaagttgttggagggttgttataccaattggatgtttgattggacaactacctggcatctcaactcaaaccccaggtcagactatgcactgcttcacctcgactacttggagtgctttcccacgtactcactctcagattatattttgtcaacggtgaattttgtatttgaactgagtcaataagtttattgaatgggaaatttgagcatcttaactccctataattaaaataatcatgccaaaatatatcatagaacaaaaatgatcaagtagtagtcccctgaaaatgagaccatcctcccaatatgtgcccgaggcgtagatggttataatattaagttttctattattttgggttgtgtacattatttatatgattgaagcattttattgtatctttttttttcttttcttcatttgtttgtaattttgatttcaatactgtaaattatttataacttttattaagatgttttgtataattatgtgtacatagttatataaaaaattaaaattataactatttatataaactaaaaacttaaatggttatatggtggtaacactcaagaactattctaattaataattgctaaataaatatccttataaacttaagtatacaagaaggacaattgaaaacagttacaaatcaagaattagctcaagcacaagttgctttcaatgcattacactctaatagaaattacaacaaccattaaaattcagctacaactgatccaactcaactgtacagtcactgaccaaaccctagggctataaaaccataagaaaaaaatcaaaaattatgcatgctataataaccatcttctgcgagctgagagtaagtgagagagaatccactttgtagagaatgaaggcgatcgtcgccattgttgtaacaagaggaagaaaagaaaagaaaagagagttagtactataaacaaagttgtaaaagagtgagagaaacaaagattatcagccaatacttatatgtggctagaaatcttgagaatgaagattgcacctaatgtttgatgatagtgaaatcgagtttcactaaggcgagctcgaacaaggacatagtcgtagcaattttgggtgaacgttgccaaaaatctctgtctgcactctatttgcatctcttactcaatctctttcatttttcttgtattaaaatctcatattgtgtttgtgtgtgcgattacatatgtaaccctaatttttctctctggtttttctcgtgtgtgaatgagagaggcaaagtctcgaatgttttgatcaaacattcaagtttcgcctagggttttcttaggttaacttggtattgggttggggtttgggtttttgtactatttcttttagtggacacattaaaagagccaagatttgaaaaataccataataactaattgggcccattgtctttgtgttgagtggtttggtgtaggaatttgtaaaattccaacaatggtatcagagctagtttccgcaataatttagatcacaagagacacaaaaagttagcaatactagaataattcaatcaaaaagaacaagaggagggtgttccccaagaacaggagaacattcctcaagaacaggaagatgttcctcaagaacatgaatcataaagtggagagctagaggacattcctttgaatgatcctattgaaatctctaaccctaattctgatttgatttcaagcaactttaacataagtagtattaaaacttatattgacaagtctgatggtttaggtgactatcggttctggagaaggataagatcattgccggtagaacaaaagcttctaagagttcttgaagaacctattgaatggctagaatgaacctctcagcaagaagaattccttgagacagaaattgggatcattatcttcaacctcatagatgccattatcagattggtggataaagaagaaactccaacaagaatctagaagaagttggaagaacagttccaacagaaatctttgaccaacaagatctttctcaaggaaaggatctttggatttaagatgaataggtcaaagattctagaatggaatctatatgaatttttaaggatgcacatagagcttgtaaatttaggtgaaaatgaagctctaagtcatgagaatcaagccattatcatcctcaactcactgccagaatcttataaagaagtgaaaacaactattaagtatgggagaacttcttactttagaggaagtcatctctacactcaagtctatggatcttaagatgaaaaatgacaaactaggaaattctaattagaaattgaatttacgtcgtggaagatctaatcaaagaaaactttggagcaatagagaatgagacatagtaaaggccctaacaaagtaggacatggcaaaggaaggtcacattctagaggaagaggacctaaagacccaaatgggtgctaccattgtgggaaacctaggcactatagaaaggacttctatttctggaggaatgaaatagctacaaaccatgggcaaaatcatttcacaaaatagaaaaacaagcaacaagaagctaacctaagtgatggatacaagagtggagaagtctacacagtcgctttaaacttcaagatgaatggatcctagattctagttttatatttcacatgactaacaataaaactttcctttttgattacatggaatctaaggaaggaaatctaattctgggaaataatcagacctgccacatagaaggatctggaatagtaagctttaaaatgtttgatggtgtggtaagaaccctaacaggggtgaggtttatgcctaacttagctagaatttaatatttattagtgtgcttgatgatcttggtgttgtaagtaagattgaagcaggtaccataaaacttagcaaaggtgttatgacaaccatgaaagggttcaaggaaggtggactatattacttacaaggagaaccagtatctaattgccacaacatttcagttaagacacatgaagacactaaggatatcctatggcatagaaggttgccacataagtgaaagaggattgaaaatcatgagtgatcgatcaagatttattgtgcaaggacaaagtaagtaaaattggttatgtgaacattgcatcctagataagcatcacaagttgaaatttaaagttggcactcataaatctacatgtatcctagaatataaacattctgatttgtgaggtcttgagaaaacccctactcatagtggctgctattattttctttctatagtagatgactactctatgaacgtgtggtgttggtttttctattaaaatataagaatgatgcatttcctaagtttcaagagtgaagagtcttaatttaaaatctgactaacaaaagaattaagactctaatgatagataatggccaagagttctgcaatgatttgtttgattcttattacataaagatagatattcaaaggcacaaaactgtatggctaacaccacaatagaatggtgtggcagagaggatgaacagaaacatcctaaacaaagctaggtgcatgctatttcaggcaggtttagcaactggattttggggagaaattatgctcacttcagcatatctaataaacagatgtccatccagtgcagtggagttcaaaactctagaagaaagatggagtggtaaaccaccagatctatctcatctaaaggtatttggttgtacaacttatgcacacaaaagtgttggtaagctagaacctaaagctctaaagtgtttttctaggataccctgatggtactaaagggtacaaactttgggttagagaaaaaccaggtttaaaaactattaaaagtagagatattatttttaatgaaacatttttcctttatgttactaacaactctactgttgcaagaaatagttctaaaactgacattacaggtaacactattagttttaacttagggactagaacaccaaaaacaactcctaatccagaagtgaccaaaggcactgatttgaaccaagatactattcagatggagcatggagaagaggaagaagatattgttcaggtggaacctcaagaaccaagggagaattcgaaaactaatctagacaattatcaactagcaagagacagacagcggagagctcctaagcctaaccctaaatacaactgcaacatttggaatgaagacattgcttattccttattgagcatgttagatggcaacaagctggaaccataatcttatgagaaagcagtgaattgcaaggactctaagaagtggggaaatgttatggatgaggaaatgacttctctaatcaagaacaagacatggaaagtggtacctagatctaaagggaaacacatagcttcatgtaagtggttgttcaggcagaaagagggaaggaataaaggtgatctagtaaggtacaaggccagactagtggctaaagggtttacacaaaaagaaggcattgacattcactacgctgagaatttctctcatgtagtcaagtacaaaaccataagaattattttatcactggctattcaatataacatggaagtggatcaaatggatgttactaatgcttttctacatggagaactagaagaggacatctacatggaacaacctaaaggttatgaaatcaagggcaagggtgacctagtatgcaatctaataatgtaacgccctaattaaagggacaccacgtgtcgtgattacattatgttaatcacgttaatcagggtctagtaactagatgattagaaaaatcttaaattaaataataaaacaacttgtaataatagtaaaatcttaaattcaaaataaaataatatagttacatatttgggatcccgtaaaattatttttaaaatattacaagttgtttttatatacaagtcgacctaagcagcaaatctaagatttctatataatttccctattggacgtaacccacgtagtctagcttggtcggaacatgtacaattcaccgtcaaaactcttgaactcatggctaactagacactgctttaccattaactacacaatagagcacctgtgagccaagacccagcaagaaagcataatcaaccaaatataatatatagcatacatactacacataatacaccactatgtagataactgtgccactgtactaatataacacaccattgcatttataatgatgccaccacaccctaagtctatattgtatagacactacgcgttacgctcacacacctatttataatataaggccttattgggatttttcttagttttgatcactgagtctaacctagttacgccttgatcgcataacccttaccatctaatccactagttatgccttactcgaataaccctttttagatactcaattatttcatgaattgcatgcataaatatcgaaattttagggtaataatgtaacttatatttctaactaagaaattcacattaacatacaagtgctccaccgtgctatactctatgtacaaggtttgatttcttacctaaaatccaatgtatgaggagtagtccacaggtgatcccgaacaagtgcggtattcttagtcacaattccaagtttatacaaaaataggttaagcttaaaattaccttaataattattcacatataggactccagctttggaccaactaatagagctcatcacgagctttctaacgatattaaaaacgtctaaaataaagttcagagtcaaaagttatggccaaaataaatt

SEQ ID NO: 378168 - DNA, 3141 bp, Cannabis indica
atttcttaattactagctttgttcaatgattgggtagcctcacatcatcacaccaacaattcctctccaaaattaaaattaggataatatattgcagtaccaatttttgcagcaactaataaatagaaacaacaacaaaagtgatatcaaaatatcaacacaatcaagaatgattttattagaagtttgcatgtctcaaaatagaaatgattttattttcactaacttttcactcttttaagagtactaaaacactactgttatcaatttacaagtttagttatatatggttttagttttttgtaagctggtattttacacttttctattactgcagtatatatgtttttaatttagttacttagctaacattgaataattcagtacgtaatgaatactaattcagatagagaaacttgaagttttcacaatcaatatctgaggttacaatgttgtcttgccacatttttggctcactttagctggtttgagcttgttctggattgaatttgtattataaaatttaggtgtgggtagatacataggatttttgcattatttattgtgctgatcatatggggagagtaatttaataataataaaattagatcagctgcttccaatgaaaacatttctggtgacattataatttagaataaaatctgtttctgtgatattgatttaattactctctatatataatgttttatatatgtgaatatgattagccattaggaagttagaaagccagaataaaattatcctaagctaatatgatcgatactactttttaattaaggttctgaattcaacatatatagggaaaatttattgtaggacatattgtttcgtcttcataaaaagaaaatagaatgtacacatattttattagacatagaagattattggtttttttttttttttgttgaaacaagaaaattattgttaataaacctattatagttttcttcttatatgaatttcctatatatattatatgtattcatatgcatattatattataaaaaatcatttttttcttgtatgcctactaagattggcatgcaaaagttgtaagtggtaaacacattacatatctaatgtataatgactaatagtctgttaaaatgatctctcttttaaaactaccgtaaatcaaaatagaataaatgcattttgccaatatttaataattatcttttttttttcttcttataattattatgtagtaaactgcaagatgtgttctgtttttgtgaatatacttaatgggctttcatattgaacctacaaacactaatagtattgttaaattgtcaaaaaatgctttcttaaacataaaaagtgctattttgactacaaaatgatgggcaattatgtaatagaatattgtatatcattccataaaacagagcacattttagttgataataaaaaaaacttggactacaatggtttctcagctaatcatgcttcttctccattaagaaaaaaaggtctaatatagagttgctattttttctgtttttcataattaattcctcttaatagaggcaacacagttctattaaaagaaaacaaaaaggcaacaactccatgataagaagccaaccaaacagttaggtgtggcaaacaaataaaaataggacagttgcagaagatacatcagagaaaacaaatagttagttaattaccagatacacaaggcatgttgaggagaatcaataatgggagagagactaaaaaaaagaagatcgtggagagaaatattaaggacataaaaagaaaaatgcatgagatatttatctagggacaaaaggtttataactgagattttggaactgatcgagcatcaagcaccaatggttaagaaaaaaaattcttttagaagaaagagaggaagagtagataattgaggatgataaaattatatctaaatatatgtaatttttataatattattaatagatatataaattatataataagtaattaaaaaagttttcctatcggtacgtaacttttgttaactcttatcataatcatatcatatatatatacaatatctatattaattaaataatagtacgtacgtggttgaatgtgtttcttcacttatctcttggttttggtaaacaatatgtaactatatatgtgtattgtatatgaagcaagagttgaagttgaaggatgtcatttaaatagcaatattatttatttatcttctacgaattcaattatatattatctctctaagagggtctcagagttcaagttatattttctctatcatcatatatgctttattatctgcttctatgtaattgcttgcagtatgaacaacaagcgcttcttcacagcttgagacatcagttattttcacttcacaaatgtaaagttttttaattactttttattatgatttatttattaataatttgtcttctttgttgcaatttaaaaagaacagatgataatagcagcaggcaaatgattaataatgcaaagtatgacaactggtagtttatttagttagaattggtagttattcttagctagactgcttttggaattttttgagttatatagtttactacttgatgactgtttaaattttttacatatatcttcataaaagtattgttactattgttatgttttttcatcgttgcatactggaaatttgaattctgacattgcacggagagaattgcattaacatttgcagtttctcccttacctcaaattgtttgttgattataaaccatcatttaaagtagtgtttcccatcgattatagtctgatggaagcctttcccgtcggttacagtctgatggaagcctttcccgttgattttaaactgtcagttaaagtatttttcccgtcagttataaattgtcatttaaattagctttctcatcggttacagttcgacagaagcctttcccgtcagttttaaaccgtcatttaatgtgattttcctaattcattcactatacaaaaactccctttcatgtccatcaaagttggacattgttaaccaaaaaactttctatggtgacgtggacatcaatgtttaacacgtgacaacactacaaaaaactgctattttggtgaaaactatttagtcacaacataatt

SEQ ID NO: 378169 - DNA, 5789 bp, Cannabis indica
atatatatataaaaagaataataagtctacattacgttctttaacaggtgttttggatttggactcatatgttttggctacaaaagagttttttaatttaaatttgtgtacaatcgtgtatatgttataattatggattatcggtatattttcataaaatttatgattagagctctaaaataaactacaccgtctcaggaacagacccatgttaatgccaacggggaatataggatatagcccccaactaaaacgaaaaaaaaaaaaaaatcactttttaaaacaaaatatatttcttgatgattatatattaaaatagtaaaaaataaaattattgcatatattattttttattttatttttaaatttatagtttataggttatattcttgtagtttttatatttacagtttaagttatctcacgaaagaaaaacttaaaaacaaaatgtcacacataattttcatctcctacaaaattaaagaaatatacttagtgataataattttttgtttaaaataggtgtaaacttttttataacaattaaactcccgactaaaatttatgtgatgatcgttaaaaaaaaaaaattagaattaataagtaaaaaatgtttcataaaaatataaaaaaatattttaaaatataaaaataaaaacatcccaaaataaaataggtggacacaataaatttttcttaaaactctaaaataaataaataataaatactgaaacccattagctgagtctgattccataattgataattccactaacctgacctgacccgacccacccacccacggctgacaaaatgacttttatcgtttaatcctcgaacagtacaacttttatattcatcgaacttgtataaatagctttacatttcaattctttaattcattctcatttcaacttctctactttttattctctctgattcttcttctcctcctcttttgtcaaaagcacccatggctcaggtacccactattttctgttttgctttcaaatccttttctttctgtgtttgaatcagtttttgtttgttaattttagtttggatcctttcagaaacgaaattgtctaaaagcatcatctttgattcgtagaagaatccaatttctattttctttttcttttccaattcagtttaagggagaaatcgatgattatttgacttagcatgcagtttgaagttacaagctgacagccctcgtcaaattttagatgatttagggattttgattgactcatctgtatcttttatttttaggttgagttttaggtctttttttttttttttttaatttttgggtcggagaaattgaacttgggcatcgttatctcttttatcaaaaaattagttgcgtggtgaaaaaatgtttaattcgaatattcccttcagtggatacctttttgcttttctctgtgttctgagatttccgagaagtttgtattgttattgcaattccagtataaagtatagtttatttgcttatttaaattgatgtctggaacccttgatctgttcagctttatgttctgaaaaccatggtgatttatatggcggagttctagcttgagaggatacttttcttcctctttatttatttattttttattcttttttttttcttattgccactaaattaatatactttgattttttctttcattttgacattggatttgtttttggagcagaccgttgtcctcaaggtcggcatgtcgtgccaaggttgtgttggtgctgtgaaaagagttctggggaaattggaaggttggtgctattgttctatataataagtttaatgagccattatgtttgtaaacaattctgcatcacagggatcatggacccccccatcccctccaataaattctgtcaacaatgctttaagatactctgctcacttcccttgagcacataatttttcaaaatattctcattgtttggaaattcaattgtttttatgcctttcctcaacgggttcatcatgcatgttgttaactgtgtaatgcttttaggtacaggtgttcattggtccaattatctgtaaaactgttttgttttgctgaaattgttttgttctcatcaattatctgcatccaagattttgatgccctttttagattgtcattgaaagaaatacaaatgcaattatcatgagaatagctctttacgattatactgattacattcttcttatccaaatttgtaattgttttgcggtagctgaatattgttacatcttactattctttgtaatcgtaatattaaaactttggtggatatatattcttgttgtattacctcgactcgatattgaacttgtgagttttttctttttcttttttaatcatctataggtgtggaatcgtatgacattgatatagatcaacagaaggtgacagtgaaaggcaatgtgccagcagagacagtttttcagactgtttcgaaaactggaaagaagactgcctactgggaggaggcagaacccgcaaagccagctgaggctgaagcaaagcctgcagaaggggaagctaaaccagcagaaaccgaatcaaagcctgcagaaactgttgctgctgcttgaaatctcaactgcatttgcataggcctgttgagtgtattgacttatcttaatttgtattattcagtgttcacttgtttgttacaggctacgacatctcttgcttcttgtgtttttatctctatagaaactgttgtacacctttggttggtgagaaaatgataaaagaaggatctgatttctcgtgaaattgatttatcagaaattacaagacagattgtttttcaaaatcaattaatgtgttatttttctccgtgtaatcaagaaaacccaaagaatagttgaattgatttgtggtccacctgaaaagggttttggatttgtttgtcttcttaaaaagccttgagagttgagaatagcagcaactaatgaaagtgaaaaaatcggaaaaaatcgacactgagatgtccttcaatgatgtctcagcgatatttaactaatatctagaaaaacaatacagttttgcaatacttttcaaagtgaatacaaaaaataagtcgtactagtacacgtagagaaataaatcaacattttttaaaagcaaattgtcagggaagacattagtatttttcttttcttttttattaatatataaagtagatagaggttattcatatctcctacaaaaatgtggacaaacggtatgaatgcttatggctaacaattttgaagaaatgattaagatggtgaggaaaatgaaagaaagttacaccttagaaagtgtttgaagtccatgttgttgaaacttgaatgtaagagtgcaaatccgacaatttgagctcacattatacagcaagttgtacacgatttggatgaagaaactttcaaaggttcagatgctgatgctgcagcaggggcctgcattggtgaaaggttcaataactccagtgcttgcaccctcaacttacgaggataatccgccacacacccaattctcgggccagctccacttgaccatgtcaaagacagttgctttcctaattggtaggattgtgcttctttcctggacttgatcctctccagtatttcttgtttaggaacctgtgtttgaggattctggagactactcgataacattcttgtaaaactgctaactctgcttgcattgtcagatttacaagagtcagatggtttttcttttatgtgttgttgtaatgtacatcctcgccgagctgacacgcttgtatcatagttctttttatcctcaatggtggacattacctgaatttaacaataaattgtaacagttggctttttgatgacttggtagctcattttacagatgactacatttgagttttgtacctgaacttcatcaaggttgactccattctccttaaggaatgtgaggaagctgctaaggttcatgtcagtgggacggtaatgtccactgtaagccgatactgactgaaaaaagttacactttttaagttcttaacaaactaaacagaaagaacatcaagctgtatttattctgcacaaaaaatgaaaaagaaaaatgctctttggggcaatgttagcatctaaaaaatcatgctcaccttgactcttccccattctactaggagccctccagcagataaggtggcagctcctgcaaggaagctggaatgatgaaataatcccttctttttctgaaaaatgaaatagagattaagcatataaaaaaaatgttcccaaccaatattatgatattttaactgataccatacctcaccaacataaagctttctgtcagtactcattacaaaaatccattttgtactttgtttgccttgcttagtatcaaggagttctccagttagcttgtgcactatctttccttcagtaatgatatactcgtaggcttttctctcttgcttatttcatgaagaagattacacttaatatcagaaaagtcagaacatttatgcagaaaaacaaaacagttgtaatgatgctattacaagtgtttcataagctaatcctgcaaatgtgattagtttcttcaggcttatattatattacacatatcattagaccatgaaattttgagccaatattgtaaaggtttgaaggacataataattcaatatttcacatctttaaagtttttttcccactcttaaagttgttataccaatattggtgtttaatatggtgaaaatgttggctatggttaccggtccaagatatctgatgcactcttctcgtagccttggtcttgggcaatcttctagatcaatcttatatccatctccagcatccaacctatacaaagatagaactagtattttgtaactttcattatatgaagattaatcgattagccaaatatcacaacttcactagaaattaaatatgtacatacataccagtagaaaaatggttgccctgcatctcttctagtccattcttcatagtaaaattttagattgtgaccataccgatgccttggatctatctgcaacacatcatcattttcatttgtcactctacaaacagaaacaagtaataattgtaatgagttgaatgagaaaattcaaaatatatctactaataataatacttgtcatgtcaatttcaatcttacagcttcaatccaatgctgaaaagctaacttttgcgcctttgaatcttcacataatcctttcccaatctaaaataaaaacaagcaaaatttttatgaaaaaaatagctctataacataacaaaaaggactcaagaaattggtaacatgcctttgaagcaatcaagctaatcctactccatcttgaggctggcgtttcggatttatggtaatcgaaaaaagaaactgtactatagttaagtcttgcataatttatagcttgccacctccaaaaacaataagaacacaaaaaccatcatttctcaaagaaaacatgttaagaaaaaacaaaggcttcagtttcacataccataactcttcagcaaccacagctgagtctgctaaccgacgtctagtgcggtaacttctgtaaactttctgtaatttaactgcagccgttgattcttggccgatagttatgttctgaaaatccatgacagttgatttcacatcatggaagccttgagggatctcagtcataagtggaaagatattgaaaggagcacacaaagccaagaataatccaaatggttttgttgaaattgctcatctctctacactaatcatttaagttgtttttttttt

SEQ ID NO: 378170 - DNA, 2557 bp, Cannabis indica
aaaatgtgaagtccatgagatactgcagaagaagcacaatccataggctgaaacccaattctctctttctctaaatcatacacaaccttcatattctgttgttggaagcttccaaacacgccagccggcccattttcgccatcttccatcctttgaaacaataagcacttagtcacagtggcgttcctcggcggtcccatggcgtagaaatgggttccttcagacaaaacaatgctcacattgtttaaaaaatggaatgtaattgatggaagaatatcaaaatcttctctggtagtatcaatagtgttactgttgctggtgttatcattattatgaggattagtatatggaattctatagcacaaatcgaatccggtcttcatttccatatcctcagctctaggataataagatatcactgagctaagtgtggaaagaagttgagagtagataggctcaggaaaatgtgtatatgttgtgcctgagtctatcaacataccaccatttcctcttgagtcaaattctctcaaactcaaaggcacttcactacttgagctagagtttcctatggtaatggcttctagacctatatagtaagagttagggtacattgaactcattaacattggggtaaactgcaagttttcatcttgatcagaagaaatactagctaagtttcctataactagtgggcttgaaatattagggttgtttgcaaatttgaagggcaagaaacagtgagaaaaaccctttagaagaaaacctaattgggatggaagtgaaagagttcccctaccaaaccctgcaatcccaacaggctctttataagtggaccacacacacccaaatgaaaagtttggtatttccctagtgggattactaataatagtaccattattattaatattaatgctaatagtaacatcattaatattttcatgaaccctaagggtatctctagtaagcatccctgtgacaactccacctgcgccataagtgtaagcaaaagaaggacatgacctagcacatgatgatgaggattttatgagagtactcaacaaacaacccgccatggtacaagggtcaatgtagttatctgagctatgaatgtcaatacaaaaggagctactacaaggctctctagctgtggaagaagaatggaatggagagaaagcagttgtcaagtagtacttcttgttgatcccatcatcatcacaatccaagcaatgaaaaaaagagagattgttcccgcatggaacccaagtgagatcactcccggtatccatgtacacatgaatgagttgtgggggtgtacctaaataaagaggtattaggtacccatctcggactgcccttaatggctccaccatgacaaagggttctgattcatgagtacttgcactactgctactagctgttgttgattgaactgatgagacagctagttttggagttaagagggtagtccttgagtgcttaattccaaggacaaaagagttggctgatgaactttgcaattgctttctggctacggctgaatccacattcagaaacacgctgatgatcagaatgagaaaaacataatccatgattctggtgaagagagtggttcggtttttggtcatgtattgcatgatcagatacaatatatatatatatatattaccactcatgtattctggtttttatagaggaaaagtttagggttttattattggttgataatatttagttaagataggttaaaagaaagtggatgcagacgtgtatgtgcgtgtgtttatatgggtgttgtattggccggtacgcaaagccaaggatatcttaacggctaaagctgatcaatggagaaacaacagaggattatagacaattaaaagcagaatataaggaaacttaattagttaattaatagttgagtagtgcgattgcattgctactacttgtatatatatgcatgtattatataccggtatatttttctcttatatgtagtacgaattatgtattataaattatgattatttcatattataacatatatttatattataattagtgggagtgggatacatctctggctatatataaatataatatatacttgtgcgtgtgtgtgtgcagctttgcatagtctaagcatgcccatacctgcttatgatgagtactttgcatagggtgatattatttaaaatctgttatgttggaacacttttttaagggttggcggttactaaaataattgaggggctttttcatgtatataaaaaaaataattaaattacaacaatacttatagtaagccctatacatattgatataactcataaactaaatattaccaaatattatttcttttactacttcagccgcacacggaacgaaacaaacaacttcacacacgcaaccttcgatcgaccaccccaacaatccaacacaaccgaaacgaaacccaatcgaaagagataacaatacaatagattttatcatatttgcaagtattttatatcgtcaatacaatataaagctcttaaaaaaaaaaaaactttataacatg

SEQ ID NO: 378171 - DNA, 4992 bp, Cannabis indica
atatataatttgaactaaaaaaaatattagccacatgagagtagttgttacttttacaatctaacatggtctggttctaaaagcctacttgcggtgaggtactctaaatagttttaatgatccactctaaaagtttttttttttttcaaaaagaaaaataggtttagtgactcactacgaaggattactaaatgctactttttctgtcaccctcactagtgacgtacttgaagggtcactaaattattttagagactcttaatatgagtcactgaaacttatttttgcagtagacatgttaggctgggttggacttctcaaggaagctaaagatttcatccaagtcttaccataaaatcctggtcctctaatttggcaattactacttggtgcttatacttttcatttcgattctgaattgggtatatatatgttgctgagcaactcgctatggctacttctgacagcccagcaccatacattttgctggccaatttttattcctcattagggaattggaaagagagagcaagaacaattaagaaaataaaggagatgggggttgtaaaagaaacaggtattggttggattgttatagaaaagaaagtccacatctttgttgtttgggatggattgcattcagaagtagagatcatttattaagttttagacctactgtttagactcatgacagatgagggatatgtaacaaataacagttttattctctattgtttagatcgagatgaaaataaatagacaatgtttatatagttactatagacaaatatgtcaaatttagtaattactccgaattatactctattcaaattatctaattacattaccaagtagttttccaaacaaacctatgtgaacagacaagtcaaaatgagccaagagagaaaataaaggatgtggccctgcagttgtttaatatcattgtaagttgtaactatccatcaagaaaaatgtatcagagtttgagacttttgagcataataataatgtatcagacttgagcttcataggtagttgctttgatggagtttcatttcaaaagaaaaaattaagaatgtggccccaaggcacttagccatttaatgtcattgaaaatgaggaaagatcgtgtccaacttgataatttcaaagtaatggtcatcacattaccacatgcttctaagaaaatggcctagcttctttccccattctgccattcccacaataccattggtctttctttttcttattggaaagaatcaaaagtttgctaaatggcaatccaaatgagctttttctatgctttaatattatttttaattgttccctcttgttcagcttcatcatttgcttgtaagaactatatggactgtcagacactactcaaattcaagaaaagcataacaagtgatccgggtagtcatcttcaagcttggaacgaagtcaatcccttctgtaactggactggagttacctgccaccgaagactcgaaaatcgagttgttgctcttgaactcatagacatgaaactagaaggaagattatcaccactcttatccaatctttctcttctcactacactgtcactacaaaccaatagattctatggtgaaatcccaagttcatttggagaactttcaaaactagaaagtcttaatctgtttgagaatttgcttcatggtaatatcccagcatcactacaaggctgtcaaagcttggaagtactagacttgacagacaacaatctaagaggggtgattcctaaggaacttgggcatataaagggcttgacattcttagctctctccattaataggctcacaggatccataccttcatttttatccaacttgacagagttgacaagactagaattgagtgggaattacttttcagggaaaattccagcagagctaggtgcactgaaaaagttaaagattttgtatgctcacgttaactattttgagggatcaatacctccagagattagcaactgcacttctttacttgaaatttcactgaattacaatggtttaagtggagaaatacctccagaattgggttccaagctaccaaacttacagaagttgtacttggtgaataacaagctctctgggaaaattccagtaactctctccaatctctctcaactgatactacttgatttaagtcttaattacttggagggggaagttcctttagaacttggggagctttacaaccttgagattctatatcttcattctaacaacctggttagtgactctgataaatcttttacattattaagtgccttaacaaagtgctcacatttaaagaaattgcatttggcttcatgttcatttggtgggaatataccgaattctgttggtgctctttcaaaagagttgtactattttagtcttcaagataatcgtttcacaggatacataccagagagtattggaaacttgagtagcttagtccacttgaacttatcatacaacaatttagatggaggaatcccacaaagccttggaaagctcgggcaactacaaaggttaagcttggcaagtaacaaaatagtgggggcaataccagatgaaataggacatatggctaatcttggattattggatcttggtgagaatttgattagtggctcgattccaccttcttttggaaaactttcacaattgaggtatctctatttgtctcataacaacctttcaggagagttttccattgaacttactaaatgctctcgtttaatgttgcttgatttatcatacaatcacttcaatggatatgttcctttacagattaaccgtgtctctgacttgtctctttcacttaacctttcaaataacaatttccaaggacatataccagagactattggaacgctaatatctgtactggcaattgacttttctaataataacatttctggtgttataccaagttcgattagtggttgcgttgctttggagtatatgaacttttctaacaacatgctgcaaggtcctataccagagtcaatgaaagaaatcaaaaatcttggagttgtggacatgaatcataaccaattaaatggcacaattcccgcttggattggaaatgagcaggtgatcaaaaccctcgatctctcatataacagattatctggagaagttcctaaatatggtagcttcaacaattataccagaagctcatttgtggggaatgtggggttgtgtggtggctcaacacaaatgaaacttcctccatgtaaagttcagcaccaaacacgtcagataaagaagagagtgatattcgttgtgatcttatcagttacactgagcctcctttttctgttagttgctttcatttcatggtacgttttcttcaaaaaaagttacagaaagaaagatgataaggttacaagtgggatccctagcaattatgggaccaaaactttcacccaaatggagcttgaaagtgctacagatggattcagtgaggctaatcttcttggccatgggagtttcggatcagtctataaggctgtcatcaatcaaggaaatactacagttgctgtgaaggttttccataaagattctggtctgagttaccaaagcttaaaaagagaatgtgaaatattgtccaaaatcaagcacagaaatttaattagaattataggattaacttggacttcacagttaaaggctcttgttctagagtttataccaaatgggaacttggaacagcatttgtatcctggtggggggttagaagaggcagattcttgtgaactgacattggaggaaagattgtctatagccatagatgttgccaatgggctggagtatcttcaagagggctatcctactcaaatagtacactgtgatttgaaaccacaaaatgtgcttcttgacaatgatatggtggctcatatagcagattttggaattggaaagcttcttttagacaaaccaaatggagaagaagctagcgcaacaagtttcctaagaggaacaattggttatattcccccaggtatgcactttttttttttctttaaaaatggtatgcattttattgggtctatatattcactattattaatagcacctatatgaatattttttattttttatttttctagtaccataaactaagataacaatttgtttttgcattgtaaaaccagagtatggacaaaggactcaagtatcaaccaaaggggacatatatagctttggtgttatgttgctagagatgattacaaggaaacgccccacaagcagtttgtttttagatgggcttgatctaaggaaatgggtggtttctgcattcccaaacgacattatggatgttattgacatcacactgaaacaacaagcaagcataggaggattagttggcagtgtagagagggttgagcaatgttgttatcgtttggttcaagttgcattgttatgtacagaagagaaccctcatgaaagacctctcatgtcttcagttgtgagtaaattgttgagtatttcgagggaactgagatttgaagctccattgtccaaacacaatgaaagagctacaatccctggactttgtgagtctagtgatcaatcctgatatgggtgaaatcaattacgggactttttagagcactactatttagattaatgaagcatatattatactctttcatttggataaaaaagattgcatgtataaattctccaagtatgtgtgatgtactacttttgtgatgtacaactgtaaatatataaggcgtctgattccaacccgctttgtacgacagccgattgagttacattggactattacggtagggattaggtaaaatacctattaatagggataataatttataacctttgatttaatccaatggttcaaattaactcttgaaaacaacaccataattaatatatttatttatttggaagaggtttcaatagttacatttttattgtaaccatcatggttacatttttttaagccatt

SEQ ID NO: 378172 - DNA, 1734 bp, Cannabis indica
cagaactcagagtctcagagagagaatttattattaccttaataaataacttgatttaatatatatatatatataatatatttatagcattgtattgtaaatatttttgacattgaaaatttaaaaatttacagtaatgcaaattctatagtttttattcataaaaataattaatttaattcacacatatttatataagtaaatataattaatactgaggaatgctaatgacaaatacttattgcacacattttatagtgatgtgtatttaatttttatcataaataatacataagaactatatcatttttagttacatatatagttaagattaattatatagaaaattgtatatagatagtgtgtacgatgagtgtatcacaatcattattcattaatattttaagaaactcatatatataatagtatatacatattaaattattattaaagggaaatagagcttgattatttcgtaagaggaaaggaatgagtggtattattggatcagtttatctattttgttgtttggagaattaaatttaataaaattaaggttattgtatttttaatatctaagtcttcatttaaattatttttaatatgctatattaattataattttcattgtgaatgatatatatatagagacatgtaaattatattaatgaaaattgatcagatgctaattaacaaaagaagagatgtatagttaatttaatttccttctgtgtaaatgagtactggatcttatgatcataaatttaattatatattaaatcagaaatataattactaatttgtatataatagcatgtgaaattgtgaatcgagctgtactaatatacataaatatatataattttataattataataaaggaattaataatggcgtccacattagaaaatgattagactgaatatatagatatcccgatcagacgaaatatcataattggaaattgtgatttgtgagttcaaaactaattttaatattaaaatttgattatacgaggttatcataatatatttaataaataatcttctaaataaatattttgcaagctgtaaagtggtagtaatattaaaaataacaattttcaataataataataataataataataattagtttgtgtgtcattttccagctggttttagtgaaagcaacagaaaattttaaaatttcacgattataaattatctgaaaataaaaaaatttcaatgaagccacccaactatacaacattcatcaatatatatgattatgatttatttatttaggaaaaaaaaaaaatgattgtaatttagttgttgatttggcacattgcatataatatgagaaatctgagtacataattaagatttaagaagaataaaaaaaatccattaaattttcaatttaccagattaaaatatgtgaatttttctgttcctatattttatttcggtataatgttactttttaaataaaataacaacaataatagcaaaatagttaataagcaatcccctttcaaagtaaataaaaagaaaaataaaatggatagttacctaatatcaatttttgtaaaattttaatatttttttatgtttaaagctttctttcgtatatttttacaatattttataaaaatataaaaaaaaaattaaataaaactaataaaaaaataacatcaaaataatatataaataaaaaaaaaatcaaaaataaaataataagaatacaaca

SEQ ID NO: 378173 - DNA, 1628 bp, Cannabis indica
aggccaccaaacctatcctcctccctcataatctcaacccaaaagatctttttcgcatgaaaatacgaaagatcgtacacacaagtgagaagtcagggatgagtaggagggtccgagtataccatgccaaaaatatggttacgggaacaagatatatattcgaagtcaaacctgaatttccaagccagaataacaccacttgcagaattaacagcaggcacagtaatattaaaataaaaataaaaattgttaaaaagatatactagtagagtagcgtcaacttttagctcagtcagaaaaatgaagtcaggtacatacgaccgaacgagggacttcagttcgcaaattgtagaggtctgttccaaccctctacaatttcaagccacgactctcatggcttctatggaggaggtgaatcatcctcctccataagggtatcaggctgagacgacacacgagatccagtatttttaatcgaaaccgatccaacaccattattgttaacaaagcggccacccgagagcaacctaatacccatacatttatcattattcatgttggtgcgccgactaacaacctcctccccttaacttggtacaatattatcttaaggaaagtctcacacgacaccgaggttgagaaagaatgttcaaaggtctagaaatgatgaaaccataaactcatctttatttgaattttgttttgagaatgctgaggataggaaatgggttttggacaatggcctgtgaagtgtgaaaggctataacatgatcctccatgaatgggctcaaagcttaactggtgttgtggtttgtggaaagatttgtttttggatacagattcaccagttaccccatgaatattcttccatttctaatggtaatgatttgggagctcttgctggttctgtcatgagatttgatttgtatgaagagaaagctcccagcttggccaaatggctaagggtgttgatcgatcttgatgttgagaagcctctgttctctggatgttttatcaacttatcgaatggtgctaaaagattgatacaattaaagtatcagaaactgggcatcttctattttcattgtagccatttgggacatcaatgacgtgggcgtaaattctcatctcttgataccgttatgaatgcccgtggagtttcgtttcaactgtacgggccttggctgtcgtccacgtcccaatatgtggactgtttctcaagaaagcttgttactgcagctcaaggtctgtccgtgcaggggaaaatgttctctcttctgtcctgactctggcaaagcctgtggctattcccatcgatgattttactaaggtttagactagtttggtgctgcatgaatcaaggagaaagaagatggtgacctgtggtcctcgtacagtgagacacaatcagagtttggctatttgggttctcaaaaaattagagaccatgcttggaaactaagatttcaaaaaagaaaaagaaaagaagagtggctgagagagtgagaagattaagaaagaataagccgtttataataaatactaataaatttggaaaggcttaaattgtttttgttgaccaaggttttcggcaaccaatataataataatatttatgaaagctataa

SEQ ID NO: 378174 - DNA, 1090 bp, Cannabis indica
ggaagttctttgagttccttagtcaaaccaactcccaatttgatttccttaaaaagggggtcaatgtcatccctatcttgggctcacctttaagtggctttaggtgccatttccatcttctatgtagtttgaatttcaaaggtctttgtcatttctctggattttgtaggaaatgtcttgtgtgtccccctggagaaatagatttagaggaggtctttttggcatgataacgaagctttatagcacttacgggtcattcatctattgccaaggagacaatcgatactagccaccattaggaacttgacggacaaatggtagattgacgagatggctcgaaggtcgtataggcagtcctttcgagcattaccttgtatggagacttcacatccaccactatgaacgtggccatgatggtggtctgccttggggcaatgagtggcagtttgatctcaccacatggaacgatgtcggccccgctgtaaccatacataagatttttgcatggttccaggtcttctaaggttaaaggcattctgatcattgatcatcacccttatcgccatcatatttttctattttcacctaaacaaccaagggatcgttatgaaggtagcttacatgatatgagtctgattctacaaatgtgagaggatcacacccataacattgagactttggagaaaaatctgctacctccttttgtacttcagctatatcttggttcatgtctcaaagatctctcatagctttctaaggttgtccttaaatttctagctaggtaagggcctctaatcacaatctctaccctgcctacaactggcgcatgctggagaggtgcattgcccccaactgaagcttcacgtcatacatactgctgaagagcagcatgttttaatctgatgaaaaattctatctcgtccctcaacagattacactcattagtgtgttgaccgtaattgttgcggtagcaataaaattgttcatgtctctctttcctgactcttcaaaagggagaggtttgtggtacaacatgttggaaattattttaccaggatcttagatctattcacaagtatgtttattaaca

SEQ ID NO: 378175 - DNA, 1051 bp, Cannabis indica
aatgcaagaagctgatgatttcttatggggccattgggtatttgaagaagcttagtgagatggaaattcctggggccaagaagctgcttgacgtttggaaagagggaggttgagaaatttgttcatgagaaaataggaaaaaacaaaagttgcaagtaaaatatatgtgagtcttgtataatagagaaaaaagtcttaattttcagcatgttagctctttcatttgctatatgaaacaaagtagttaatccatgaaagcacaatgtaacaaaagtaatacaataggtagaatgcaactgtattatttgtgtcaattagttcatgaggtggtgaaaatcaaattgtgtgaagcaaagtttgattagatgggggaagattaatttggatctttgcttaaagagtttgaggtctgagaattgcagaaggagattaattctttggaggtaatcaattcccattgggaaaggtggaacaatgcttcactcacaacttgttgggctcttcgttgattgaggtcattcactaaactaatatcacagactcacagtgttgtcattcactaaactaatatcacagtgatcttttgaaattgattctattttattttatttcaatttagcatttggcttataaagccttttctttcccataatcatgcttaggtgttgcaagtagtgattcaacaattattgttgtgtttaattaaataattgattcattcttagttttgttgtttgaacataataattcattttcatatttatgcttaggtgttccacaacaaccactgcaattgtgaattgttagacagttcgatcccaatatgtggagagtttaatgttggagtttgcaatgactagacgttaataaccgttaataatatcttctaataatgctactttcatctttattgttctgggatgagtattaatagaggaaaaaaagttggcaaaactactttattagcctttaataagaaacatgtcatgctttgaacaaattattaaagcaatactaagagaaagagagaataaaacatatttgtaatcat

SEQ ID NO: 378176 - DNA, 3492 bp, Cannabis indica
tctacaagtttttgaatgaggactgaaatgcttaatggcagtttcctgattgactggacttaatatcattttttccggatttatatacaggtgccaatacaagtcaacaagtacctggcatacagtgatggaatgagagtaattgaatctgggaagctcttgacccagacccttgcttcagatggcttattatttgctgaattagatcggtaagttatagataaattagcgcttataggtttttttttttttttttataaaaatttatgcatcgtgtgtgtacaattatagtttgctctccaatgctggttcttggttggatgctaaaggttctatttccttaccataattgtgtaagtgtgtgcatgtgttctttattaaatttgactttattattattcttaagatgatgttagtctcctctgataccagcaaaaaatgtaagacttgaagaggaacttgtaatatcagtcattcagttcagtttagtcctcaagtccatagttctaaatattaaattaataactgaaaacattgatatcggaacgtgagttaaaagtagacactttttatagctaaattagataaataataatgttcaatgtctttggaaagattgagagtgcattcttttcatattctggtgaaagacagtattaatttgaagatttattgtttcagaccaagcggtcagccatgcgttgaaacaaaggaatttaatcttgtacgcaatatgctggtggcagctgttgaggagcgatacagagatgctggtaagatttcattctctgggagtgtcaaatggcaaggctgctagtattggttttgtgacttttcttttacttcagatctgtatcaccttattttttgactttgggtgtttactatttgtctacttgataatgcactcattgtttattaataaagatgctgtagaaaaaatgtgagtacattacttggtaggattctacaaataatttatatgtcaggtgatgaagctataagttaatcaggcactagttttcactcgcgatctacggcattcttttgcatgttttcatttgggttttttttttcatgcatccaaaatctctatatcaacctaattcataaagtatggtggtgaatcttgatattatgtaattggaattcttatggacctcccattgttctacagctcagtggagggataaactaagtcaacttcgtgctagaaagaacttggcatgacaggttaaaatatcatttatatcataattgaatctaaatttttggtattacaaacaaatttaactaagtgatgttttttcttacttctttcagctgtgctcgaagattatattgtacatagacaattgttcagagttggccgggctgtgtcagggggatcactagtgccttttccctctgctccatatgtatttagaaacttgtgaatatttatattatatgtatgtttatatatgtatgtatgtgtatgtatgtattatatgtaagtacagaggaactttactgccactataaggttaataacaagtgagacacttcgttggttgttaagttggttggtgtacaatgtatatggcatatgaaatcgtgtcattaaaccttaattgtgcttactagactgattattgactcttaccaaccattccctacaaagctacaagttaccattcgagcagaacagagcatctttgtttgttttattttcttttacttttctggttttgtgtagtcctgggagatacctaataggccttttgtcgttctttctcccatattgtggactagcaatttgggcattcaaatgttacattattttttccagcaaaaaaatgttgcattcttttcaacaaatatcgttatttaatttacatgaatcaaatggagaatttgcaaagtggagatacaagtcaggtagcacaaagttatgatgtatacaattgtgtcatatatatgccaatagagacatttcaaagtgtatgtatgctacctttaagacatttttgctttttttttgacacgcggaaagagttacaaggaagtgaagatgcgtcatcgaaacaccacggtgctaggcagagacatcatagaaacataattgtgtggtgatgcgtatcgtcatagaaatcgcgtcatttatatctatttaaatgataagaatttcatttgaaaaagttgagatatttatgcacttcaaattgctaagaaaaaagaaaagtaacttagggcaagtggcgatgcgttgccataaaacacagtggcgatgcgtcattatagaaaaaccacgatgccaagtaatctcatattgtcatagaaatcgtgtcatttatatctatttaaatgataagaattttatttgaaaatttgagacatttttgcacttcaaattgctaagaaaaaaagtaacttagggcaagtgacgatgcattgccatgaaaacactactacattagttgatgtcacttggtgccagtggtgtataattgtgtgtgatacatcgatatagaaacactgagagacctacataagggagctgtaccaaaactttttattttatgtaatttattataaattaactatgtaaaaaaattatatattattttatagaaactttataaattaattccttatattttgttcccctaaactttattttctcactccgtcaatgttttgtgtcattaggttccaagagaaacataattgtgtggtgatgcatttgcatagaaacactacttggcaatgtgtaatcaggtgtcaggtgacctacagtggagacacgtcattttaatttatatattaaaggtgcattttaaaaaatttgtgacagttttgtgcgttataatgctaaaagaagagaatttctttaaataaataaaaaaaaatagtgatgtgtcgccatagaaagtcattgctagatgacgcacataattgtagtgatgcatcaccatagaaacaccaggtaatgtgtcatttggtaccaagtgacgtacataattatgcagtaattcaaatcattaatctatataaatgatcgaaggtgcatttgaaaagttctaagacatttttgcactttaaaatgctagaagaggagattaaattaaaaaaaaaaatgaaggtgtgttgtagaaacatataggacgacatattacttggtgccaagccatgcatattaattgtgtggtgatgcctcgccatagctagttttggatggctctgacaattcacagctaagacaagaattttcgctatgcactgccattctctatcacttgctttggtcgacaagaaatgataactttcataatgacaccaagtggagtttttttggagttgaaaaagaaattgatgacaagttttaatcatcattggaaagtggctattcaaagaagtccctggctttttccaagagaatttagtagaagtggctcatcctggcagattcaattgttggattaaaatcttattgtgggcacatatgtataa

SEQ ID NO: 378177 - DNA, 4536 bp, Cannabis indica
gaaggatatatcatagaatggttccatgactcgaatgagactctaaaacttacatttttttgctatgttacaaaataatacatacagatgaacgaatgtattgaactctgttgccatataccacacctaatctttgacatatgaggtgggtgggtttggcgtaatgctcaaagttaatgaataatcactcatatgatgatttaaacaagactaagttcgtcagtagtgttggaagcttcttcaaggagatcgtcaaaatcaatggagagcttcttccgcagtgcgaccaattcttcaccagcgttacatatgtacgcggaagcttgtctgccagacaatgttgctccttccatactgtctatgtaatcctgtataagatggatgcaagcatttttttttttttttttgtttaaaaagagtgtcatttaaaccaatttacttgttgttatgaaatatatgctgctgcaatcaaccattttcaatgaaagagaaacttgcctgttttgtatacgagcctgctaggaagaaattttgtataggggtcttctgatcaggtctgaatggatctttaccagggccctctcggtaaagagattgcccaattttgacaactgatgaccaaataatttctaacccttgggatgatgggaacaaagttaaaacctggagtaaggaaaatcatcagtaaacagataacactatgatgatttgtaataacctaaacgagaccaaataaaagttttttaaaagggcaataacctgttttgccactctttctatgatttgttcattagttaagggcatgtaaggatcgccgggcgtcagaacacatctgaaaggtaaatcagtcagtcaaagttaagcatgtcgttgaattactttaaattttgggaaatttaactgctaaaataatattaatgttttgcttactggagaagtgaaccttgtccctcaatgtagtagtcagctggagaagcaagtgctaagtctgcaaaacacgagaaatctgcgtctggagtataaagaaggttatccaatcccgcagctttctttagttgcctaaaagtcaataagtaattggctataaagaaactaaacaaatcctatgtcctcttattcacaggactcaatgaagtgaaagaatcagatatagatgagaaaaacaccttgaccgttctagatcttgcaactctgtgacccagccattgtatctaagctgcaccgtgacaaccggaactcctactagctcataaatgttattgaaaaattctgattccctccattgttgtggaagtaatctcttgattcctgggacatcacatgctgaacgaaataaacagatttagaaaatataatcacatgacatgaacaacattatgagcaggggttaagagagtaaaatacaaacctgcaacataagcatcggctttgattattttcttgttagtggcctaagataagtaaaagaacacatttattaaggcttaacagttagcgggaagaaaaataaaatcttcagaaagaagagttattttgcctcaagttacttggccaacacagcacttgtaaagtaggagttgtcaactcttaatccaaacaataaatcttacaaaatgccaaagagacacacaatgacatgataccttggatagggctaatcctttaacgtagatttctccattagcagatttatcatatagtatctctctacatccccacctaagatgaaacctataccagtagaagacatgattgaaattcagcaataaccccaaaaaggcgaaaatatgattagaatccatttaaagttttctggtgttcaatattacctgccccctctgtcagtaatatacttttttattggaccactcaggtaaacatctggagagcccttgagcatgcgcaacaaggaagcctctgtcttagttgcaaataatgagaatatagtgagcatacaacgggcactgatgttatcacaatcaataaatccaagtgcatatgccacaggatcccacattctttgtatactggtacgcgtaccacctttggacaagaaccaatcagagaagctaatctgtgaaaatagataataaagaatcaaaatacataattaaagcacaaagtgatgatagccaaaaactgtgagaactacagtagtaatgaactaaggatcaagtgggtgaatacacacaacaaatggaataaaagtaagatgaatagagttcttacattatccaaatctcgaatgttcctcatggctccatctggatcaacaagcgccctaacaactggacttaaggcaagagccacagcatttctagctttgtcatatgtctacatatagaaaatgttaagaaaataggttcatagcaactcaaaatggtctgataagtaagacggcattgaacaggtataaggaaatacctttagctgatttgtagtcaaaaatgcattaataccatgtaatggtgccccaaccggaaaccgaaaatcaagttctgttttatcaagaaatgagagatgtacatttagaattaagagtgcatacaagtgtaccatttatattcttttgaaaaagcaaaaaatcttgagcacaaaaattagtcggtaacaattgtaaggtaagacttgataaaataaggtcgggcacttgaacttaccacctatttcaccccctttgttcacaaacgtgtgagtatgatcctttacaagtagatttttctctgcaccaacctaaatttaattgggcatccaataaaacttttagaagccataaatgcttaaatttaagattactacacacaggtaactccttgcaacttctttatcacctttttcattaaccggaaaagattgttatagcacccgaagaaaacgtgaagtcccatttcaatgtggttcccatgtttatcaacaaaagatcctacttttccacctataaatgaccttgaatcgtatatatccacctgaagaaacccaactacatttattactactgtacttgcaataagaaaatcatattacaggaaaaaaaaatcattctggaatagtcaaaagtccaaacttccaattatttcaatttgggggataacatagtgctgtgagagctattgtatccaagtaatgaagagaaaaggaaaagactttaaaataaagtagcactgcaatgagttaaaaagggaagtgaacctcgtggccctgatccaaaagctcaactgctgttgacatccctgccaatccagcaccaatgatagccactttcagcttggggcctcgatagtgctcgggttcaggtggaaacaacccctttggagctggttttaaagaactccaatcagtaaagctaaactagaaatttcaacagtaagtaagtttgtcctaaactaaagatgcagtctttacttctgttttattattgacaccacaactacatgatcaagtacttattaaatcactaatcaataaatgataataaactctattatttgataagtgatgtgaaactggatcgtatgacaaagccattttcaacaaaatttattcaaaggaattgcttccaaacccggaaaaaattaagaataacttatcaattcatagtgcaaaccgtcaaaaatttcagtgtgcacgttctaataaaggatgacataacaaataaaaatgaataaaaacccattaatcttagaagacaatatccccaaaagagagaaaagaattaccatttacactcatgtcagaaacattagtgtccaatgaagagcgaacacagaaggacccaggagacctcagcgaattgacaaaagaacgagaagaggaagcgaacccagcaacttccaaacgatttccagtgaaggatgaagccggtaaaagaacccaagaagccataagtgaagcttgaagagaccaaaaattagccctttatagctacagcttactgggttagtggggcatcaggctctgtaaacaagaggaagagagaggttggaaacaacggaatctaaacccaataaacgagagagagagggtatctgagtatatgaggaggagaagatgctcaggttgggaaatttgtcagctaattgggagcttagagcgagacacgtaatgcgattaagaaggagtgaggtttggactgcccttgaaagttaataaattattgattttggtactttctttaaaaaataaagataaattaagtcaaacaaggaagaaaaattaagtggtgactctgagtgtggtcgctctttctttttaggaagtgcgccattaaggtttgggagtggattatttgatgctacactagcaaatatggataaaatgttacaccactattacaaactttcatacagttatttatagggctgtacatcggtcggtttggacgatttatcctatatattttctaattcaatttaaagtttggattgctaaaatttaagtgcaaccggctcaatttaaaaaaaaaaaaaaatctattaaccgctattaaccgactaatgatttgggcagtttgatcgagttaacccgcccaaaccgacc

SEQ ID NO: 378178 - DNA, 843 bp, Cannabis indica
atatatatttatatataatgatagttccaaaaattaatggtacattttaaatttagtagctcgcaactgtacaaattttttatcgtagtgtagagattgtgaagcacgagatcgaacacatggaataacatgaaattgaagaaaaacttatttaatctaaggtttggtaacgctttaaatagatcaatatagaacctcaatttgaagggacttgttaagaacctgaaagatgctgaaatgactaccctacccatagaccaaatcctgagattataggttctctgatgaagaagatcctactgagaaggagaacgatgaaatttaaatagctgataagatggtgtaatattttggccaaaggaaattaacctgagccattaaattgtattttaaaaaaaatattattagcagtaaaaattaaacaccctgatgtaatcgttcccctccagccaaaagagatctgtagaggcaataataaattacctctgggaaaataaagtttataacaataaatgcaaaggtataattagaaataggtagaagattaaagatctgagtttaaaggttatagaaatagaaagggtggagctggtagtggaaccagagcacagaagggagacacccctagtaatcttccagagcaatctcgctgagtcattacataagaatcagatagtactaaaagttgagcaacatttacatcttgttgattgtgttatcttaatgctaaaattggaataatatctctaagaaaatgtaaaatggaactaactcagaattcaggataagatgaatggggtttcatctcaaaaccaattggcaatggaaggagtagcccattca

SEQ ID NO: 378179 - DNA, 827 bp, Cannabis indica
tagttacttgtaattaggaagtcattttcatggatactatctaatcgtagtaatgtaagctgcaagtactagtttccaataatagatttatttagggtaaaaaaagcttgcaaaaaggagtagagagataccctctttcaatttctgtagggcttcaaacagtgcatcttgtttctcacgatgcaagaactgtattttcaaaccaacacaagaagtaaaacaaatttagttgtctctcttatcactttcttcttgcaatgtgaattttttgataaagtagaacttgggtccttgactatactttttttttattttaactttgagaaaattggcttaattttgttatcgtattttacatgagtcatacaataccatgatatgaaagttttaattttcattttcctaacatactacaatttatgatgactcattatgttagtgcctcgagctcatttagatgactcaatttgaggtctaacactttgcttggaaattggcgccattcctctaatgttttatatcaaatgttgttgaaattaatatcttctgtactgcccacacttttcataaaagcctctacttgttaatgatattgtcaacttttaatcccaaccaccttatgattttgttaccaaaatccttactgattttttacataaaaagacttatacctctagacaacatgaaaccacctgaaatacagcttttgtgtacagcaagggaaaaggataagtctctttggtaacatttttgttttctaattttttaatcacaaaatgaaagtaaaatttttgttttaaaatttttgtttttgaaaaacaaaaagg

SEQ ID NO: 378180 - DNA, 3291 bp, Cannabis indica
ttttcggtctgtcactcaggttgcttacgttagtcagtgacttctccttagcctccttcatatatctttctcggtccttcttggaatctcaaccaatgtgagaccttcctataatggtcaacatattacaaagagacttcgagccacttgcttcttctccgttgtggtttccatccactcggggattttggtctccaatctctccatctttcttatatttgtctaattttcctcgacaaatcaattactcaatttgtcttgcaaaaaccaacattctagggtagtatgaccaatttctttgtgatactaacagaacttccatggatccctcaagttgcagttactgtttattagtggtggttttctaaagaaaactttgtgttcctcgatagcatttatataatcacgcaaaacacttaacttggtgtagttaacatatcaaggtcctcctttttgttttggtaaactttccttccttgttggttacttagatagttttgaactacaatgcctttttagggtgcgtcttctcggactacactctcttgaacttttgtgtcacaggctctttgatcgcgcccttcacttttttttgctcttctcaagttcagccagcgagatctcaattttcttatgggggttgcccatagaaaaaaactcagctaacatcttgagatgtcgcacttgtagttatttccaaaacttattccacagtaaaattcttgtaatgagcatgcaacccaacgaagactcgagggccttctctacttttatcactttagcatcaaagcatttaaaataatcttgcagagtctcaccttactcttgcttgatatatgacaaagtaatgtagggaggtttgtatgtcatagttgtttggaaatgtttcaaggataaatccatgaatttttcccacatcgaggctgaatcttttggcaactaactgaaccaatcgtgtgcattgtcttccaatgttacagcgagtatttgacacttttccagttggggtacaatggatagggttagtcaaaactttatatttcagttactcaaagatacggaagccttttagaagtaaggcctatcgcacttcctccgtgaaggacgatgttacatgcattttataaatgggcttcctctaccgttcgaaaatttctagagctcggaaaatattcttgtgatcgattcctccaagcaagattagattgtttgcaggtatggcctaattgccatgtggggcagctaccactactatgttcgcaggaatcacaacattatagagtgttgcaggtgcgatttgtggattgacaacattaaccacatgggttttctagtgagggggataccttgatcagcaacggggggatcatgaggttctttcataacttcatgattcctcagagttgggaattagacgtggaacgctttattcagacggtgttgtagatcgcctttctatacataatatcttcctcctagcctagtccataccaagcctggcctggtataaatcttgggagagctactactagacttcaaggaagaaggatgagattcatgttcatttacctcaagatgtgcttgtgcacaactacatggattgtgttgttcattatccttgtccttttgtgacctttcttccctttggctaagttgtaggtttgcaggtccgttcccacatgaagggccgcaaataggttgattcaaaccaagcccatccaagttgttttcatttgagtgctccatgcgattacaaagaagattagtagggtcatcatgatgcctagtactgttagttacctaattatttatgcgatgttgggttggaactagtggtggacatcgggtatgagtctgatttcttcctgcaatttcagcctgcaaagcttgcattttcccctgtattgttgtgtattgagtagttgtcaattgaacaataccatggaaggcgtgagcaggtggtattgggaagtggcccagtggctgatatgttgaagtttctcctgcatagcctgaaaagagtagaaaaaagttgaggggatttgtggtagcatgcccctttcctccaatggtggtgtcgataagaatcttccctccaccagcaatcggaacgttgattgtgtcaatgttgacagtttcgttgttgttgttcatgtttgtctatttgtagccattatgattctcctccaaaatcttagaaatgttataaaattgttcccaccgacggcaccaaatattttcgaaggaatttagacaacaccagaaaatgcaagtatttgagtaaagcaagaacacccacttacaattatgtagataatcacttagaatagcgagtactcaaagtatagactaccaaatagacaaaataagagtagtcaaatgtagaggacaaataagtatactggttcagtcagggctcagtctacttagtgcactttgtgcaatagtttcaacttagtttatttgatttggatcacccctttatatagaaagcatgtgtcaattaatattacataactaatcaaattgatttgttagatcaataactacattaattaattaagatacaagtttaaaggaataaatataagaatagtttcatctgttcttgtcttaattgtagcaacatctttgacttgcaaagtcatgtatcgtctacccttattccaaaacaggcaagctcgcagactctgtggtgctttaatcccataatagacctttgggcgtttaaattaacaaaaatttatgatcatattgatcacatattcagacattccatgtgtaacaacttagaacgtgcgagttcttaaagggtcgtcgaacactagtcatttggaccaaacctatgtaaagaagcaatctttacttgtcgcaggagagatatacttgtttatctcatataagagatatgcccaaccagtattaacatctcttggtcctgcttatcttttaactatcttgtgcatagtatagtatgtgactagaccctatctcgctcgcatcctcctgcaagtttgaatcattcgaggctggctctacaaaggccatatcattgacatgtcatccttttctatcaaaaattgtgtctacgtgtcaacttctcacaaggttgtacttgtatttttaggcaaaaatttcgcattaaaatagaccctttattaaatattaaatattaaacagtatcagctatcagcaggattgcactaatacaaactacacttttggtgtcagttttaaactaacacttataccttttgtgttggttcatagaactgacacctattccacaat

SEQ ID NO: 378181 - DNA, 4081 bp, Cannabis indica
gagtcatttggcagagttttagtcatcccacaaatacccttttgcctggccaagaattcttaccaggaatgactctcaaaagctctcttaatcacaacaatttgtctcactttcttgaaatcaaatcagggactttggctctctatgcagggttttctccaacaccacaaatttattggtctgtacaaagtgaaacaaggaaaacaaatagaagtgttactggtgtggttcattctgcaactcttgtctccaattcatggaacttttatgatccaaatggaaacttactatggcaatttattttctcaaaccaatctgacaaaactgctttttgggttgctgttttaacctctgatgggatcatttcattcaaaaatcttcaaaagggaaaaacctcaacttttgaggctactaaaataccagaaggatggtgcagtgttccacagccttgtgatccttactatgtgtgccatgttgataactggtgtgagtgtccttctcttctcagctctcggtttaattgtaaacttcagaatctcccaagctgtaatctttccaatgattcagtggagcttatatatgtgggagataatgttgactattttgctattgactttgtcacaccctctttgaaaactgatctcaattcatgtaaacaagcttgtctcaaagattgttcttgccttgtattgtttcatgaaagtagttcaggaaactgttttctcttagaccagattggaagtttccaacattctggtgagaagagtcatggctatatttcctatgttaagtctttgagtaacagagaagaaaatgaggaaagagaggaagaccacatactaatagttgttgtcattataatttcgaccatgtttgttattttttctatggtttatgctggattcttgtacatcaggagaaagaagagactaaaaaatgattgtgctcaagaaggctcagatgatgatgatttccttgacaatctttcgggtatgcctgttcggtttacttattctgatctttgtttggcaactgagaatttcactagaaaagttggccaaggagggtttggttcagtctacttaggtgttcttccagatgggacacaattggctgtgaagaaacttgaggtgattgatcattggaagaaagagtttaaagctgaagttagcatcattggtagtattcaccatgttcatttggtcaaagtcaaaggcttctgctctgaagggtttcacaggcttcttgtttatgagtacatggcaaaagggtctttagataaatggattttcaacacaacaacaacaatcaagtattggattggaatacaagattcaacattgcattggggacagcaaagggtcttgcttatcttcatgaagagtgtgaagtgaagattattcattgtgatataaagccagaaaatgttctgcttgatgataattttgtagctaaagtttcagactttggtttggcaaagctaatgaacagagaacagagccttgttattacaacactgagaggaacaagagggtacctggctccggaatggctcactaactatgccataacagaaaaaagtgatgtgtacagttatggaatggtattgcttgagatcattagtgggagaaagaatcatgattcagaggatgatagttcagagaaatcccatttcccttcttatgcatttaagatgtttgaggaagaaaaacttgaagaaatcattgattcaaggctagaaatagatgaaaacgatcaaagagtgaataatgttattaaaacagcattgtggtgtattcaagatgagatgcatataaggccaactatgacaaaagtggttcaaatgcttgaaggtctttctgaggtgcctccaccaccattttccaaaccccaaagactagttcattatgactgattttgagttttatagagatgtacataacaacacttgtaatctcttaaggaatgagattttccaaacttgctcaatttttgaatttcattttatatttattctttgcctaacattaggatttctctcctcacagacgaattttgacatgtactgaatcgtcacttaaatttttcaagtcgttaaatatttttcccgaactattgagagtgttgaattcaaggatttccgtccaattcacgaacgccttacacaacgatcatttatgtaccaaattgtggctcccaatcttccatccacgtagcccgttagtaaaattgaaccattttaaacagaagtctttaaatacaataatatgaatagttcagaaataatttttaatagcttgaaaagttaaagaagaaccctaagtagccttattttctttttagaagtgcttgatttttgtttctgcttcacttgttagcttagagaaaccacataaaaaaaacgacagcaacctgaattatttcttatgaataaagttttgatttaacttttcatatggtatcttctgagaaagaggaacgtgataactatggcagtttgatagatatagatatggtcgttacaaagctacacaaaccacaaacaaagattatctgtagacacagaaaattgaaatagatcttgctgcaatataatccacaaatgcacctactactcacaattcttatcgttggatattttatttaatttttgaaccatctctttcaagattattattattattattgttaattgattcctgtcaaaaaagacaatgatctttaatacttggttgagattcatgacctgtcaagagataaaaaacagagttatgcttttttgatttggaatttaattctaaaatggaaactacacaagtctcaagtcatcatctctagctgttctaatgaatcaaaacttcaattgaaccaaacaacaaaacaagaagaataacttaaaacaggaagtactaataattttacatagtttatgatattattatactatagtcagcaagtctttaactattacaagccgaaaagttacatctcatatattatatatctataaatttatattatgttactatgagcttattaatattgtacaagtgatagtgtttttactatattatttgttgtaagcaaagagtttaagagcaagaccaggtgaatagtgagtacaaagatcatgttcatgcagttattgggggggctccatggaagtaagtggctggagatgaatgcccatgatcttgttcctttttttcttcttcttcttcttcatcttcatcttcagcatcccaaagaaaccgagcatatgaagccaaaacatagctgcaaaaataacaagacaacacaacacaaagaaagatagtacgtaggcagaccaaacgtacattgatatactctaaaactaaatattccaaataaatcaattaattagtcctactctttttgttttctccaaccaaagatagaagaagaaaaccttcttattaattcttaccaatcatctggagaagatttcacagcttggtcaaaataattctcagctctctcaacatctttgtggcttgtccaaattagatcagcataaagggatagaatctctgcatcaccaggattagccaatattgctctgccacagtactcttctgctttagcatagtctcctcgaacctgttttttcatatattatcaatccacagagcttaaaaattgaatctttaccacaaaaactgaatctttacctctttcaaaaacttggcatagtttccaagtaagagcccatttcctgggttggcttcaatcattttctggtaataaacatcagtgctattactcccacgattattattaccctcaaagaatcccgacccatcaccatctccgccgccagaacctctcccgtcaccggctccaccgccaattctgccaccgttgctgccaattccgtcacccattacaagcgtctgcaaaaccctctcttccttttccacagagcttctttcttcactactaactttatctcccaaaccagagcaggacaacaatctctggatcgtagaggatgatcctgagtcgatttgggggctacccttttgctcatcttcctgggattttttagctttgattttcg

SEQ ID NO: 378182 - DNA, 3801 bp, Cannabis indica
tttttttttttttgtagtgactgcatccacaaattgactgagtatcatccaagctttcctcatcatttccctcttaacaatcttcatggtttgaaggaagctccatggacgattggctttcagttggtattttcttttcttttctttttcttttaagtttttttttttttttttgttccattaatcttaattttattttttactcaaaggtttgtaaattgtttatacttattatttttattattgttgttgttgttgttgttgttgttgttgttgttgttgttgtgtagaaatggacttaaatatatgagtgtatgaaagttcataatctagtacatttttttatttatttttggattgtgtttatgaaagaagccttgcatttattcaacatagaaacatgaagaatattcttttattataattttgtttcattattcataaacatcatttcgtgtatataatatgtaatcttaacgtctcagaaaagtaaacatacaattttccattatatcattttcatgaaataagtctaacattcaaattcaacactactccaaataaattaataatgatatcctaaatgagcagttgcacctaaattttccaaacaaagagtaataatataaaaaaggtaattcttgtatagtactagtggtaactaacttgatcagccaagactggtcaagcacatatatataattgcttttcaattttatgaacagcaatttttctttttccttttttcttttaagaataagtagtacgtactgtacatatatatactcttaaaaaagaaagtgggtaaggcatctcaatattaacgaagtcacttttattactttctttattattccagaacttaccttttattttttgctccttattacatatatatatatatatatgagaaagagaatgtgaggcagagagtggccttgagactttagcaggggccatcttggttcccttggtctgctacagcagtttcctcacccgattgactagatgtaaatgcctgaacctaattctttcataaggatattttattcttataaatatatttggattagcctcacagtactaaaactagtatagtctctctctagtacatataagcacacatatatgtatatatatttccttggaggattaaaaaacaaaagaacaagaaggaaactgtacgtatgttttcctggaaaatatcaatgctgatccacagttgtagtacacgtagtctttacattgaaattgtccatatctataacatattaaaatgagaaatgttaaagggcaccagtggtgcctaacaccctcctatgtgttaatatcgctattggtccaactaagtatcgggtcccatataatttaatataatagtttttaaggagtatcgctaactaatcgcaacgtgacatgtcgagaaggtgcatacactactaatgcattatagcaatgctatattaaaatatgcttaacattttgattcattaattagtttacacatgcattgggttccccgtgggaattgataatttatgtaatggaagtttcacaccatgaagataagttattttagtgagcattctattttttattttacatttttaattattataatttatgattaaattatgtgataggtaaatgtctatttttatggtacgtagtgggtaacttgccatagtcttatactaacactaataacagtaaaaaatattacctactcagccattcataccaaaaaaagtatagcattattatttatttaatagaaatttataacgtctacgttaatgatagctagataaatagctacttaataagtaaaatactattagtgtccacgaaagtgaaactttggacattaaaattaaaatatttggtttagcatgtgatataaattgaatcagtgtttcataatctttcacatctatctatatatctatataattcttttataacgcaagattagatggcactttgctattagagatggaaggagaaaaagatcctccaccaataaatagataaaatcttattttaaaatgttcgaggaactaattaacaaccataataataaacatatagaatgtcacgacttgagccctaggccatgacatatgtgtattatctataattttagtaatcaaaggttacactttgacctttgtagtaaaataatgcttaaaaatgatcttttaatttatattataaaatacttattaaaaataatgaaataactccggtatttataaagaaaatattaataactaaatcaagatctttcaaaagtttaataatatacttttataatgaatgtatttagcttataattatattttatatattatgtaatatattacccattaattattaggttttagaatataacttttggtccaataaaattcatatattttgtgtatgagaatagtggcttagtggctcaaaatgctgagataaaatggaaatacatagatgaaattttcaggtgagatagatggtgcaatattggtgggcgttgactgtgtgcatcaacaagtgggtcccaatcgtggtagtatcttgctctagaggggaattgagttatggtagttattgcctaaaggtaagccttgtctacgttgaatttgtactgaactgaattattccacttggattgtatgcttgtaattggaacttggcccatttaactttggaaagaaaggtcatcaaatcacaaagttgaaccaattataatttattgttccttatgacatggagaaaaagaagagttgggcttcgtccaatttattggattccatattttttcatctttcccaacttatgcactaaatctgataattgacacaaaattagattaagatatatttttaagttaattaatttttgcacttaaaatcataaaaataaataatttaattctaactattcacccaattacctttaataatatgtaatttttacacactaatccccgagcctttagatggaattgaagatatcatagaaatatctgaactacgaaaggcggcatatctacaaagggttgcaaaacaatacaattccaatgccctatactttggtgtgacaatttaggtgctggctctcttgcttcgaatccagtgtatcgtgcccgctctaaacatatcgaaatcaatctacattttttctgatacaaggtcttggaaaacaagttagatgttcgatatgtggacacaaattttcaaatagcaaatgttcttactaagcctctgagagtcaaccacttcacctacttaagggacaagttaacacttaattgtcttagtgtaacttgagggggaatattaaggataaggtagttatttctatttttagttaattcttatatctaactaattgtcaactgtgttctacttgtaacaaactcatcccttactttgatcaatatataagtggctatatatgcttatcttttttgagtgaacttttcatcattttcatttctctctctttcactctctattattcgtatagacctctttattagaatgaatttgaattggttatttttcatatgaatcatctaatagcgaatttatatttttccatatgtacaaatgtaatattctcagactttgttaatttgattagattaacttaggtggattagattggatgtagtattttataaacactatccctaactaaacgtgattgatgagaaaagaatgcaacaggaaataagatagaggagatttgtttcttttgattaatttagtaatgtatttgtttagaaatttttcatttttacaa

SEQ ID NO: 378183 - DNA, 787 bp, Cannabis indica
gtgatataaagttaaaatataataaatgtgctccaatcgttttctaaaagatgatgcatattttacagaaaatattgtatcctttcacactaaatcaagaaagatgaaaaagattttcaactgtagaaaaattattaatggtcttgctctaagattgaatgttccatttttataggcatcctatgctaaaaaagaaaaattaaataaacatcaatattattaccaaactatgaaagacttgatattaaaagtgtcagcataataaactttctttcataactaattagggcgctcaacaaattatacatcataagcaaaattaaccaggaactatacttaagtagatgacagattaactaactattatgttgcttaatttcaattgcataagtgggtaatcttgaacaatactctaccttaagccaagtcatgtaaataattaagtagatgtgtacatgtataacataataattttaatgattaacaaaaatacaattccatacttttccccatatttgtctacatacatatttgtcaagtcattgaaagaggagcacgtgtaatttttattaggactttgtccccaaagtaattatgcatttcataaaaagaaatacagtgattgtcaaacagctattagattgtcttcattactcccatagaggcgaggtggggcagtcgcccaccctgaaaaaaaaatcgggaaaaaaatatatatgcattttagttagttacaacatatatttataaataaaatgttaaataaattaacaattaacccaagatc

SEQ ID NO: 378184 - DNA, 2825 bp, Cannabis indica
tctctctctttctcctcatattctttccaattatacagcacaaaaaccattaagaaaataaaataaaaaatatataaaaaaaaaactcagcctcccaaccaaatgctggctccataacaatcttgacatgtctccctcccaactctactgtcctgagccttgagaatcatccttagcaggaggttgctgatgttgatgttgatgctgatgctgctgttgctgctgatgctgctgctgttgctgttgctggtgctgctggtgcactctagcctgacccatctgttgatacatctgggacaaagcttgaggattcaaaaccccaatatgaccatcctgagaaagcccaagttccaacccaggtagctgttggttattcccacccaaaattgaagtgaaactcataggacccatgttagtgactggtaagtcaaacccagaaaagccaattttttgcagataatttgagctttcacttcccaaatttgtagttgatggaccagaacaagatgactgaaatccaaacccacttacatttgggggccatatccccgtggccacacccacatggggtctccccaaatttccaccaaccattgcccaactggtcctactactccctcctccaactcctcctgacccaataagacctgacccccctaactcatcaatcttttggtgtaacccagctgaaagagaggcaccctgttgtgaaacagagccaccagcggctgccaaagctgaagcaggtatagtcccggacccagtggctgctataatcgatggctcagcctgttgtaaaagccactgaatagtctcaccatcagatttatgacccaattctctggtcaactgaaaaatccttgctgcacataaagctggcatccttatccttcttcctcttccttcaacttttgtgtgtctatctttgtttgaactcctctttggtgctaactgttttttgctctcatctttctctgcaatcacaatctgaaaatctttgatttcagctggtttattctcacccatattggtattattgggttgttgttgttgttgttgttgtgatgattcttgttgttgtgggaggctcaagaagttggggacctcctgtggttgctttgagcccttgggatccatgaacagggcaacaaaatagaaatccctaaaataaaaattgaatttttttgttttaaaaaaatgatttagggaaaaaaataaaaggggtcctctttgattgaagaaggtgaccctgaaaagtcctaaactttcatgagatttcactgttttcggcaaggaatgaagtgaaagacaaaaaaaccataattaaatattcaaatatattaaaatcccaatgtacccatgtcaaaaatcaaataaaaatcaagtctttgtttttgatgttcttttactctctttctctctctttccctaattcctatcttttgtttgtctttttattttaactatatgtaaaatggggttttgactagccttgtctgaaagcaactttaactgccaaattttcacctcaataaacacacacaaaagctcattccattcccatatggattcattccaccatcattatacctctccctatactactatactaatataagtaaataaataaatctataaggctatatatatactcatatttattgatgccatttcttttaaggaactcaaagatgggctgaagtagatgcttttatattttgacacctggctggttatgattggctgctgggagttgcttgtttcctactctaggcaaaagagccatgatccttgaaaactcagatgtgtgtttttatgatcattatcatgaacatcatcatcatatttatattattttaatcagagacaataaactaaacaaaattaaattaagggaatcagaaacaagggtgtgtttgtataattgtattatagacccagaatggatgttgtttgtgattttgcacataaagaggtgtgaggtatcatatatttgtgtaaatattatatatatatgtttgtatatataatgagtagtgggaccttaataatggaccttattatactttgttgaagtttttatatgctactttgactcaaaatatacttatatatatctatattattattactttgcatgatattagattttgttcaaggttataaacactgcatgtggcttctccttcccatatcccaaataggaataaataaattataaaaaaaatctttgaaaattatatgtttaattatattttgtttagttaatagagtttccaatgccataagttaaggcttaattttgttaatgatagttttagggagagagaattgtcaaagttaataataataataataataataatttatattatgtcccttaaatgtctccaatgacaaagatgggtacgttacccattatcaaaccgtgtttatgaaagtgatattaattttctggtcttataattaatgtcaataatactatatataatttcatttaattaatatgcaaaaattatacttaataagcctagtttactgacgtagttaggtaataagttgatacatgtacatgtgtgtacccaattttatttgtatgtgtcaatggaattaagctttggcttgcagagcacaaaggaaaatgagaatggtgaaggtcaactatttgttgtgaggaggagacatttctaatgtcaacttgatttgtcataaccttgtcccgcacatagtgacagtcagtagtcccgtatccgtaacgggaaatataccgagtaagctgtgcaatcccacatcgcctgaggaaggtcaaatgggatgattctgag

SEQ ID NO: 378185 - DNA, 6459 bp, Cannabis indica
tatatatacatatatatatatatatatatttataattaaatgaagaccacatacacaatcttacacctaaagttatccttgccttgtcctgtgaaagaaagaagcaataaaataacaaaaggaaaaaaatatatttgcatacaaaagtaaggagtaataatcaattagcagcaagtacttataaaattgaaagtcagatacaatttttgttttacaaagcacccaaaaaagaaatgaaggagcatactttcaacagctgaatcaacaacggttgcagctgaactttcactttcttcagtaggggattgttgagatttctcttgaggaatattaattgaactatcagtggtaacaattgacctagaaccatcagcattcaatagtgaatctacaaagcttgcacgtcgatcttcctcggtgtcttcaacgttgactgatgaatctcctgcaagagttccaatgttataaaaatcttttatctccaccaaaataataactactttctaagaaaacatatatttgtaaaccaaaagaaatactgaaattaatatttaatataagaactcacactgatattcaataaagctaccgataaagaaaatataagcgagtatggatttccatttccatgaattcaacatgctcagggcaattaaatcagattgtcaagagagttaccttctttccactggataattaatgaagcataaggctctgttaacacaaggtgtattgggagatctggaaacagccgataaagagcaaaagttgccactgcgttttgtgcattctgacaccaaaataattcgtatgagtaatctacgcacttaagtgacatgatgtaaatggaatataagtttgttttaagagagtaaataataaatggcatcgtatgtgtttctgtatgctatgctaaagcatccataagaaagatatcaggaatagggataagtcattacctcaacagagtcaaaagtgtcaccctcaccgggaagctgaagggtgacaagtcccccagcttttctactcttacccctcccgctggctttacgcaaaacactcacagtatacgagaaactatttccttttccatgcactttattgaagttaggggcttcccaccctgatctttgacataactgatgaagaaaggccttaggaatcttttgaggatctccctgtaattttagactacgtcactatgatgtgaaaaggatagcaattaagcatacataagatagtacaatcgcaagcaaatataagcccttgcataataataatcataaaaaatgtgtaaaattaatggattaacatcagaaaatggtgtgtaattaatagtcttgacttaacaatgttattttattagcatcatccttttatagtacacttaatagaaagaaaacatgtagagttcacataaatacaccactaaaaagaaaaaaagatattcaaacaagtaatcgcagattcgcagcgccatacactacctttttccaaataccagctaatttctccaaatttttgtcactaagcatttctctcattttttctttctgctgcagtttttgaacttcaagagacagactttcattttggggaccatcttctgaaaagaaatcaccgagctctacatctggggactcttcttctgcagagtctttatccttaataggttcatctgatgtagtagctttcacagaaacctcttcggaaccacacaactccatgacccttccatcaacaattgattcgtcaacatgcgaaacaaatgcagaagcacattctacatcaccaggagtttctccttcagactggttgtggggaacagaactcacatttgttgcctcagaagctgcataagaagcttgttcgttctcaaactctgaatccaaaatgtcaacagataaacctgcatagaaatttcaataagcactgatggaagatacaaaatgacaaaaagtatgacatgaagcatgaaagaaatttaattttacctaatgcagataactcttgcttcagtttgcggatgatatttcctgcctgttccttactttcttgtcacctttttctttggctctcatagcttccaaccgtgcatcacgatattctttagcaatcacatcataggaccttggttcagagatctatttaaataaattaaaatagagtagtgacagagtcatctcaataacatcaactaagaatttggagaaaaacattaggcaaaattcatcaactacgaagtgaatgagtcctctataaaagatacttaaaagaatgtttgtgtttcttcggatctcaaacacaaaagatcagaactttgtagactcatttgatcttaatataaaatggaagtaccttctcagtaccaagtaaatcatcttcccatgttttagagtcatcctggaaataacacatacatgtcatttttagttgtttttgtttatttaaatgatcattgatttatttgctaatgcattctgttaatacctcttcttgttgttccacgtagcgtttgatccaatctgcctgagaaggtcgacatgagtccaaagtctcatccttactgcgtccctttgctttaacagaaatgcccacttcatcctcaaatatatttgatgatgcttccacagaaggagcccaattatcctgagcagccaataagacgcgaacagaaccacctgcaaaatcgcttaaggattgaacattatagtgcaaacttccaaaatcctcataaaccaaattcctctaaaccctttgtccaacttaatcaagctactaatacaacaagacattcaaaacagctccaccataatttacctccatcaatgtgctgaaatgtcccgcttgaaaacttcaatggaagctcattactaggcaaattcaagcacaaccaatcaagagaagcctcaaacgtagcaccctcctactcaataatagaaaatagaccattcaattcaaaaattcaatattaccaagtttaattcaagcaaaagaataacaaatttgataatcaatagaaatatagttgaactactatcaatgaatgcgaattgcaatatctaaaactcaataaaaaatttgataatcaatggaaaatagaccattcaatattacaaagttaattcaagcaaagcgaacacaagattttctttttctttcatacaatttcccgggaaaacaatcaaacaactatcaatgaatacgaattgcaatatctaacaaaaatgaacacttgaatatgatgtttcacattccctcagttaccaaacagaaaaatggaatcaaatactaatacgaacaagcacagaatcaaagtaaaaaagtgtaaccttgagagcagagagagcaagctcaatttgatcattagtgaagccttcgcaagaaagcttctcgtaaatggttttaagcttcttagccttctgagtcttggagagggaatcgtccaccggagccgcagcagactgcgccgtccgacccgaattcagaagaagtctccggagccgattctcattctcagccgaaatgtgaagcttgggaccgccggacgccgtcgccgacgacgacgacgattgcgttttggcggtgcttttctgcttctgctgttgtttctttttgggagccattgttgttctgcttattctctctctttcttctgttttacacttccaacgatggtggaaaaaacgacacgtcgttttccgttattacaaagctacatgtcgttttcacggttgtacttgttatcgtggtttgttttatatgtcgtttcttacgctgactacatgtcgttttttatgaatatgaacgaaaacgacatttcttcatacaagcttaaacaataacttttgtactttgtatttatcaaaccgtttatactgtacaaagtcctctcactgcattacactgcataaaaaatatagtttaaaatttgttgtgattcaattaatttgtatttttgccaaaccgcacaatgtactacggtttacgattttgaataattacgattcaaactgcaccgcactatatattacaaagttattaatttttacaatataatttttatttttatttttttatattatgatgctaaaattttagtaaatattttttttatagttaaaactttataggattgattttttaactttcattataatatttgataatgatgatagtataaattgctcaaatcgtaccgcaccaaattgtatttttgtagtgtaacttttgcggttttaagatctcgcagtacaattgcggtttgagaaattacaaaaaacgatataaggtttaatttgaaaaaaaaaagttacaacccgcaccgtaaacacgcctactaataattgagttgtagtatcgtactttgttttatatatcgtttttactttgactgcatgtcgttttatgttggtaaacgacatgtcttgttatataaacaattgatttgtagtttgttttacgttgtgggattcttttcctttctaaatgtcatttacctattttattattatgataatgtgtaaaaattagaattaaacattacaattatcattacttgtgatcacatttcaaaaaaaaaaaatcattacttgtgatcattattatgaaattatgtcaaataatatatttgatatacaagacattcatgccttaccaaatatttctccatttctccaaaaagacttatcaaaatcaattgataattattattaaggtataatatatatcaatgttaaatttaaggtaacaaagtatagtgcaaaacaaaatgtatatatacatgatatgttatatgaagttgattgatgatcatatacataaatatatagatatagtagttagtatatgttagctaagttgtcaccctaataaagaactgtcttaagcttgaaacaacagtatatcattcctcccatctcacaataaccaaaccaaacacattaaagttttgaagtaaaagctaagactacaaaaaacatatccaaaaatttcccaactcccaaaccaataaaatcatctcatatctaatctatatgtagctataaatatatagagctcatttttaaaggcatcacctatgtttatactatacatatacctatacttataaatacatggaagaaaccctagctaatgataatactcatgattctcgtcaccactcctccaccgtggacacctctcgtccctttcgctctgtcaaagaagccgtcgcaatctttggagaacgtattcttgcgggtgaaatatactctttaactccttcaccaaatttctctaataacagctatcatttgccacaacaaaatgaataccaagaacaatacgtgaaaaatgaggtgattagtagaagtaatgtgcagtactctcctaattcaccattattatcatcatcagatgataataatagtaatgataataggaattcgatgataatggaggcagtgaagcgattagagagggagttggaggtaacaaaggccgagttgaaggtgttgagggagagagaacaggagactgaggtggcggtggcttcactcaatgccgagctccataagaacatgtcaaagatggcggcggttgaggcagcaaaagctgctgcggcggggacaagtgcggaggaagagagaataagaagagagttggtaaggagaatggaaaagaatcctactttggctcaaatattaagcttagggcatgatcatgatcaatatgggaaaagaaaaagaagtagtaccaataagaagaaaatcaagcctattgttcctcttgttggagatttattttcaaagaaaaaatattaatttatttttatacattgttcatagtttttcttactcattttttgtttttattatttgttgtgtatctttcatattaatttgttttgtgttctattccatatttcaaacactttcaagtgatgtaaaatcttgtttgtgaatgtatatgtgtaattctttattcacggtgagcttaccttcttttctttgttcacttttgagttttgagtgtaactttgttgaattaatatgtaaagtttctatatttatttattgatgttaatcttaccttggtttctatacatattgatggaagttttagtcaaaaaaaataaagagcaatataatgtgtctcgatcatttttttttattttatttattctgtaatactacatgactcgaaaatattacacactaattagtttcggcatttctaacataaaagtctcatagttagaaaatatgtaaataattattaaacatactaatacgtgactcgaatgtgttacttattacagcacacaagtctatattcatcgagatacacaatattatgtttacaaaaaaaaaaaaaaaagagatacacaattattttttttaaacaagtattgctcattttaaaattaactttaaaaaaattgacccttactataaaaaaataatattttaaaaa

SEQ ID NO: 378186 - DNA, 1770 bp, Cannabis indica
ccccaaatatttctcctctaaaatccaaagctggtcgacaaattcacaaaccctcccatctcaaagactatgtctgccacacatcctctactaaatttcccatagaggaattcatttcatatgccaaactcagcccccaatttcgggctgctgtgttagccgcttactctcatattgagccacaatcctacagtgaagcttctcaattcaaacattggcttcaagcaatggatgatgaaactcaagctcttgagaaaataacacttggattgtcaccaaactccccctggccataaagccattggctgcaaatgagtatataaagttaaatataatgaacaaggggaggttgagaggtttaaagctcgccttgttgccaagggctttactcaaaaacctggcattgattacctacaaacatacgctccagttgctaagttcaacacactaaaaatcttacttgccttagcagccatgaataattggaacattcatcaactcgacataaacaatgcgttccttcatggtgacctccatgaagaagtatatatgcaattaccaccaggttatattgccccacccaattccgtatgtaaactcaataaaagcatatacgggctcaaacaagcatcgaggcaatggtatgataaactcagcacgactctcatagctgaaggattcagtcgttccctatctgacaactctctttttaccaaaagaaccacaaccttttttattgttgtcttaatctatgttgacgatatcattgtagccagcaacaatgacatggctatcacacacttcaaacagtctctagataaaagttcaagctcaaagacataggttcccttcgtttctttcttggtctagagataggaagaacaaaacatggtatatccatctctcagcgaccctttactttgcaactcttaacagacacgggttaccttggagcaaaactagcatctactccaatggaacccaacctcaagttaagcaaagacaaaggtaaaatattgactgatcctacagcctataaaagtctcataggcaagctcatatatctcactatctctagaccggatatcacttacgccgtgaaccatttgagtcaatttctcacttgcccccgagtaccacatctccaagctactcatcgaatcttacagtacttaaaaagaactcctggacaaggcttatttttccctgccaacgcttctccaaacatatctgcatacgctgaaacaagtctgtcttcagcaaatgtacagctctctttttttgccgatgcagattggggatcttgtcaagacactagacgctctatttctggctattgtgtcttccttggccaagctcttgtctcatggaaataaaaaatacaacaagtcgtctctcgctcctcagccgaagccaaatacagagccatggccaatgctacttctgaagtcacctggattcttgcccttctcaaagattttggcatttccctcaacaaaccagcgactctcttttgcgacaacactgcagcaattcatatcagtgaaaatcccgtctatcacgagcgcaccaaacatattgagatcgattgccatttcatccgagaaaaagttaatcaaggagtcctcaaactacttcatgttcagtctgaacacaatctggccgatatcttcaccaaggctctgcaaagttaacaccagtaatagtaacgaacccagataaagataaggtatttaagtatataaactctgaaacattaagtatttatgc

SEQ ID NO: 378187 - DNA, 2917 bp, Cannabis indica
tttttttttttgaaaggaatttgcttaaatttataggcgaaaaaatacttatattgttctaagcactggacttttggggcattcattttttatctgttttagtatttactttaatcttggtttaaaatgtgaattataccatgtgttcctccaaatgacttttgcagctcggatttttattcaattgtataatactttatgccacaaaccagtttagtttgacaaattttgtggtgcaaatacactatgtgaatatggataatggatgatagatcaatgtttcttgtcaaacatctacatgttgtgtacaataatgggctcgttttgtttttatatacaggttggactttggatttttggagggatgttgaacgtggatgctgtgactgctgctattgttggattatctatccttcttgtgagtggagttgtgacatggaaggagtgcttaggtgaatcggttgcctgggataccctaacttggtttgctgcactaattgcaatggctggttatcttaacaaatatggtcttatcgcctggtttagccaaactgttgtcaaggtttgtacttactttcccttactaattttcttcgtggggactttttttgacaatgatgtcatcaatgccgaattatcatcgcttgacatggcttcatcatacgatttcatatgtgatacgttattgcagagcatgctatttatttattttgtctttttctaacatactaatatcggcacttctgatctggcaattagaagttgtccattggcttttctttttcttcctgtgaacttaaattattaaatagatagatagagttacatgaatattgtcttggaaattacaattacgaggagcatgatttttgggtgtttcagtaaaaatatatttgattgaattttgggtcaatagttgtcaagctcatttgcaatgtataagataaacagtgtttttcgtttaagctaaagtctagagtagaaagactatagggcattgatgaatgagcacatattattatgtatttgctaataacttccaatagtaaccattctattattgccgtttcacagtttgttggcggactgggtctttcgtggcaattatcctttggaattctagtcctcctatatttctactctcattacttctttgcaagtggagctgctcacatcggtgcaatgttcacggcattcttatcggtggctagcgctctggggactcctccctactttggggcaatggtattggcattcctatcaaacctcatgggtggtctgacccattatggcatcggatcagcgcctgtgttctatggtgctaactatgttccactaggtaagtggtggggatatggattcctaatatctgttgttaatatcattatttggttgggaattggaggagtttggtggaagtttattggcttgtggtaggggatttcataattcgacgaccctccagaacagatagcaccattttaagtcctgacttttctgattttcaggatgctagttttcctttctattctttgcttagatataaagtattatttatttattttttctcttttgggtatacaaaatgttgttattcaaggaaatggagagatggtagagatcttatttgaagttttgactaggctttgcttaacagctgccagcaattttatggcatataataaataaagtgttatcatattctcattcttctgcatccatttttccccttttattttgatgtataaactaacaataaagggattcaattgtacacgtgatattgaaaataattattaaaataacgatgccattataattggctaacatgccaagtaggaatgttcattgaatgaatttggatcaactattcaatctaattatttattgggaatttgattttatcattcgatccaatttaattagatagagtaatctgatttgatcctatgaatgtattacttggatcggttccaaccattagatgcattaaccggtcttctattggattggatttgatccatccaatatattttagataccatttaagttgatttcattaaaaagaaaaaaatataataaaaaaaaaacataataacatatataataaatattagtttagctcaacctaattcttatgatgctataataaaattgccaaaaaaataaaatttattcaataagcattgacaatttaattagcatttaaggaagatgagagttaatattttaaatctattttttttctttaatcttatgtgttaaatatatattaaatcaattaacatattttttaaataaaatatactaaatatataaaattataaatgtatgtcccctacgtacgattgttatgaaggagctttcttcttggaagaatcatagagaattggctataattgctctataatgcttaaactcctaaactctctctcacattcgtctctatggataacactggagtatgtgatctgtttaaggattctattcgagtatccaccaacaacattaccttgaccctcaaccctagagacgttgatgaaccacaggaaccaaacaacattttactgggaaaagttttgaccaagcatataaactagacactgactattgggccatttggaaggatttatgctttgcattgaagtagctagaaaatatgggaccaccgcatgtaatggatgcgtgtctccaaaatgtgtaaccttgaaaagtaaatttctagactaaccatttggcaaaaaggtgtgtgaggtgcgcacactaccatgtcctggcaaggagacaaggtctgatcctgtgtaagaaaaaattataatcgtcgctaggaaatccaggtttatgtccaaggtagacgtccgtgatccttttagtgttggaatttattttaccaagatcttagatctactcacaagta

SEQ ID NO: 378188 - DNA, 7695 bp, Cannabis indica
aaaatatatctatttttttgagtgaatttcttaatatagtctcactttcaatttaagtctagcacatattttacattaacctaaagggtataatggaaacatcatctataaaggtgggtacatcttaaagaatatgaaaatgaaggtaaaaattaaaataaataaaataaaataggtatacaatgtaatttcttcaattattgtgccatgtcaagcataaatgggctagcccgttttataatgggctgatccattttattatatgggtcatttatggcttatgaagaaatatatatattttataatttccaattcaatttttagttgtaaaagataaataaattgtttcaaatcaattattaaaataataataattacatatttaataactaaaatgatgtgaacattattgtagtgtaataacttaactctagcaagatcaaacatacaaaaatacagaaaaacacataacaaatcaagaaattaagtaaccaaaccaatgaatcaaaactgtaaaaggatgaattcaccaaaaaatattcgactggataataaacgttgaaggagctttattactgatcttttattacaataattagagagaatacaaaaaattgaacttagatgcaaacttataagaattacaaccgaaatctcacatgaaggagaccatttctagaatggacactccctttaacatccctccaaacacaacatgtacactctatttttcttgtttagatcctccaattctctctcagtaaaatactcatcaaaactaaaaccttaactaacatgtattggtgataagctatttatagatgatagctttagtacagttgcgtaggttgtgttagttaagtttgttggtgaatgtggcagcagctaataggtcctatagtgtcttaattataacaatgtccatcttaattgagacactagaggaattgatgatcaaacttcttcaatgttgagcaaggttaggcagtgcctaaacttgtccaaggtaacacaattagtgagcatgtctgcagggttgtgatcagtgtttatcttccttacctgaacctggttgctagtgattgtgtctctgataaaatgcagccttatatctatgtgtttagacctctcataatgcataggatttttcatgagatgaagggcactttagttgtcacaatgcacaattatgtctttagagtttagtccaagttcactagtgatcccttcaaccatagagcttctttaatggtttgagtagcatccatatatttagcttctgttgaagataaagctacaaccttctgcagtgttgatttccaactgacacaaccacctaacactgtgaacacaaaaccagtgagtgaccttcttgtgtctatgcaacctgcatagtcagagtctacacatccaataacaacttctttggtgaatgactcttttccaaacattattcccatgtctagagtgcccttgatgtaccttaggatccatttgaggtcagatcaatgttgttgtccaaaatctgtcaaaaatctgctacccatgctcattgcacacccaatgtcaggtttggtgtagaccatggcatacatcaagctgccaacaacataaacatatggtatgcagtccatatcaaacctttctttctctgttttaggagattgatccttagaaagtctgaaatggtgagctaggggtgttgaaactggtttggcatctccattccaaacttggttaacaccttctttaggtatcttttctggaatagaaaaattgtgtgaggtttgtttcttttgatattaatgcctaagatcttcttgactaaacttagatctttcatttcgaattcaacattaagtttttcttttattttatctatcttagatctatttttaccaattagcaatcatctacatccaataacagatagatatgctaattaaagtaaacacaagggtcatacctgctttgacagaatccaacggtcttcatgaactcatcaaatcttaggtttcattgcctaggggcctgttttaaacaatagagaaatttgagtagtaggcatacttgattaggatttccattgtcaaatccttctggttgaagtcatgtagatcttctcatcaagttttctatgtaagatcatattttgatgtcttagccatcatgactcttatggatttttgtttaacaacatgggaaaatatttctgtgaaatcaatcccttccttttgtgtaaagcctttagcaacaagcctggctttgtatctgacgtctcctttgccagtttcatcttctttttgcctgaacaaccatttgcaccctacaagtttctgaccttctggtttgttataaccacaatccatgttttatttttcttcaaggatagcatctcatcatgaatggcttggttccatttcttgctatctttacatgtgattgcttcttgaaatatttcaagttcagagttatctaacttttctgctgctgcaagagcaaaagctgtgaagtcagcaaaaccaaatctgacaggggctttgtgaacccttttccctttatctctagtgagctaataaccatcagcatcagcatcagtatcagcttctacatctgtaggctcttcaacttgagcctgatcagtaccatgctcatcttgtggcttatctgtagtatttagatccacctcaaacccaactggtttgatactagagctttcttctagtttgattctgtctttgacttcatggtcatttcttcttctccaaagataacatctctgcttaacagacatttcttggaacctggttccaaacactaaggcttgtagccattcacaccctctagatagccaaggaataggcacttcaatgccctaggttgggctttgtcttgcttaatatgggcatatgcagtgcatccaaacaccctaaggtgttcataactcggtggatgccctatccatttttcttgtggggtcttgaattcaatagctgcagttggacatctgttgaaaagatagctagttgttttaacaacatctccctagaatggtttctcaagacctgcactgtggagcatgcctctgaccttctcagtaagtgtcctattcattctttcagctaatctattttgttgtggattcttgagccctttttgcaaaactcgatgaattgattagagcaaaactcaagaccattgcctgtcctgagtttctttaccctctttctagtttgattctcaacaagccttttctaggtgataaatgtattgaatgcatgatctttagatttaagaagaaatacccagtccttccttgagaaatcatttatgatgctaagaaagtaactggcaccaccaagtgttttaatccttgatggtccccataattctaagtgtatgtaattcaaaggctccttgttggtgtgcataccagtggtgaattttaccttgcaacacttaccatagacacagtcctcacagaacctcaactccccatccaattttccctttagcaaaccttgtctttccaattcttgtagccccctctcactcacatgtccaagtttgaggtgccacaatctggtcttgtctatatctataaatgttattgcaggtgctgcattccacataacagtctttccaattaaagaaataaatcattcttcaattctcatttcatcacagctgtggaatcctttgagatcacaagaattccaccttccaccttaatggtacagtcaatgatgtccaacatacctattgacaataaatttcttttcaaatcagggacatatttgacattcttaagtgtcctagatatgtcatcaaacatagtgatgataactgaaccaataccaagaacacgacatgccttgttgtttcccaatagaatagtactgcctgagatcttcttgagatcactgaacatttcagctttgggacacatgtggaatgaacaacttgagtccaagatccactcctcttcacatgctttgctagagactacaagtacatcagctgagatgtagtcttgacatgcaatatcaacttctccttatttcttgccttcttctttgacaatgtttgcttttagggccctacactcatctctgaaatgcccttccttttggcaatagtagcacttttttccttgatttgaatttggatttaatttgatgattgttctttgacttgctgtaatggttcttcctatcagattttcctttggtgaataggccttttccattgctatcaagttgtgtcatccgacttcttttaaatctcttttgagttgagtgcaaatttaacatctgccatggttagagattcgttgcgatataatattgtatcaataaaatgtataaatgatttaggcaatgaagagagtagagttgatcattgatcctcatcatctatcttgactccaatattattcaattcaagaataattttattgaatttatcaagatgttttctcaactctttacttttatccattctcaaagtataagctttttctttaagtataatttgttagctagagatatttttagataaatgttagctaacttaccacaaaggccaacaacagtctcttcttcaaatacttctcttagaacttcatccccaagactctgcaagatcgaactatgtgctttgatctgaatctccttctgtttcttctcatctccaatggctgcaatggcttttacatcaagagcttcatacagtccttgatgaaccaacatggctttcatttaagtctccaaagcccaaagtcattttcaccagtgaatttatccatctcgaattcagccattgacattcttgattgctctggattttgatcgagcagttcttgaactctttaggccaacctttgttttgataccatttgtagtgcaagaatttaactctagcaagatcaaacatacaaaaacacagaaaaacacagaacaaatcaaggaatcaaactaatgaaccaaaactgtaaaataatgaattcatcagaaaatatttgagtggataatgaacattaaaggagctttattattgatcttttattacaatcattagagagaatacagagaattgaacttgagatgcaaacttataagaattgcaatgaaaaactcacatgagggaggccatttctagaatggacacttcctttaacatccctccaaacacaacatgtacactctctttttcttgttcagattcattctctctcaataaaatactcatcaaaattaaaaccttaacttaactaacacaacctaagcaactatactaaagctatgcttcattaccgaattttcacataatattgcagaaaacatttgtactgaagttttttaaatatgcatagtagactaaaatattaaaaactttatttcggtattgtaagctaatcagaatttttcaaaaatttacaaatttaatattatgtataattataacaaattctgttattaaaaatgtggagattaactaaatagaatgttctaattagcattctttacaaaattatttgcttagaaaaaaaaatgcacaactctaattaaattaaaatgtcaaacactgtataattattaattgggttatttattaaatcaaaaatgtgttaggagcacatagcatatctcatgtatgcctttcacataaagaaatgtaatacaaaaaagttgctacttactgttgactcattatcaacattcgtattgtataataagatgccttaagaattattattttttttaagagaaagaattagtattatttgatccggggattttgtgacatgaccagtgtcagctcctccataattaaaaataataatattgaatcacaattgggttggcaatgacatcatctaatataatacccaaacttcttttcaagtgatattatattccatacaatagtcaataattgtgagaagaaaaggaactacgacgctgcgttttcaaatttttcttgtacgctcaaataaaaatgtcacatctccaaacagctgttttcatatttctcaagtcaaaactattttgatttatttctctcttaaaacatttttgagtaactaaaaaacactaagatcttgcatattttcgctatcactagattaaaaattttaacaatagatatactcattcgtaacaaaaagttataccataacatataattatgaaacttacaaattaaaagactaactatcacatatatataatttacatacaaataaactgaaatacatataacccaaaaaggaaccaaccctcttctaaaatcttccaaaataaaaacttaaaagcacacacacagagacactcatatatatatatataatataatttagttttgtggtatatatatgtaattaaggtcatggagttcgggactttttcttgttgttgccattgtggtgaagtggatcaggaccagaaggaatcttcctcaaagcctccaaatcattcaaactttttcctccatttccatagctaaccactttgatcttctcccttaagccaataagaacctgtaaaaataaatttatatatacacaacattcatcactactgttttattaaactaaaacaaacatatatacattaactattgctaaccacctttctattgtggattcttcgggcagctgaaaagtcatcagtagttgatgcttgcttcacaatcataaaactaagaaccacaaacaaggcaatgaagatgaaaatggagtacttgttatgagaactagccattatataacaaagaactaactactatattttatgtgtagaaccggttgaggaattaatatggagagacacacaaggcgcaatgaaggtcaatttatagagaagagattatagtgaattaattggggggagtgaattattgatgatcataataattcctccaaaagaaaatgattgtttatagcagccatatttttagatgaaatgattaagaagtagacttatatgtacgtagctatatttacctacatatatagctagctatatctggcagcgccgtcttcatgtatagaatatgatgtcatttttatggtaccatattttaaaggccataataataatattgttattgttattatgtccttatattttaaggttgtcaaattatagttgcggctttgtactataaccaaattaaataatgtctatacgaataatattaatatgtacatatgcctatgatatttaataaggtgatcttaatgttttgtaattagaaatataaagacatggttattaatgataattacatgggatattatattgagaatgagaagattagaagaagaggaagatttgggatataattgtaaatgatgatattatgggaagatgtaataaatagtactagtgatctgaggtgagagtagaagtgggagtagtgattgatgtgaggtatttacataagtattttggttttattgggtttggagagagagagaaagtaataagatgctattgcagtagtggtaggtagtaattataattaaagacttttattagtgacgtcgtctgtgatgatgccactgtcactgtgcaatctcactagatttggcatctatattaaaaaccacttttttaagacctccatctcatcatcatattgctctcataaaatcaaaataaaaaatcatcatgtttttttttaaaaaaa

SEQ ID NO: 378189 - DNA, 4033 bp, Cannabis indica
aatgaaaaaaaaaaatgataaagtgtaaatttccctttctttactccagttgcattgcaggctttctgaggcccaaaattaaactaagcccaacccacaataccatattgctatttgctacttcactacttcttcttcgtcgtcgtcgtcgtggccaagaatcagtggttgggggcaaacgaaatcgtcacagttcctattcttctcttactccgagaaaaatccagagctgcccaaaggaaattagaggtcaataatggttataagcttgcaaatacccatgtctacctcactgccatcgtcttcttattcaccatctattaggcccagagctcttagcaatttcaggaccttatgtgctgttaatgccagggcaaaagctaaaatccccgttccccccatcaaccccaaggacccatttttgtcgaagcttgcttcagtcgctgcaacttcaccagagacgttgctgaaccgcccttccaactccgacacacccccttacttggatttgttcgactctccgacccttatggctacgcctgctcaagtactctttctttcactctacctcttaattatctgtatttaaattgtgtttattgggtttgtgttaaatttttcgggctttttttttcattgctgaattatgttacttcttagttcttatatggtttggttgtctatattgattgttgaatattctctggttagctccgagttgaaatatcttgtttaatttgagtatattcgttcttaagtttaaacactgagttggagttttgagctgattcaagagggttcctttacaaaagttatggaacagaagactcttttcaaacactgattaaatttttgattaattgattatatttttcaataaaatcatcacgtagtagtaaagacagtttttcttaggtgtgagtacattttaggcttttttaagtgtacactcgccccagcatttgaggatattaggaagaacaagttttaaattctcattcactaaataagttagtttttattatcatttacatttttaataatttgatggtttcactggattgaaataggtggaaaggtcagtttcatacaacgagcacaggcctaggaggccgcctccggacttaccttcattgttgctccatggaagaattgtttatattggcatgcctgtaagtgattgaagcctacttctctattttaaatattttctcctctaaaactatgctaattttctgaataactaatgaaaaatgacaataaggtgcccagaaagctttactatgttggtcctgaatcttggacaagatcatagctcttatcctcgtaacttattatgtgaaatattgattccttgttggattttattccgtcatctttataacattagaaattagagtttaattcttcagaagtatcggttatcttttgtttgcatccatgctgtgatatttataaatgtttcccttccttaaattagcttgatatccattgagtcttttgatagataatggaatatgcatcacctaatacttgtgaacaatgaccatttttaaagagttttgatggtcatgttttgcttgcatttggataataataatttccttttaagttgcttttgaggaatgatgtttaaatatatacaaatcttgatttgttgtcgttcagttagtaccagctgtgacagaacttgttgttgcggagttgatgtatcttcagtggatggatcccaaagagccgatatatatttatataaactctacaggaaccactcgtgatgatggtgaaactgtaagtgttgcatttttgcaattatgaaattatttcctgtccttatttgcttcttaagtaatgttcctttcctcacaagtctcactttttttatcacgtctgctctcaagtatttcattttttggcttttacttttgattaggttgggatggagacagagggatttgctatatatgatgcaatgaggcagttaaaaaatgaggtgtgtacattttccgaaatttcttatttgcactgttctggtgatgcgagtatggttatggcacaggttttatgggatgtggttgatataactgttttagttacctgatctgatcagcaattatgttgtgttgatgcttttccactggtgatggcaattagaatttagagacagttatcatattatagcactaactgtgatgttggatgaggcgatgatttgataatgcttttcatttttgtgaagaagcatagttgacgcagaattggattagttttatgcttgtcccattgccttctttcccccttcctatattgtactgcgaattacattgtcattttgcctttttttctttttacatggttagatacatacggttgctgttggagctgctataggtcaagcatgtctattactttctgcaggaagtaagggtaaacggtttatgatgcctcatgcaaaaggtataatgatggttaacccttctatttgttgcaactaaggacttctaaaattttaacatcattttaaattctggttcagccatgatccaacaacctcgagtcccatcatctggtttgatgcctgctagtgatgttctaattcgtgcaaaagaggttagttcttgtgcgtctccctctgaatttggaggttcattgtgttattcaacaattagaatgaacaaccattcatttgagagcattatgtcatatgtgtatgtaaatgtctactcctttcaaattctcatctggaactttcaattctcaactttttttgcagattgtaacaaatagagatactcttgtcaaacttctggctagacatactggaaatgtgagtatgattccttaacattagtcacaattataattgacaggcgatataaagacattttttatttatgtcaatcagtcagaagagactgtagctaaggttatgagaaggccattttacatggatgctacaagagctaaagaattcggagtgattgataaagtaagttcatatgcttaatatgttttcttgtatatagttccccacttatgactgacaaaatgaacccatatgcaggttctctggcgtggtcaagaaaagataatgtccgctgtggctcctccggaagattgggacaagggcgctggaattaaagctgttgatgggatttagtttcttatggggtagatatgacttactcaatgtaggtagattccctttttctccataatacctgcttaactacaatgcccgaaattgttgattcatacagtttctactaaatatttgattgtacttagggttcttgcctgttatcctagctagcttctaggacataagctatcaaatctaacatttaacttgatagtccactattttcgagtaaaatgaaaatctgaattgcttgaaagcttaatggaaatttctgttacaatgtaggaattcctatagaaggagaaagctacaaatggtatgtttttcagatggtgatctgacttttctttagtgccttgagaggcattcgacatggagccataccttttcttgaaagtagatagccaggcaaatcacgaggtttgaagattgaggctcagagtgtcctaaatactaaaaaagattatggatcattgtaatggttttgagtattgaaactcatgttcctcaaaatgtccatgattaaaattatttttgaagacttcgaagcttggagtttctctaatgtctctctggtgactactaaattactaatcttgttccccaattttctgttcttgtctcttggaaataaagtgatgacctccaatcataactcacatcacattattatttgatttataaaaagaattactatatgtcatccactttagtttaagattgatcaactggaattaggggtgtttataaaatagccgatctaaaatttaaaatatacacaagtgcagattagatgttgattgacatgtaaaataactgatctaatttaatttacacatatttataaaaaaattaaaaattatatatacaaataacattttaatgtaaaga

SEQ ID NO: 378190 - DNA, 4043 bp, Cannabis indica
gccactgcgttaccgttctaggctgcttattattatcggatatagaagaactctccccaccactcccagtcgtaagaagaggcaaagctgagctagactgcgatccagtactcatagacagagaaagagtctgatgagtagttgtactcgctgccgcagtagttgcaccggctccacctcctccaccgccgctgcagtcattcttattattggtagtagtctcagccggctgagtctgggcaggttggttcctaagccacgtcttgatcatagacagcccaatggagcttcctgcagctcctccaactccggcacttacaccgctaggcgcggcggctgcgactgcggcttcggatgagatgttcaaggaagcggcgcatgaggcttggaacatgtagtcggctgtagtagtgctagtgttgtatgtattgtgatgatcggcgaaagagtgtcggccgagaaagttttccagcttcggttgctcgtgttgttgttggttttggttattattacttcccattagcatagaaaagtccgatgagttggtcgagttcatattgttccaatctgcaaataaataaataaataaggatcttaacttaaatagggatatatgttcatcatgtatgtgtgtgtgtgtgtgtttgtttatagggaagaaaagggaatagggaccttgagagtgattattattgtttgatctgttgaaagcttcgagtatgccaaaaggagcatgagtggagtgatgatcggaagtgagatcgaagcattcgccggagacatcgtttccggagatttcatcagagttgaagccatcaaggcggtgatcgtgatgagagactgttgactgagagtgatcttgatgatgatgaggttcttgaggtgaaagagagaaacctaaccagttcatagaacccatattatatatgtagattgaaaagagagagaccttattaagagaagtgagaactaatatggtttcaatggagggtatgtagatgagcattagtccatgcatgaagttgacaatggagataaagacatagaatgcatattataggagtagtgatgtagaagaagaagaagaagaggaaaggtcaagaatttgaagttgaaaataataatagtctcttcccaaagtgaagtgaaaggaagatttatatctctctctctttcttttctctcttgctagatgtccctcactcgtgcacacaaatcataaatgagggcactcgtgttgaagggcattgatctttcaatcaaagtttggctttaaggttaatgacaatagggtgtgatgaggtggcaagggtgataatgtaaaagtcatatttttcaccccaaaggaaaacgaaagtgcccaaataagaaaagagagaaaaaaaaaaagtgtacatgtatataatctcttttcccattctattgattaaattatttattttgtttaagaagagattaagaattggtaaatctatctctctctctaaatccaaaccctgatgatataactggtatttgcctgacaaaaagaataataaaaaggtacacgagggagaagcaaaaaagaaatgatatttttttttgaatgaataataagccagtctcgtacacactaactaaaaaatgtatacgtagtatagattaaaagatttttatttaaatatctgtgtattgtattataacccaaatgggggaaaagccaataagttaagctttaacttatcttcatgccatgtatatatataagtatatataaacatatgtatgtgttcagtcatatattataaaaacgttatttattgatacgttctacttatattaagcctaacacacacatgtgtcataccctatgaaagcatgtgcttccgtaatcttgaaacaaaattagtagcacctcccttttggactattagtatattattaaattaattaacaaattaaattgtcacacccctaattcgacttaattaattacttgtcatttgattaattaattaataactacaatctttttatctctctcttccttgctgtgaaacacctgtagtgaagaattataggggtgcattgtattcatattatatatttctgacttagtgtgacaaagacctacactacaacagccactctccacacccatttattcatacccacttggacatcagtcatttcatgtcagataaaattattatcagatatatgagatccctctccttttcatttctctctcaattttctgtctagagagagaaagagagaaagagagagcagtagtatagtctctgcctactgcagcaacaaacaaacacccataactttctcacattccatccatcccatatatcgcattattattattattattattattatatttaactattatatccctttagtcctaatcatatcaaaactgctccccgctacaaacgggagtttttctctcctttttctatatatcattttaatgaaaataaagaaaagctgttatttctactctctctgctctatgcatataacaataattcatgcatgactgacacttttatttttatttttagtaatgaaagagaaatatatatcatgtatatttggcagtgagggggtggaatcctaaaaatattcttatataaataaaaagtgatgaaaaatcaaataaaaatgggaatatgaaaacaatattgtatattcatgggagatgggtttgcagcttgtacccctatacgaggacattaacccttgtcttccgggtctttgaggtcattattttcatgcttatatatgtaaatatatataattaatatatattatgtgtagttttgaaagggacagattggaagaaaatcttactcctaagcctaaggatcccatccacatatgatgcttttggtcaactccccccttataattagtttcttttcttcaactatttattcaatctttctattattattagtatatataaaaagtaatattcatttatgtaatatttgttgagaataaaacaaaaaacacaaaatagttaagggtttattctaatataattaacagacatgtttaaattctatatactatctaatataaaagaaaaaatattctaaatttgattatatatatgatcatctgtaaaacaatgaattttattcaagtcaataagccatggttaacacgtacatatataatatataggagtggacgaaggcgcaagctctaatctttgggaggggtggggggtaaatagcaaggagtttccataattttcaaagaatttaaggatattatcatattattgtaaaaaaaggaataattagttaatatttctttccaaaatgtactatatttaaagattttgtctaatttcgttcaattttattaacgtcacgattgttcctgtactaagttgtattgtgtgcctagaattttggtatatctatcaaatcgtgcttctataattttgatatgtattaaattaattatgtcacgtgatccttccatccacgtcaagttttcattaataaaattgtatgaaaatttttgaatttaaaaatcttaatgacttaacaaatttaaaaaatatgatttggtataagttaaaattctatggacaaaaattctaatttgtcataaacaaatatatagattttattttgttccaaatttgggagaggccggctacatgtatggcttcattcctccatataaggtgtaatttttattttaaataaaaagaaattatacacaattatattaatttttaaatatatattataataaaatatagagggatcaagatttgggattatcagtgacccggccctagtccattgcttattggatagattatatatatatatggactaagcaatctatataaatatatatctatactagcaaaaagctacgtgcaaaggcacgtatactaaattttatgctattttttttatattaatttaaagtgatacaattcaaaattaaaaaaatatatattattagttattaggtgagattattattatgtgtatctaaatattatagtttataat

SEQ ID NO: 378191 - DNA, 964 bp, Cannabis indica
aaaaaaaagaaaagagagagagaactcggacattgaccccgctctcgacccgcaccttgctcctaacccaggctcaagatccagatgttagctctagcactagacatgaatgtcaaactcggaccacggtcccgaccccagaatcagaccacgacctcagccccagacccctgacctcggtctcgaccctagaccccagcttcagtccctgccctagggctaatgatgagaaaataggtatgtgaaataaaatataaatgttgtcaccatataagcaacatatagaggcaagataagaaggggtcatagaaagcccccaaatattttaggtgttctctaggaaaaatataatcgatgttataatgacaagtgtgatttggccccagagtaggacgggacaagaaggattttcctattaagggtagtcttggataagttcaccagcaaggatatccaatcctccaggcgactttgccatatgagatcaagtaaccttcaactggtcctagatgttgctaacgtataacgcatactgaaaaagtacagtatgcatggattttccacttgcctaaaatagaaggtttaggaaatcataataaacatgaggatacaaacactcactactttgaaactcacatttccaatacaaaaataggcagctcgttcttgtacctgccatgtcgcagaaaataagtaaaatcaacaatcacctactaccctatttgggccagcccaataggctgaatattatgtaccttatttcttagttaattgttaaagggaaacttacaaaaatactagaatttaggttaatttttacaaaaatactgtcatacagaaatctttacaaaaatactgtgtttcataaaacactagtaaaacccaaaacagaacagctcaaaacaacagtaaaataccagtagaacagtgaaaacttaacacaatatactgcagtatgaaactt

SEQ ID NO: 378192 - DNA, 4431 bp, Cannabis indica
caatttgataaatacactccccatacttgtaaatagttttagtagttactaataatttaatagaagtcaccctcatttaccgtatttgaaaagaaaaaaaaaacaagatgaaaggactttgcatgactttaataaaaagtattagcaacccattgcaattgtagagtgagaggcccccatacaagaacatagaatgtcagagctaggttcacttttgtcatgtacatcatatttgtatggtgattgttatcaagtacaattaggttcttccctattttttaagttatgggagtcactcaagtctgcactaccagcttaaaagaggatcttactctgtatggtatagtaatattacctttacatgtgcgtggttcatggttttgtgctaatcttctaggctatgaatgagaacaaagaaactacagacgttttgatttatgtcacttacgttaagtaattaggtccaagtttagtaataaacaaccaaatctaatattttgtttatttcttgatacaaggtttctctctacagaatgtcctttgatccgtgcttatggagctatccgcttcgatgcaagaactaacatttcatctgagtgggagccttttggatccttttactttatgattcctcaggtagaaaagtcattttctttgatgtgtaggttctaagaaagtagtcatgtttcttgttagtatttataaattgctagattagatgccaaatgacaggttgagtttgatgagtttgaagataagtcaatgcttgcttcaactgttgcatgggatgatgctctttcatggccatgggaaaaggcaatcaatgaacttcaagctaggatttctcaggttaagatattttgctaagttgactttgctgttttgtacatcttgggtagttattccttttaccactaatttatgtggtttctgattaggcaggtctcttctatgattataaagttatcaaggcaagttcctaggacatttgtattcagcagcaaacacaccccaagcaaggaatattgggatcttgctgttaaccgagctttaaagaaaattagtagtgactcagcacttactaaggtcataataattaaaccatgtaccaagcttgcttttaattttgaatattattattatttgtgtttttccagcttaagtttcaatttctttacttaaagtattaattattgagtttgttttgggaactaaggttgttcttgccagaagcagcagagtggtgactactactgatgttgaccctgtaacattactagcttgcttacaggtgatttcatcttttattgcatagcatttatgttcgttatgaattaagatttatcgtatttgggataaacatctgcagggtgaaggtaaaaatgcttatcagttttgtcttcagccacctaatgcaccagcttttattggaaacacggtaagtgtcgttatagatgttttaagcctttcattttctcacctgcgtttacaactcatattatgttattacataatcttaatattacaaaatgcttctgtaggttttatattagtaaagtaacaatctatatactgactcttaagattgaataccaattctatattagttccaagttccaacctgaacattacttcactcatgctctccttcttagcttacttatgacaaaattatctatcttaatgatgctattccacatttggctttggttctcctttactttcattagtgatctttacttatagtttaccatccatgtttcaaataacattttcaaagggtaagaagaagatagaataaagatgtgtttcctatactgttttgtaattttgtttgtctcggcttaaatgatttccccaatagccagagcaactgtttcgcagaaaatgtctaggtgttgagagtgatgctctggctgcaacttgtgccagaggtggtacaatgactgaagatctgcagatagaacttgacttactttccaggttttctcatttttttaatgtttggtggttgttttattagttcactaatctgtaataatatttttctatttaagttatataatctgaaagcaatttggatgatgtacttttgtcaataattgcttcattatgcagtcccaaatatcaccttgagttttctatcgtgcgtgaaagcataagacaaaagttagaggtaagttacttggctacctttgtatctaaaaattatttatagcaagagatgtttttttttctgttgacttgaatatggaataaactacttcctatctttctttctttttctatttttctgttcatattaaggttatgataaaattgtctatttgttggtagagagagggatgctttttaatggagttgtaaagactctttaacccttttggattcttttttggcttgaattgaatgaaaagtccagcattgtgtaactttgaattttgaaagtttgcatgaaacttgaataataaaatttatgcaatagccatcttaaaatatattttctatgcttgtacacaatgccctgtttatgacaagaaattagtatctgcaaatacactttagcaacttctgtgattttaatgattttgtgcaaagcttgtttgttttctcttttcctaaaaatagcaaccttcagataggctgacttgaacatgacttttcatgtaagatctctagtaatgggcacttaagttggactatttacatttttcagaaattttatatttttgttttaattgtgttttgtaggatgtttgcaattctgtgatagttgaacctaagaaagcagtgagaaaactcccaagagttcaacatctatatgccaaactagttggcaagttaagaagagaagatgatgaagtaagaatcttaatctacattttcaaattatactattttcctcctcaatacatgcaacttggatttattgtataaatctatacttcattttactagaaaaaactcttcttctgcacaatattaattgttaactcataactggtgacatgaaaagttctgtttcttttcagtttcaaattttatcctctcttcacccaactccagctgtgtgtggatttccaacagaggatgcccgacttttaattgctgaaactggtattttcatagatcaccatatctctttattgtataaagtaataaaaccttattccctttttccatttcttcacttgagtttgtattttcatatctaagacacacaaatttttgaagagttgtgtccctacaacaatatcattatgcttgggcacaagcctataactttgttgtacgcacaaattttcactttgttttcactttcatttataataataaatctgtagcttagatgtgcttacatctccttgatgttcttgtaaaattcttattatgtctttttatgagagagggatgtgttccaaatttagatgacacttgtcacccaatcattggactaacttttatgactgcacatcttgttcagaagtatttgatagaggaatgtatgctggccctgttggttggattggaggaggagagagtgaatttgctgttggcattaggtcagctttggttgaaaaggtaaacttgagatgcaagtctttggagtattagtgtcactcatattttagagccaacaaaaaatgaatctccattgttgtgatgatcaaaaatcttcagcatttagttgtcattctgtatgattttccatacactttttgctaacttctctgaattttagggtgttggtgcattgatctatgctggaacaggtattgtggaaggtagtgatgcatcacaagagtggaaagagttagatctcaaagtttctcaggtaatcaaagtcgttacctgatttatatgtatcaattgttcatgttcaaagtacttgctcattgcaagtattgtattgtaagaatagtgctaaaagcccattttatgtgttttatttgtgctatagtacaccaagttgcttaaacttgaagtttctctaagagaaaaggttattagttttgaggactactggttatgaaaggttagtacttctttatattatttatatctatagctaatgcataataagcatcacttatcactttttattctgcaattagtgatccctgaaattcacatttaaacaatggtctaatgagcaggtagcatggaacttgtatttacaacaacattgattggtattattttctccagttataaaacataagtctgcctccactggaggctagctgaagtgattggtgtattagtgtatgtgtatgggagaggaaagaggctccattacattgtacaaagaaaaaagaaagttttctgttagaaaaaaatctgctgtaattttattcttaataattaatgcagcaaaaataaatttccttttatggttctgcagtgcttctgttggaaattattttatca

SEQ ID NO: 378193 - DNA, 1659 bp, Cannabis indica
taaatatcatttttgttgtagtgaaataaaggtgtcaaatttctctcttcctttcaaactccgatggcaaagcaatacttctccaaaaggcggaactaaaaagggccaaagagtgcccttagccccctctaaaaaaaaaccttataaaaatatgtacatatataaaaattaaacatatatatgtacacttgacaaaaaaaatcacccctcctaataaatttacctagttccgccactggccacttccctatactattaataattcaatacttaaaactatacaattcatatttaagacattaatttataggtttcaaacacatgcataatagagatgaaaatcaaagaatttcgagcaaaacattgtccaacaacagtcttgtgatggtgctaccaaggtctcatcacaacacgactaatgactatggatgctaaaaatcactaatacaaaaagcctttgtgttgcgtcggttttaaattgatatgcttgtctattgtgtcggtcctaaaaactgacgtatatactaccaacgcaagcaaacaagagggcatttacatcggttgggaaccaatatatataagtggttccctcggtttcaacaattgcaaaaaaaaatattttttattatgtttgcgtcggttttacaccaacacaaacaaaaatggaaaaagaaaattacaaatttggaaccaaatctcaccaccacgaaaatttagattccagatctcatcattagcacatttcatagctatacacgccaaaatatatatgtaaatacattagagattccaaatctatacaccaaatcgcgcggtcaaaacctaggatcgatggtgccctcttcctcttcattcccaacccaaaatcgacggtgccctgtaccaaggaaaaaaagtacattttcaccaaacgagctaaaaatatccaaacgagagagcaagagaaagagggaaagagacatattgttggggtggcgttgattggtatcgagacaagggagaaagagagagcttttcggtgacgagacgacggcatgatggtggcaagagtaggtgatctagagagagagaaagcgagaggctcaacttgtgcggctgaaaagtgaagaaataatgcactaatatctatatatagtaatgttttctttagtggccttttaaattaggtccttttttttttgtaaaattgacgcaaatgagcttgtgcctatttaaaattgacgtaaagtatcgtcaattacaaaccgacacaaaaattcatcgacaaccaattgcattgatttcgggttttgaccatatcgtattgaccaacgtgcaaatttcattttgggataatgaatgatgctcgatgattccatcaaaatataatttgccaaaaactatgcaaaacgatgtcgtgcgatggcctagcgatgccctcacatagaatttgaaggaaaagaaaaacgatgaggcataacttttcaatttggtgttttttttattaggcaccgagttgtttatttgagtttaacccaatatatatttatttaagacactaattttttttttaaacaatttaagagactaggtgtcaaatacatcatgcataatttaatatatatatatatatataaaataattttatggtagtgactatgtttttgtccttatactata

SEQ ID NO: 378194 - DNA, 2455 bp, Cannabis indica
ctgtgttgggttgctaggtgattgaccgaaggttgcataacacgaacgtttcaatctcaggaagtgtggaccgtatgttttttttattgaaaagaaaaaaacctttaataattttcttattattattatcttttacttaaataaagatctaaatgaaaaaacctttcatcaaccactttgcttagtccacacacctatataaagttccctatcttatcataattcttttttaatgaatatgaattacataaataagattaatatcacaattcgtagttaacttagttctagtattgttattatatgtgaagtattaattaactgtatttttatagctagaatctagacagaaatatcaatggagttattaacagtacacaatagcctggcacttcatcatttgcaatttgaaagcaataattcaaaatccaattctttttttaggttgatcactcattacatttcgttcttatatcatcattattgatgttatttgtttttacttatgtattcgtttatatataaatgtacaagaacttagagaagaatcattataattaaagcaaaaaatatatatagaataatcttagctggtttcgaatacaagctaagctagattagtcgctctctaatactgtaagactaattgagtaaataattaaaaataaaaaaactaaattattatgtatattatattagtctaagaacttcaaaatgttaaaacaaataatataaaacatatttatatatataagtacaagtaaaggtcaaattgtaataatttgaaagttaagccattggggaggtttggtctgctcaatatttgtcgtgactcttagtgtgaaggtcttcatgtgcatagccatgtgagcatgtgcccaatgtcctcctcctctccatgtctgaccccctatatatatagatagatatatattatatttaactatctgactttttttctcatttgataagatttttttttttttatgttttgatatttagagaaattataacttaattgttgaaaatattatctcacatggactaaaggtaaaaatattgagccatatataaaaacatggggttatttttgttcggatgtcaaacgtttttgcaccatctggatctcgtgcggcttggctaagaatcatgagattctatctcaaaaccaattggcaatgagtagagtagtccatattttaatatatggttcaatacttttacatttaattcatgtgggacaatgttctccaatattaattatttgtatttatattacagtctacatatatatataattatagttaggcattttatctggttttgaaaaattttaaataacgtacggaaaataaaatttaaaataataaattgtgttaagaattaaaaaaataaacagtatataactaaatatttgaatttgttttcaatatttaaaattattcaaattaaattttcgtaaaatagttgaaatatctataggtacaatgcaatgatgcatgtatgtagtcatgagaaaatttgagttataatttatataggtgctagctaaaagtaaagacaaaaatagtactgttatatatatgatcattattatttcttgtttactacttaagttatattttagtatcctgaatataaactttggggttttttaagatagaaaaataaccattaggttcatgtacatttgttctgctagtgcatgaattctcttgcttagtccaaaatatagcctttaatttggaagaagatcaaataaatagacaagagatcatgaagttatttcttgtgattgtgcatttagtactgatgtactttaggtttcacagctcattttggccattaaattttaactgtatggaaatcattttcccttaataatttatgacatatatattaatttccaaaatttgttcaactactatattataaatataaatcaattaataattaatatattttttaaaaattctttttattaaactgtttttgtaagccacaatgaactaatatatatagtcaataaaaatattgaagtgaatataccataacccatacaatcattgaatcattgagctagctagtggtggataaattttgcagcctattataataatatcaaataatattattgtattggataaggttttctttattatataaatatatatatatattatgataaaagaagatcataaaatcttaggaagaacctaaatataataaacctctaatttggtaccagatttgcatgtgaaaaggtcatcatggcaaatctatatgcaataagtccatgttagctaggccggggcaagcaaggaacaaaaagagagcaaaatttaattaattaaataacatcgttaaatgatttgtatatatgtatatatgaactagcaaaaaactacgtgcgaggcacgtatactaaattttatgctagtttttttctatgtta

SEQ ID NO: 378195 - DNA, 3839 bp, Cannabis indica
atttttctcactgttggtcaacatcaattggttcattgttatgatgtttctaaaattttcgtatgcgtccatgtataatgttagaggtggagaaaataatatatagctaacaagagctcttatttgcgaattgggcattgtgcaaaacttggtagtaggtatatatgattttgactataacttcctggaagatttcaataaagatgggtgggaatttgggggtaggatgaggttggtcctggttgacccctttcacttgacatatatgcttcgtcttgtttgttgaaaggttttgttggggacctgcaactattgtttgataagaaatattagaggttttttatgagacaaatttgtttttgcttgcagggttatctaactgaagaagctctagctgcggtgaaacaattgcttcctgattccgccgaaggtgattttccatcagtttgtgcttgggctgatcaggttcgatttcactatcgatggagtagtgctttacactatattgatacacctgactataggtgtaactatgaatactgcagtaagtaactagctttctgattgttaaaccatgctcattttttgaacaattcaaattgcatttgttgccaattgcttacatgaccaaactgtggtacagagttatgagaacctttctttgaacttgttattgtttgctattgttgggggttacttcattgtgatttaagcagtttcacttgatgaattatcctgtttggacctttctgtagtggctctagtggaaataagtctaagactcgcttagtaaatttgataatcatagatgattggtctgtctattggagataaatgaaactgaggaaagtcttttaaggctaaaggaatatgcaaatgaggtgttatctaattttaatttgctgatataaaagacaactacctaccaaatatcggtagctttcccatatataatttttacttgcttttctttttaaaagaaaacattattctcttcatgataggagactgccatgactctgttggacgtaaagatagatgtgttactggggcaatttataactataccatgcagctattggattatcaggactcctccgtgaaatcaaactgtgagcaccttcgtttcaaccatatataattatcaagggaaataaatagataagatcctgattatgtattttcgtgatgcagacaatttaactgaggcccttatgttcttatctcattttattggggatgtccatcaggtttgctctttctagaaattcatcaaacttactgagtatacaatgtcatcaaactattgaaacttcagttaacctttctccattgtagttttcttacaaataggagttccatactcggtgatgacatgtgtttcactggagagttgaattttggctggattacttgaatagattagatttttcttgtttcactgtattaacttcggctaataaaatgtgtttgaaaaagaaactgttactattaaaagacatgttctttcttatttttggttcccttcttagttgcttgacttctgaatcaaaataaagttatcagatggctaactttcatataatctaaactttctgctgtataccagcctctgcatgttggttttactggagatttaggtgggaacacaataattgtacgatggtaccgtagaaagacaaacctccatcatgtaagggctgttttatgattcagttacattcatgactcatgaaggctagtttacatcatagtagtccatatgttgtgagatcattcagatttggttttgttctaggtatgggataccatgatgattgattctgctttaaagacattctataattcagacctcacaagcatgatacaggccattcaacgaaatattactgtatgttgctctccttttcccatgataggttcctgtcatgattgttcttcttacctagtttacatatgttttttgatttaccctttacgcacgcagttgagatttattattttttaagttacctcgggatatttactattcatgtgtggattgtacaaaatgtacttatgctgatgactgttggtcagtctgagtgcaagttgatgttagaatgtgttagttttcttttcaagtataactttgatctacttgttttaaatttatacagaatggctggtccaatgatgcgtcttcttgggcaatttgtgcaaataatcacactgtgtgtccagagccgtaagttcatgctcttttctggtctatccttgattggtatcttttttgttgttcacagtaactctgtttgcagtgcttgattacttacacattcggtgttcacttcaagcaaaaagatcaagcacgccatggcctggatggaaactaaccacgaaattacactattcagtcatataaattaagccacaattaaatcacaatgaaaaattcaactgagtttcgtttatatgcatgtgtatgtgtataaagatttatcttaaatgtggatttcttgggcatgataaaattgccattgataatcttcaggtatgcctctgaaagtattagtgcagcatgcaagtttgcttacagaaatgctacaccaggaagcactctgggaggtattttcccctaattcatttaaagttttctctttgtatgtcagtagaccattaaagctagatcaaagtagttctaatgtgatgtgcgacatgctatgctatatatctaaacttgtattcctcgtttccaattcttcataccttatgttgttttagatgaatactttctttctcggcttcctattatggaaaagaggttggctcaaggtggggtccgcttggctggtacccttaaccgaatattctcttcacatgaaaaaattgctgaagcaagaagataggagaacgtcatccatatcaggacaggtggatcatcagataagaagtggattcccatttgttaggtttgtttatagttagaacttccccatacgttaaaacactcaaaggtactcaacacccttagctatccaattccatgtcgtcaactctttgaaaaaaaatagaaataaagaaatagagaaagagagaattgcatttgttattgtttatttgtaattgttcacgcttgtcttctaacccaatcaataagattgataatgcttcttcctatgtcccagaatatgctctcatcttgcttgtgttataatctcaaaaaaaaaaaaaaacaaatctcgcttgcgttataagtaatttatagggtagcatgaaacttaaaagtaatagaaatattaaacttgcactcaattaagacctgtcaatggatttggatttttcatatatagttgcaactacaacttgtatagaactacatcatctgcacaaacaatagatcatcaagcttgagaaaagttgaaacctatggatagatttagtggtgggttgaaaggagtagttccttttgtattagtttttgttctggcatttgcttcaattacagttccaagtgctcatggttggagtaaagagggtcatgttatgacgtgtcagatagcccaggtaaagtttcttccacttgttctcttttgaatagctcgaccaagaccaacgttgtcaattttttataaggataaatgaacgtagttcaaattgatgtactttatacaagtttgttagagcatatacattccatcacatcatcctactttaagaatatacacaacatgtcccaaaacctagagccggctcaagcacgggctcacgcccaaggcctcccacccagtctaaaaaattattttaataaaaattatcaaaattatatttaaaaaataccatattttacatttttacta

SEQ ID NO: 378196 - DNA, 4094 bp, Cannabis indica
agagagagagagagagacagaaacagagtaacacaaaaatgaatgaaaagcattactcaaatcaagtaacttagccctttatttatacacagaggttgatatacaaacaatttcaaagcaaaacagaattgtagacagaagtagttaagtaacctaacaaacttaaccactaactaatacaccatagttatgtaacagagtctaaaacatgcttaacatctcccctcaaacgaaaaagtatctcatacatcttgagtttggatcaaaggtacaagaatctctctgttgacaagggctttgtgagcacatctacatcctgatctatagctggtacatatcgaacaaacaattgcttggacagtatgtgcttcctaacaaaatgcaagtcaatttcaatatgtttggacctggcatgaaacacaggatttactgcaatgccagcaacactttgattgtctacccataagacaagacaaaagggagtggtgatttgtagttctgaaagtaaggacattaaccatttgatctctgcagcaacatttgcaagagatccaaattcactttcagagcttgatctggccactacattctgtttcttggcttaccatgaaaccaagttccctccaaaaaacattgcataagcacctgtacccttcctgtcatccacacatgatgcccaatcagcattagggtatccctcaagtgtcaaagaggtggctagtgtgatatgaagaccatgggagatagtaccttttagatacctcatcaactttttgcaggcctcccagtgggtgttatttggagcatgaatgaactgacttagcttgtttatgatgaaagctacatcaggtcttgtcaaggttagatattgaaaggcccccaatgtgcttctgtacaatatcttattagcaaatggttctccttcgttaagggagagtttgatactggcactagtagggttaggacttggcttggctccatccatgttaagcttcacaagtaggtcagtgatatatttggtttgggagagatacatcccagtagagtctttatagatttccaaaccaagaaaatagtgaacaggacctaagtccttcaaggaaaatgacttattcaagtcaagaacgaatttgttaatgatctttgtgttgaggcctataataagaaagtcattaacataaactagtaaaattatcaggttgtcaccaactctataagtgaatgaagaggtatattttgaggttgtgaatccccacttaatagggtgttctttagtgtttggttccaagctcatggagcttgtttgacctataaagagccttgtgaagttgacacacacgattaggtctggaatcatcaacaaaaccctctggctgtttcatatacacagtctcttgtaggtttccattcagaaatgcattactgatatctagttgtttaaccagccaatttagagaaacaacaacggtgagtatgatcctcaccgttgcaggtttgaaaattggtgagaatgtctcctcatagtcaatcctaggagtttgtaagtatccccttgataccgaccttgatttcagtctattcaaagttccatcaacattaagcttaactttatggagccatttattgccaataacagccatacaagggtaatattgaactccaagtacctactcttttaagagcattgaattcttgttgcattgagttcaaccattgaggatgttgaagagcagctgctattatttgaggtttagaggggattagggcttcaattaaaggatatttggtggccaagtgagcttttggcatgacaattccattaagtgatctagtcctcatagtatgtaaccttattgtagtagtggtacctgcaatatatatgaacatcagttgttgggttgggaggctgagatggggatccattagaagtggagacatggtcagtttgtatgtatggtaacgtgggagggtgactgacattttgagaattgagatcatgagtggtatttggatcatcattggtgacatctatttgaatagtagtgagattttgttggtttgtggttggtatagatttatgttggtcaggttgatctatctgttggtgatgagattgtggtatctggtgttagctaaggtatgggatattttattcatttagttgatggttttggtaaatgttaggtgggacaataggagttggggaaggtgggttctcgtttgtgccaggagttgtctcaggttgcatttgagtagtgcggacaggaacaagtatcacaaatgagttagcatagttattattagttgtactagtagtttgaaatgtagaaataggacaaggggtatgaacaggtacctagttattagttgtggtagtatgttgagcaggaaaatgcatctcattgaagacaacatgtcgagagatgaggttctaccacttggatgatgacagatatagcccctgtgttatgttgagtagcctaagaacaagaatttcttagacctcagttcaagtttttgagccttgtaagctctaaggtgaggaaaacaactgcatccaaatggttttagcaagttgtaatcgtgaaagaggcattcataagggctaatattttagagaacaggtgttggacgcctgtttatggtgaacactgtagaagccgtggcatgccaccaatattccattccaagaccagcttgagccaagaatgtaaaacctgtttctattacatgtctatgtttgcgttcaacccttccattttgctcacttgttctaggacatgggtgttggaagtgaatgccttggcctgctagaaatcaagaaaatggtctatactcacccccaatcaacttaaacacttcttataggtaacccaaattgcttttccacaagacttgtaaactttatgaagacattgaaggcttgacctttcaatgttaggggaaagattcaacaatattgaatgtagtcgtccaaaaaatgaatatagtatttgaagccctctttggatgtaatatgagatggaccccataggtcagtatgaattagagccaatggttgattagctctactgttggaattttgaaaaggtagcttatggctttttccttggtgacaagctttgcaaaattgtaatgtacttagggaacctgtgtatgatatgtgaggtaaaatttttgccaatgtgttatgtgcttggtgatgaagtttactatgcaaatgatttatgtcattagatttgaaaacataaaagacttgactaggaatagtggaagacgagtaacaagaatttgttttactactttctaaactagtacaagagtttacaagtctatgaaaatgactattacacaaacaattataatgctgtaagagtcattagaggcagttataagatgacatcggatagaagaattgagactatcaccgagctgatataggccacccttagccttccctttgaggagcactgtccctgtgagtttgtccttgacaaaacaacacgatttatgaaattcaagaaacccatcatgtcagctgttaattaggaaacactaataagattctttttcatggaggggacatgaagaacaaaatgtaaatgtaatgctgtgtgtttgagagggaagggactgtaatgaccaatattagaaatgactaatttcttatcattgcatacagacatggtttcagtgcctgtgtatggagtagcagcatcaggattctgtgtccccatggcaacatgattcgtggctccaatatccacataccaggactcatcatcaccaatctcaggtatcataaatctgtgaagagcctgaagatcgaagagaatattagattcaatcaagtgagcttgaggggtgaaattaccatatttatgagtgacccagttcttatcaaagcggtagtgacatactgctactgtgtgccctgttcgaaggcaaagaggatagagtaggcgagctccagttccacggcaaaaggaacaagtttgattattattagtggcattacctcgatcacctccacgaccataagagtgagagtttgcatttcttgattgctgaaatgcaagattcgcttgaagctt

SEQ ID NO: 378197 - DNA, 6274 bp, Cannabis indica
tttgcccttggctttcatcttgattgtttccttcctttttttgcatcatgttggcctcattgttttgcacttggcttttatcttgggtaccttcttctactagcatcaagttggtctcattgttttgcctttggctctcatcttgacgatttccttccttttttgcatcaactcggcctcattgttttgcccttggctttcatcttgactatttccatcctttttctccatcaagttggcctcattgttttgcccatgacttttatcttgagtaccttcttcttctacttgcatcaagttagcctcattgttttgctcttggctttcttctcgactatttccttccggtttttgcatcgagttggcctcattgttttcccttggcttttatcttgagtaccttcttcctctacttgcatcaagttatcaccttgaatacttgcttctatttcccgcactgaattgacctcattgatttgcccttgtcttttatctcgactactttcttcctctacttgcatcaagtcagcctcatttctttgtgcttggcttgcacacggagtaccttcctccatcgcttgaatcaaattgacgtcattattttgccttaggcattcatctgtattacttttttcttccactgctttgacctcattgttttgctcttggctttcatctggagtacttttttttaatggttgcttcaagttgacctcatagttttgcccttggctttcatcttgagtaattctttcccctgcttgcttcaagttggcatcattgtttttcccttggctttcatatggagtacttctttcctctacttgcatcaagttgacctcattgtattgcacttggctttcatatggagtgcttacttccactgctcgcttcaagctggcctcatagttttgcccttggctttcatccagagcacttcctttcttagattgcttcaaactgacttcgtagttttgcccttggctttcatctggagcacttcctttctcagaatgcttcaagctgacctcgtaattttgcccttggctttcatctggaatacttcctttctcagcttgcttcaagctgacttcattgttttgatcttgcctttcaacttgatcctcggcttgcttcaagttaacctcattcgtttgctcttggctttcatatggagcaccccccttcttagcttgattcacgttgacctcactgtcatttggaacacacccctcagctgacttttgaaccccattttcagtcacctgctattgagaatattatatataatagtattagaataatagtttggacgataatggtaataaacaccaatgtctacattgtgaataactaaacatgaagatcaactcactctagctgaaataatatgcttcagtgcagcaataagctcaaagagatactcaaacgcagccttgtgaggctcctgtattaaaatccactacttttagaacctctaataagttactaacactgatagaatgagtagctgaaaaaattgtatttttacctgcagatctgatggtagagggagtccttctaccataggggccctaggaattgggacaacttgcacgccacctgcatcatctgccaatggaacactccatgaagggggattggaaatgcccaatgcctcaaaatcgaccttagagcttatccaaggaggaaaaatacttcgagatgaagatgaacgatctgttgtaggctgtccatgcacctgggaaaagtacaggcattgaacagtgccaatcatacaaattttgtaagaaattatcaagaaaaatacacccagacacactagcagagccctaattattgccctattctgctttttcatgtccttgcgcaataggatgacaatgtgtttatgttcaaacctctggcctttctacagctttgaatgagtggaaagatggcctttcaaagtttgggggcttcagtatagcaaatgctccttcattgtaatatttggtttcgccaaactgcaagtttcaaaaaattataaggatctgacaaaagatatacaaacaaattatgaggaaaaataaccttctgcaccactgttaacatctggactttattctacttatgaataactacaacattctcccaagtcaggcatgtaagaaatttgtggaagaaagacaccaaatatgcaaggaagataaaagaaaatacctgtgggtaatctggagcactaaataaagtgtagagtgtccctgattctccatggtgatccatactgtacccactcagcatgtctccaaaatcatcttgaccagctcttgcatcagggccttcatgagatcttaagatcaactgttaagcaatacgaccataaaagccaatctttgcatcaaatactctttaagctcctctctaaattatccacactattaaacaacggtttaaaactatacatgaggatttggaagcaaaaatattaattggctatgacagtttgtaagccatttcttttaaaaatccaaccaactcatcatcaatacaaacaaagaaatgcatacattgacaatatgttttgaaagctgctattttggtggtctaatttgtaggtcagtaatatgaacaaaacacaaatacataggcaaatgtctcaaatgtcacttataatccaatgaacttgatgaaatttaaattaaggacagcataaaagtatacctttaaatttgattgtttcaaaaaagcctcagtgcaatcaggaccccaagatagacccattccttgattcacactctcaaatagaccatcatccatcgatggatttgaccatagcacatcacccaataatacatttggacctccatctggagcatctataagaagacgattcaccttagacaagtcttctaatgaacctagctccacattgtgtgccctctttctcttagtcctccgaaaaggtccagtatgtgtgcttcggaaaagacctccatgagtggtgtacacacaacctgctataattgaggccaaaggaagatctttaaagcattccacacaattcttgtagaccatttcaccttggtcaccaaatttggttttcacctcttgctcgaaaccgtatattgatgtactaaatttggtctcgtggtttcctcgtagaagatacactctattaggcatcaaaacctaagcatacaataagaccacctataattagaagtgtattgacataatacataaatatttatatacatcaatcaaacaaaaacacattaaagagaaattgatagttagaacattgaattttccacctaccagtagaataatttatgtaggcataaaaagaatgcaggttctaaatcttttcaacaatcaaatagaccccatgacgctgaaactgtactgagtgtaccaagcttaatatcttaccacttaaatacatttaagaaaacaaaggtatttccaatctacttgaccaaaaagtaggtgcttaagaataacaagttcagtgaaagagagtatactccaacaaatacaattatcactgccttatcttaccttccaagccaacaagaccagaaacacctctaagccccacgcacctctgtctacataatttccattaaaaacataaaattgcttctcagaaggcagcccaacaattttaaaaatattgagtaaatcatggaattgtccattcacatcacccactacagcaaccctagaatcttctccttggcaatcaactgccacacaatttggctccttggatagaatacttgaagcagcattaagtaatttatccaccacagcaagcggcatgagagaccaaaactctgatggtgggtccctctttgaagaccgctcaaatgaaaacatcaaatttttcacccaatctaaggttattttcccacctgggggccatacaacaggtcctcgaaagggtgagagtgacaccttattctgattatctgtattttttaggttcagatgtctcactaaagtttttttgcacattattctgatcatcagttctcaacccatcagcttccatctcatcagttcttagctcaacagattccaccatctcactcctaccatcttcacctcgtaactcgtcagcttccaccatctcaatatgaccatctacaattcttaactcaccaacttccatcatctcattctgactattttcaattcgtaacctatcagcttctgccatctcgtaattaccatcttgagctcttaactcatcaatttccattagatcattctgaccaccttcagtatgtaaatcatcaatttccaccaccaattgcacgtcgtcaaacatcatcccttctacctgaccaatctgcatctcattgctagtagtctctgatccatcaacgtgcattacaacttgttcccctatgaggggcacagcaccattacctgatggcatggactcattctggctgtctttatttcttgcctgagcccccacttccagtgcctcattttcaaataatcttctttgaagcccaccaatatctatatccctgtttgctgggatcaaggcctcacccatcttactctccacagtctctgcatctactccactgacctataaaatttgcattcagttaaactgaaaattcagcttggtacagaaataaatacaaaaaaaaaaacattctggcttgtaaccgtactgattcaacaggttcacgtcgagttgttgaaactttagctcgtcttgtaacaatcatcgaaacaatctctttcattcgtgacactgactgagtctgctcatcatccataccatcacaaggtattctacttaaaatgttactgacatccttgcatgaacccacctgccaattctcgtactgtaagccaaaccaaaccaaaccagataaaataaatgaatacaactagtagaaaattccattaccatcttttcaatactgaaggataatgcctttttcacatcactcttagtaacctgtgaatatcaaaatagaaaatgaaatttacaaagttaaaccatgaaaagtacaacaaataaaaccataaaaccttgtggctctcacaaaccttttcaactctgttattaacaattccacgagctatttctctcatcgtcatcagggaatgcacttgttgatcatttaagtttgcaaaagtcatttcatttatgttttccacaatcttcttagattcatctaccaatctctccttccgacggctcatgtctgcaatcaaatgtatgagtatgagtgaaacaagaattgattgcatgacaattatacataccccaaaaacaaattttcaagctacaaagatacgaaactcatattccagaaaccattgcacttgttttttcttcaccaacataactcaacattcaaaaaaaaaaaaaaacactataattacttgaaaaggtctcattcaaacaaatacccagaacaattactcgtgtctacaaaacagattccaaatacccaattcaagaaaaagacaaaataatatccaaaatctcaatataacgagtcataattcaaatttaagagttgagcaaaaaaaaagaaagaaaaggaaaacatatgaatgtagtgagagcaataaggatgagtaaccttcggctggcatggctagtgaggatgaaccgaagctgaggagactagtctgaataaaaaagtagaaaagtgttgaagaggattgtctgggagggaggagattggagcgcgaaggagagtggtgttatatcataataggttggttggttcgttggttgggttctttgggtttgaggagttttggactttgtttttctcttcagaacgactaaacacaaaaacgacttcaagccctagatcgttttgattaatactgctgtttcgtttgtgctgggaggggaaaaaggaaaagagtactcaatacgacgccgttttccacaagctcgggatatcttatataaacctattatttatttatttatttttgcctttaaaataaaaaaaaatatatatattattgaatttgaaggtaacagctcaatatttttgtttgtactacctcccttgaatgcacacgtgcgcgcgcaatatgtcactctatactatttttgtgttcagattaaaagaaaaacaatacgatttgtgtgtatactttttctacaaaatctatacttttgtgaaattattcctttacagtaatttataacgtaagtgtttaagtttaatttttaattataaataaatattaaatttaatttttaatgataataatacttatattatatttt

SEQ ID NO: 378198 - DNA, 1858 bp, Cannabis indica
aaaaaaaaaagtcttcttctttttctcttttttgggggtttgttttccaattttgaaatagatcttttgagaaattttttagagattatttaatgttaaaaaatttagttttgaaatagatttacctagaaaattatttttgtataaagaagaaaaaatgagcttagataaaattctttaaaaaatatctttgagtttgatgaattggtaacaaaaatcatgaaatggaactcttagaggttaagaattctgaaaaaatataattacaaaaatttataattttgtaataattgaatttttttgttattatttcttttatatttttaagtcatagtaaaaaagaaaagcatattatgaaggttggacttgcgagtagagtttgttcccattgttgggtcaaggctcataatcccaagtatagctattatgataagttgttctttgtttttacactaaggacaaaattaaagtgaatttttcaaactatttatagtttgaaaatgtggacaaaatgaacatcaattgatgacattgttcaatcaataatcttttttcttttggttggaatatatgtattataagattaactttatatgctttttttaaaaaaatttcttaattggttcaattccttaataaagtgtcatatgacccttgaacttgacacatttgttttcatgttaaaaacaactctcaaaattcaaagttactaactttgtcaaccattttttcacacttgggtgttgtagataatgcaatggtgaatggagactttgaagaaggtccatggatgcctaaaaacgtttcgcttggagtacttcttcccacgaatttagacgaagagatttcgtcgctacccggttggaatgtggagtcaaatagggctgtgaggtacattgattccgaccattacagtgtcccagaaggcaagcgcgccattgagttgctctctggcaaagaaggtataatatcccaaatggttgagacttcgccgaacaagatctatagcttgagcttcgctataggccatgccggggacaagtgcaaggagcctcttgctgtcatggctttcgctggagaccaagcgcaaaacattcactacatgcgcgaatccaactcaactttccaagtcgctagtctcaacttcactgctaaggctgaaaggacgaggatcgcgttctatagcgtgtattacaacacgaggagcgacgacgggagctcgttgtgtggccctgtgttggatgacattagggttatggcttctagctctcgtcgaaatgtgtttgggggtttcgggttaaggcttgtggttgccatttgggtgtttttttatgtgttggtttaaggggttttatagatataatagatatatatagtgtactgtattgtatggtatattttgctttctaatttttggtatgagaatgagatatgagtagtaagtgttaagcaaaaattttcacatttaacatattaaaataaatgcaaaacacaatttcacctatgccaaaattatagcataagagtttattaatttaagttcgacccatccaagattataagaataacctcttaattacaatccttttatttaaaggaaataccctttgattccaattacaatgacattaaataattaaaataaatttgggaaatttggggtacatttggaattgcagctgaactcagtcaatttaattaaccgagctgcctacataccttctttgtgaaggatcaagccacttgtagttcagaatacggtattttaaaatttgaataaagaattccggtagatgaccactttcaggaattctttgctatttgaaaatttagaaaaattccttggtgtatgaccttt

SEQ ID NO: 378199 - DNA, 2484 bp, Cannabis indica
ttgctgagtaattaatgaaatttggctaaatccaaattttatttgtgtgtaattgaaaataagtattaaacttctcaatgtatagatgagttaattaaagaaaatgtaaaagttagattgtgtcttgtaaatgaaagtaaccttaagcagtcataaattggttcttgcaaaggtgaaagagatataagttgtaattatattgtatagagtttggtagatatgcccaatatttaagttgtaaatagttcatttgattaatgaaagtttttttttgataaataaataaagaaataattacgctaatcatattttccacataaaataatattcatttttttttcaatattcccacataattttacataagagcactcacaatagagtagctgttaacccccaaaaattactaagtgtaatttttagagtcattagtgttatgcccgaaagttcgccaagtataaattccaaaatgcacccaagggcatgtgctggtacgaggaggagcaaagacacgcgcccagctccccctgcaacccccagcctggagcacccatcctctacaacacccagctcccttagcctcagcctacaacgcccaactttcccccaaccttagcttgcaacgcctaactccccttgccttagcctgcagtgcccaactcccccagcctcagtctgcagcacctagctcccctagcctaagccttccgcgcccagctcccccagcctcagcctgcagtgcgcaactcccccagcctcaccctgcagcgcgcagctctcccccagtcttagcctgtagcgccagctccccctgcctcagcctgcaacacccaggtctcccctagcctcagcctgcaacgcccagctctcccctagcctcagtctgctttttttttttttcaaaattcccacctaattttattataagagcactcacaatagagtagttgttgaccccgagaaattactaagtgtaaatttttggagtcattagtgttatgcccgaaagctcaccaagtgtaaatcccaaaatgcacctaaggggatgtgttggtacgaggagcaaagacacacgcccagctccccctacaaggctgcaacgcccagcctgcagcgcccagcgcccagcctgcagtgcccagctcccctagcctcagcctgcagtgcccagctctcccagcctcagcctgcagcgcccagctctccccaacctcagcttggagcgcccagctccccttacctcagcctgcagcgcccatctcccccagcctcagcatgcagcgcctacctccccgagcctcagcctgcagcctgcagcacccaactccccttacctcagcttgcagtgcccagctcccctaacctcaacatgtcatgcccagctctcccccagtctcagcctgcagcgtgcaactccccaacctcagtctgcaacgtccagctctcccctagcctcagtctgcagtacccagctcccccagccttctcatacaaatggaaatgaggaggaaatatcgaggctagggtcgtttaagcaaggagatctctaacaagataacgactacacaatgagtatgaataatggagacaaagtttaactcatccgaggtataagtaaaagagggagttttggtgcaactaaagatgtctgagacaacagaatacctgaactactaggttacctagtgtaaaagtaacctaacatgctcagacttaagaatctgatgaagttcaaaatatcaatgaaataaaagtttttcaaaggaaagtttaagagtctaaattttttctttgaatagtcttctattaaaatctttgaatatcactttttggctcttaatattttgttgacaagttcaaactgtcaacaatagctaagacataagttattattttcaatataccttcatattttttcccttatctcaataaagtttcagattctctgtttctttctctatggttgttgaacagaactcttaatttctccccaacacgacctgtgatgagccctatcaaatgagcctcgaaccttgttataacaacagtaacgagtggagctatctcttacttcatcaccccgaaaactaaacgcacaacctttaatatgttgttcttaatctcaaaaatcccctttgttgaattttttgtttcttatcgtttgaacgtatgtttgattttgacatgggtttgaattgtgtgaactctgcatttttttttacaattatttttcactaatacacgataagttttcaatgcatattctattagaattattcaacactcatataacatgttaacatttaaatctatacccacacatgttaatacaagtgtataatcgaagaaatctatttttatagaaaacctttattgatttaaaaagaaaaatacaaatagcataaacataccttaatctatttggttggaggtaataaaatgaaaaagaaatgaaacaatcttcattctattattttgtttggt

SEQ ID NO: 378200 - DNA, 967 bp, Cannabis indica
cagcttccatcattgcatgcatcacaaaaagcactaagcaaatggaaagttggctcaaatccaatcaccgcaatttttgagtatcccacaacacacgcacccagcatgcgtgcaaaactaaaaaagtcaatatttaaagccctgacaagaaaatagaagtaatcataacttctgaataatgaaactttagttggcagctgatgacgtaatacaacaaaaagttcatcataaatctcatatgtttgaaaccacttaggggaagatactccaagctccttgactatgttacgccctgaaagcttgggggtaaatgttatccgcatttttgtaagcatgatgtgtggattctaatcaaggaaggctgaatagtcattagctgccctaatctcccaattggtgctctaggaaggaaaggcatccacctcgtggaaaaagtctctgtgtaggggagttccctaactgctagccacacaaaggggattcgtgagccgaaatccccttgccttccaagagttaaggcaatcaacctccacgaggagcatggatttcccaaaggggccaaggcattctgaaacacagggaaccgagttatgctcttaacccgtagaagcttcacccatacatgtcagtctatggacctaaggactaggcttgttcaggtatgacgttagaggttgtctcccacgacacaccatagtatagagcatgtgtgtctttgagtacctgacaaaataatccaacagctagggataagagaaattcaaataagagaagccctaaagtgacaggcgtccaaggcctagcctgtttattcagtacgatctgacacccttaaatgccatatgggaaaaaagctacctaccaatccaacaactatatcttgccccaatgaagatccatccaaggtagtgtatacatgaagttggcctataaataccccaaacaaagcacaagagaggaggacctt

SEQ ID NO: 378201 - DNA, 2177 bp, Cannabis indica
ggcataaataggtggtgggaatgggggcaggaattgcattcaccgtacattaactgcccaatttccatctctatttaagagattgtgatctagtattgttcaaaaatttattatcctaaatgaagaagcttccttaccctttattagaatttagtactcattcccatacaagcatttatgctaaggatatagaagattttgctcatcatttagtttatagtcctatgaggtaccctctaccagctcagtggacaaagaaaatttaatggaaacaaatagtagaaatggtaaacatgttaacatcacttggtgcttaattgagactaagagaatgataccaagagatccaaggtttatggtctcatcccatttcccaaagcccaaaccgctagaccaaacctagttgcttgaaatgataaacatgttatcgagtatgtaatttggcttaaacctttcagaatgatgaaaattggatctaaaactacaattaaagaattgagtaaattggatgaccaaaggaattttagaaatctagtttatcataaggatagttatcgaatgcccaaaaatttacccttgggtgactgggtgaaaaataagtactgtaagtgctaatttatggaccaattgaattcagtcatatctttcatctacctatttttccatgaagaacgtttcataaaactcttgagcacatccatagaaatagaacattcaaaagatatatgaaaatcaaagtgttgatgcctatatccttttcaggttagagaaaaaaacaattaattattcggactataatgtactatccatattcatcatacatagaagaaaaaccgcgcaatacaataaataaaaagcaagctccaaattggtccttgttagacaatacaaattctcccatagtgattcagaaaaggaaaaatttgaccaaaaaaaggtagctcaaatgatagagattaagcatgtagtttcacaaggtttgaggttcaagcccttctcgggtatctatatagcaattgctatagttttttatccaaattatactattactactgtagtttttgaaccctattacagtgttattgatgtagtttttgatccctattatagtgttattgctacagtttcttagtcaaaccaaaaaaaaaaaggcaaaatttttgcatggatcaactatagaaaaataaaaataaaagtgataatagtgaagtgtaacataagcatgtctccatgttttgctagtggacacaattcatgaacatgaaaaaaaaaatgcaactttgcccatttgaaacataagtaggtccattcgaacagaacaacagccacaaagtaaaaccaagtagatacacgtacacacatatagaattcaatactgtacattccaaaacaatgtagccaaataaacactttttttcttctacatctataatcatttgacttcagaaaggtttgtcttcagccacagaataacatattgatattataaagaaaaaaaaaaaaagcaatcatagaccataggctacaccaatctaccagcaaataaagaatatgggagtcgttttcgaacacttttttttaaaaaataatgtaacttctgatttaggtcttagagaaagtaaaacaaaatttcatgaaattgaacaattaaaaaaataaaaagatgaaattagaaagagagaaatgacctagaatggatggtggtgggagtagtcaattaattataagtatttgtaggaatagcccccttctgcgcggtgagaggggacccggtggtggtggtggtcgcccccacattccgtccttttttattcttcttctttcttcctattcccaaaacccaattcaacccttcacccttcacagtaaataaataagtatatattaaatattaattcttccgtgactaggtagtagcatgaccaccaatactgccagacaagtttaatcacacttctcgtcgatcgaaaaaaaaatgttcaaaaagtaaaacttttattacacttcgggacaatcttactagagtagttaaaatagcaaaaggtaaattatttagttaaaagataaaaaagaataataaaaaatgttgctatgaaaaaccattattcattcagttacaaatattatagagaaatacagtagaatctctattcaagaatacacttgggaccaagtaa

SEQ ID NO: 378202 - DNA, 2563 bp, Cannabis indica
tctctctctctctctcactttttatatatgttccatcctttttcctaattgcatttatattctccttactaaatccactgtatatcaggtttacattttctctcttttttacttattaataattgtatctatgaagatatttatttgctatcgtattacattataagttattacatatataccgtatatgtggcaatgatttaaaataaaatgtctactacaaattcattaattgcattaattctgtctttttctctagcttcattattttacatagttcccaattaagtatatcacgaaaattgcattcaacaaatatttcgaaaccttacgtgcgtatatttgcatgtgtgcctctggaaagggtagtataattatttgggatcaatcgaataatgttttatcttatttttgaactaaaagaattaattaataatattggtgggtgaaaaagattaaagcttggtctgtgatgatgatttcctccaatgagcgcgggaggcccatatgcatacattattgatcgtttaaatctttttgcatgtgcaaactgaattagtctgtctctttattatatattttgtagtggtgtggtaatgaagttttacaatctagtttttgaaacgtacgtccccaccactacatatatgcaaactgaattaatcttttgttatatttttttgttgtgctccttctatatgcagttttcttaaaagatttcaagaacaaaagtcgaacgatcactggtctaattgcaacttcaattcgtcgaccaatggctctagaacaaatagctgaagtagtccaaaatggaaaaatacttgaagcaattgaagatgaatttaatggtgtcatcgttgaagtaaatgaaccaatggatcctaaactctttcattcaaaactcaaaacttcggtttcgcattggagacaacaggtatatatatatagtagtgctagatagctagctctctatcttgttacaaaaaaattatatatatataaatattcaccaaattaaatgtacctgttctgcagggaaaaaaaggtgtttggatcaaattgcctattaaactagtgagtctcgttgaacctgcagtcaatgtaagtttattatttctaaaaatattatttcttcgacaatatattaatattgtaatttatttaattaaataattaaatatcgatcttgatgaaatgcaggaaggattttggtatcaccacgctgaaccaacgtacataatgctagtgtactggattcctaaaagtggcaacactatccctgcaaatgccacacaccgagttagtattggtgcatttgtcatgaaccaaaaaagagaggtatttatatatatgtatagtctatatagctagcttttcaatataagtaaatttagttatcaaattaaacctcttccaaatcatatctaaacttttacttattaatgatttttatgttaagttgtaaaggaaaagataggaaaaacgttgaagggtatgtggaagttccctactggaactgctgacgaggtatacaattattttttttactttaattataataaaaagctgaattttcttaattaattatactctacacattattattacttgatcaaaaggctaatatatgtaaatatatattattgcttacttgtatatatatatatagcttttaattttttatatctcaccgctgcagggagaagatgtatgtgatgctgctgtgagagaagtgaaagaagaaactggagtaagcacattaatttttttgaactttagaaaaattctcattatatataataatcttattttgtttattaatttatatactttatggttgtgtaaattcagattgacacggagtttgtggaaatactttctttcaagtatggatggggttttggcttaatttcattttataactacttttatctatgtatattatatatatagtgcagttcttatattatatatttctagtctataacaagaaatatgaattcatttacgacaggcaaagccataaggcattatttgggaagtcagaaattttctttgtgtgcatactacgacccaaatcttttgacatacagatacaggaattagagatagaggcagcaatggtaattaatgtatactattaaatatcatagtcatgatcatggtaatttaattgttttatttaattaaattaatatattgtgtttgcatgcatatgctgcagtggatgccattggaggagtatataactcaaaaatacgtccaaagtaacgagttcatgaaagacatcacagaaaaatacaaagaaaaagtggatcttgatgaagttcacactgaattttcaatcataaaaaaaaagttcacacagaattttctcctctccttgcgggctctggtttcatcgttgaagtaatattaaggagctatgccaataacagtacagctttatttgctgcaataattagccttctatttttttattcattaatgtggcagtgataaaaagaataaaatagtttaaaaataaaaaaaaaataataattggcccatgcaggtttcgaac

SEQ ID NO: 378203 - DNA, 4630 bp, Cannabis indica
ctactctactgtttgccttattttcactataactagtactagtagaacaaccagtttagagcttttcaattatgttttttctttagtgttaaagagcagcagaaggactagttagttttttcttcaccatttgttttgaagaatatcttaaataaaggcttttctctatatatattataaatatgtttaataattgataataataataataatgaatgacaaggttgtctatagttggtgggtggggcccaaagccgcaactcattatggggttaaatgatctgttgttgagagtaattacacatgttctgaggtttttgcatttcttttgttcatatcattatcataatgtatgtactattattattattattattattattattattattagattgaaatcactgtaggacccctccactaattcattaacggcattaaatttttgccactggttgaccaaagataaaaaactcatgtggatcatagctagctagcaataatattataactaaagacaactcataatgatcaagaaatcattgtcagcagatcatctaaattattcaagtttagatctttttcaaccttagaaagtaaaacaacaatgatcactctctttgattctcttaatattaagtactagtcaatattgaattgaatggtctttgcttctattttcaccgagcaatgtcgattgaggcgaggaagcaggagaagaaggcgtctagatttttgggcaggtgaggcaatggcgcgatcatctttgggattctacttgaaatggaggaaagaagagggaaatataagctaattatttggtggggaagaattggatgttgtcaaatggcattcttgacttagtctttgttttctcttctcttctcaccaatggctttgtggctaatcatttccaattctcgtgccgacaatgccaccgaggcaagcgtgtatacgttgccactgaagccagccgctcgcagtggtggcgtcactttgttctgagtgttcacagcgatgcaaactgcaagcacacctgtgctttcttccttactccattgctttggtcctttaatctcagaaccagaattaatcacaacacaaaactcaattacgggttaatgattatgattattagaatttataacaaatgggaatttttccctaacataagaccattatagagttttgtccattatttatttacttttttggttgcaaaaattcccctaaaattatacaaatatttgcaaatatccatattgagttatatttggtgttttttaaaacaatttccttatgtgttagtgtttttggaattgattctttttttttcttttaattaaaataggtttcgaatttttgtgtgttatttatttttactcattttgttatgaaactatctgttttaatttatgtatcaatgtttttgaaattgattccctcttatttttatttttttaattataatatgtttctaagttatcgtgtcttatttgtttttagtcattttgttgtgaaaccggttctattttaatttatgtctcagctagttttttatttagtcattttaaaaaacggttcttgaattatttatttcagaaataggtttttgatttaattaattcaaggaactgatttttaatttaatatttcgggaactgatttttggtttagttaatttaagaaattgattttttgatttatttattttatttaattgatttttgtatgagtttttatcttagttgctttacacaacaaatttctttgtctcatattattaattagttgagagatataatcgatttctttatattatattttgagttagtatgcgttatttgttttacttatgttgttatggaaccagttctgtttagatttatgtctccatttttttttaaattgattcccacttttttttattatagccggtttatgaggtattatatgttatttgtttttactcactttattgtggaactagttctatttttaatttatgtttcaatgttttaggaactaattttctcttttttttttataaccgatttcttttttaattataataatataatatatatgttttccacatattaaaatgttggtcactgctattattttttaattaaaatgattgacaatgtagttgtttctttttctagagttgtagaaaataaaatatatcaaaccaacgcattcagttacattaagaatatttatagcatgttagatattattaatttgttcccactcttcttcatttcaaaatcaattaaaatagaaaacaatatgagttattttgcattgtttttttttaaaaaaaaaaaaaaattagtaattttcaaaaaagagaacaaaagaacaatttttaaagttttcaaaatacacaacatgtttagttaatattttttaaaattagttttagatttttttttttaaagaagaaaaacttcaatactttgagaccccacgaactcgaccagaccccaaccagtaacttcaacccgaccccgacactgatccgaccctaaaccaagactcaaacctcaagtgcggactccaaacccgatctcagaccctagactccgaactcagactcggacccaaacctcgaccccccatccggactcaaactcgaacctcgaatcttggacctggacccagactccggacccgtctcctaccttggcctcggccccgggctcagatgcaaacctcgaacccaatcctgaaccccagccacaaccctggacttggaccccatccctgaccccagacttgaatccgaacccaaaccaagggcctagactttaacccaatcttgagacattgacctgaaaaaatgatatggaaggcaaggagcgatgagatagaaagtggtgagagagaaaataaagaaagagaaagtgacgagaaaaaaataatatgagacagtgatcaagaaaaagataaaatgagataaattacaaaaaaatatctatttttaagttagaacacaacattattcttctcaaaattcttaatttttttttataattatggccaaatgcatctaattattataattaacattattatgtgcagaataaaagagagagtccattggaagatacatgctcctactaaaagaaaattcctaaactaatatatatgatgaaattataataatataaaacaaagtattaaattacacctcatgtaacgttattctgaattattatatcaactacaactactactggacccacacaatatattcgaacaaaaataaacaaacatgaaaagtactactcgtacactttacaatatatgtatagttatacttacatatgtatatatgtacgtacggactctccaaccgcaccaaccccaccccaacatctaattatgaggcttgaaaaaattataataactctctcaaaagttcactttgatgcatataggtatttaatcttaaaaaattaggataatagttcctaagtttgagaattttgtaagttggtcttaattttaatagatccgatcgatagttactcttaaaaataccacatgttaattctaaactgtgacatttcttaaaaaatttactttaatgtagataagttcttaattttaaaaaattacaataataatctctaagtttgggattatcagcattagtctgcagctacctgatttaataattttgtttgtactttgtacaaaatagtgaattagttgtatattattcaatagaatagctagtatttatatacaagattaagcagattaaataggaaactttaaagaaattgaaaacttaataatatatattaaaacactcccttgagtttgagcataaatgtttatgatgcctatggaacactaaatttgaggtaatatgaagagtagcttgattatcacaccacaattttactggaactaaagttttaaatccgaattcagtcaaaagctgataaatctatattgttgacctcacttttggccaacgacaataggtcattcaaagcgatagtaattgtagagaaattaatgatgaaataagaataatgaacaacacacaatatttatagaagttcgaccccttataatggtaatagtctactctcattttagttgtattactatgaaaaactatcaagatcacaaggtctgccaatgtgagtttctcaatagctcttggaaagtgtacaaatatttttgcagagtaatgcaaaaagaaggcgtctttcatagtgagatggcctcactatttatatgagtaataaaataaattgtttgctaaataatcgacaacaataaatgtgaatctcgatatcaaagggaataaagtggcgtaggaattctaatataaaatctcacgaatttctcaatctggcgagtcaatcccacagaaataagaatttaattgaactataattgtggaagcagttaaggaaaatatctcaaaatatcctttagtgaggtcctctggtcggaccatcgcctatctcaaatcgttaatgttgctcggtgcagggtgaggtgcaaggcctatgtaagtctttcgtatctggtcggtgttgtgaaaattattatacgcaagtatacgcagtcatacaagtaatacaatgataagtaagat

SEQ ID NO: 378204 - DNA, 5940 bp, Cannabis indica
ttaattgaagggtttagatgcaatattataaagttgttgtccttgtagtgtaaacacaaatcttaaagtaaattccaaagactacacacgtcatctctcaagtaaacatatccacctatcatttagattttctactctgataatccacagcttcaagctttgacaaccatggaggattgctcgcctcatattttactctactccttttcctttactctctcgcattttctttccttgtgacctattatagtatatcatcaattcactactcaccaaaccttttctcatttttctcataactgaactgaaaaaccaaaatgtctcttcgtttctcctcccatgtgttaaatcttcactcggccaagcaccaaactttcttcaatcgtttctcttcagacttcatcaccagaattcaggtaagctccaccactccttacgccttgccatactctcctttgaataagttaagcagagaaaagttcaaccaccaccccattacagcttcagtaaccccaagtgctgaaactgttgaatcatcttcattcagagctaaaaaacccaatgatgttaatgttttggtggtgggttcaactgggtatattgggaaatttgttgttaaagagttaatcaatagagggttcaatgtcatagctgtggctagggagaggagtgggatcaaagggaaaaatagtaaagaagagacattcaatgagttgaaaggagccaatgtgtgcttttcagatgttaccaattttgattgtttggagaaatctttggaaagtttaagtgttcctattgatgttgtggtttcatgtctagctagtcgttcaggtggagttaaggactcatggaagatagattacgaagcaactaagaacagtcttgttgctggtagaaaatttggggcttcccattttgtattgctttcagcaatctgtgtgcaaaaaccccttcttgaatttcagcgtgctaagctgaaattcgaggctgagttgatgaaagaagcagaagagaatagtgggttctcttacagcattgtgaggccaactgctttcttcaaaagcttgggtggtcaggttgagttggtgaaagatggcaagccttatgtgatgtttggggatggaaagttgtgtgcttgtaagccaataagtgagccagatttggcttcttttattgctgattgtgttttgagtgaagacaagattaatcaggttttgcccattggaggacctggtaaggcattgacaccattggaacaaggggagatgttgttcaaacttttgggaagagaacccaagtttttgaaagtgccaattgggataatggactttgctattgggattcttgataaccttgtcaagatatttccatcaatggaagatgctgctgagtttggtaagattggaaggtattatgctgctgagagtatgctgattttggaccctgagactggtgaatatagtgctgagatgacaccaagttatggaaacgacactttggaagagttttttgagagagttttgagggaaggaatgagtggacaggaattaggagaacaaactattttttgaaaagaatttgtgctaatggtaataaagtttgtaaacaatggaatggaacacagtcaatttattaaaccagtttcatataatactgtctgtttaattatgtactttatttgagtttcaatcaggggcttttgtttaattatgctctttgtcttctgattattatatgggagatgtttcaatcttctttcaaattgctcgtgtcactagcttttggaatatctagttttgaacaagtctttattattatcttaataaattattgcataggaaagttttgagaaaacgcaacttcttatgacttttggaaacaaggaaaggaattataaacacaagtactacttatattggtttgtgagactttgagaccacaacttgatagagtacttgaacaaatctcttacaactacatgtcaatgaagttcaattacaggattcataaactacagatggtacaatataaaacaatggatcaatgagatatgctgcacaagtagaaaacatatacaaataagatatacacaaatccaaacactgatatctgatataacacacaaatccaagacatgaaatggctttgtgaggctttactttgggattttcttgtggatggagaacacagagagccagactagtaaaaccagcaaaaccgaggcaaacaaagaaactgcaagagagccggccaaatgttgacagaacttgtcaaaagttgagcacaccttctgccacctgacatgatcgttgcccttcaatccaacatatgctactcctccagctgtgccagtggctgaggcaaccaaccccagtatgagctgcatcataaccaatatatgcacatcagcttaatattggctttcttttctttccttacaacaagtaaggcttgtctttcatctataatatcttttataagtgaatagaatagagagcttaccacatcaaaaatggcatagtagagcaagaatttagatgagtattcaggcttcaggatgactgaaattgatcctatagtagtaactaaactgtaaagaccggcaattgataacgccaccagaaagtatctgcaaatatatgtacaagactaaatcagctatttgaaacttaatctcaaacataacatgtgaaaaactaaaacacttgacaaaatctagttagagaaaacttcagattaaactcacatgaacgccggagagtgattgaacttggccgaaagtggtaaaggagctcgaacagtttgcttgctagtaacaagaacaacaatagcagccactgttgatgcaaacaacaagacccttaaagccacatcaactttaaagcaagtagcttcagctgtacaagtagctgatgagggccctgagattggtttgggagatggaggagcttcctttccttgttcagggtcaactttctcagtagatgccatagcttgtgactaaagagcttttgtttagcagatatgaaaaagttaaatgaactagactcacttcaaggaaattgggttgtagttgttttgtattagagtatgtacatatatatatacacatatatacacacaattgtatatatcttggtggaacattcatgggacaatagttcaaatacacaataatcagtttggagtcttttgcacgccaagtgaattggtttgaatagcgtttttattgttcaattgctgacaaggttcttatattttatgcttatgttccactcttgactgtgcagccctataaattagaagagaaaaacttgtgtgaacaatttttttaatatatggtttctcctttggtatatattataatgtgatttcttataggatttggattggttggataatgtttggtgggaatggaagattttattttgtagaataattaaatatttaatcacaatttgtggttgcgtggttaggaaattagtacacaaagtggctttttttggtattttctcctcttaaatagccctttaaggtggggtaaagcctaaaaaagaaaaagttaatcacaacttttttgctgggtaagttaatcacaacttgaaaaacaaaaagtaacttcatatataattgatatttatttgtacaattattttaaaatgttgcccaaataaagttgagatttattttgtacaattatttattaccataagtgggttaaaattttcttctaaaaattttcaaccctatgccgtcgattatttattattatgctgaaaaaagcgcttctaaaggtttgttttgtaatagtgattcaagttactgaagtctgaactttcattctggagtttccgaagtcaacttgggcgcagggctagggacccctctcagggcgacttgttataactcgggactactcaacttcaagatgtcatctttcttgtcatgtgtcaaatattgatgttcacatcattaggctattcttggagtaaacaacatgttttttttaaattcttgcaataatgaatttttttattgctaaacttatgaagtattaattgataatttttttttctaatagaaggttcaattttaatttttcgcccaaagccccgtttgcaaaacaagtcaagattgactctcccttctgccttgtgtgaataggatcttgaatcccatgataatctatacttctcatgctcttattctttgagagttatggagcatattgagggttggctaggtagtctgctttggccaaactagtttgaagattggattaagtgggtgaccatcaggaggactaagagtcttgtccatgatttgtactatgcaacactgggtggagctgtgtatggaatatggtataatcgaagtttgtgtgtttttgagaaaaaatatttggccccattcttatgtaaacaccttatagttaagatgagcattaagactgtgctagttttttaaggagaataatttgtccaaaaaggatataacatttatgaaacttgtatacaatatgtagatatgtagtagattttctttgtgagaaaagatgggtatgcccctaaattgatctaatatgcatgtttaattaatgaaaattttataaaaaaaataaagtagtggtcgtcgttaggttttatagtagagaagaggagtcctataactacttttgtttatttttgttttttaattttaaaaatagataataaaagtgtgttaagtaaattttatttttatatttatttattgattttatttaagttgcgttcggatccgaaactgggatcgggagttgagtccgagtctggggtaggggccaaggtctggacctgggttctaaaatttaggttggagtcaaagtctaaataaattaattaagaaaaaaattgtttgaaaaaaattagaagtgatttttttttgaaaattttgattcttaattaaaaaattaaaaagtgaaaataattttataaaacacgatttcaaaaaatatttttaattttttaattttaaaactaaaaaactaattaaaaaatatatatttttttaaataaaataggaaaagagcagtaagcatgtttactaatcagtaatggaaatcaatgctaaggtaatcattcccttacatttgtttacttacattattaaaagagaacttgataatggagaaaaccccactaagggagagaacctttccctttatttttctaatttgtgtggtcccactagtttccccttttccaaaatttagtaaacagttgtatgagaatcaataccataccatttattcatatttcctttaagtaaacatgtcataattttgttaaggaattgccattaagagtaattgattttaattatttttattttattttttaatattaaatatataatgacaattttgttctttaaaatatgtcttataaaataactaccatataatatggtttaacttaaaaggacaatttagttaatttaagcattccgatcatgttttctaataaagtaaacaagataaatcactattattctatttccaaaaaattttagtaaacaacatattacaaatattaattctgattattttttatttatttcgttatatttctccattaatttattctcattctgaatcctgtatatagtaaacgtgccatcagtttatacaattatacataatgttctatttatattagacaagtatggttaattatccctatacacgaataaaatgatacaccaaccaaaaataagctaaacctataattaaataacaataattaattttcaagtattcattcagaacttgggaaataatatatacaaaataattatatcattatatgatagaccaattgcgtgtaaagccaaaaaacacttatttctaatgagtgatatttgtatagttttgggataatgaaattgacagcgattaca

SEQ ID NO: 378205 - DNA, 6251 bp, Cannabis indica
aaattaaatcttaggtatgttttaatgcatcgacatattccataattaaacgatgcgtatttgatttgaagtgtgaaacaaaacgatcaaaagaaggttgtatcgaaataataatagaaacaagacgattcagaaatgtacaaagaaccacaaccgaacctaaatgaacatctgccttggccgattgtaagcgcgaagaaatatttggtgataaatcaagtaagtccacgacaacgatagagaagagcccaaaaataaaagtgaaaaggaaaatggtgaaaacaacagacacggcaaaaagaaggatggccactatgaaggagccatggatgaatgcaagaaggaagagatctaagtttggtatcatatttgctgcttctgctaattgctgaaaggaagaaagaaagtgtttgtgagtttggagaatagttataaggtagaaaggaaatgggcaacttcatttgtgtctagggaatgagaaggaaacttggagagagggaagcaaggattctgtattcggaagacattgatattggaatgacttggagttgaagagtcaaagtttactttaatagatttaacaaataaataaaaaaaaaaatgcataatgaagtttctatttgatttcaaataacaaaagaaggaaaaacgtcgacagcaggattcgaacctgcgcaggcaaagcccaacagatttcgagtctgtctccttaaccactcggacatatcgacaagttgtagacgtttggcatagatttctaaatattatgtataaacagatgggtttgtttgtcatcaaactaaaaaggaacccgaaaatggctttggaaaataataagagccatgcttttgcttgtttgtacttatttctttaattacattgaactgtgtaggctttacttgatgaacctttattttaagttttgttcttccatcttcatgtaaacaaggaaagattaagttagcatactgtgattttttttttttacaaaaaaaaaaaaaatgtaacttgaattgtgtatccccaaaccttatgctagtttatttattgtaaaaagtgagcctaaaacaaaaattagcgtacagaaagatgcacgaaagtagtgttaaagaatctttcgaaagacacccttaaattagagaacaggtacaatataatatactaggctatacctcaaaagactgactattaacagtaaacattttgcctcaaaaccaactcatagagtcaaaataagagagacagcctccttaaactatgttccaacacataactgacaccacattcaaaagctgttctattttgaaaactcatcaatttatgacttgtccacacaaacatgggattactaaggaaactccaaagccattattattaccaccttctaataactcagtttgcggtctaactctactgatagagccagaaggagtggatggacatggggcaactaagccgtcaacaaacagcgaattcacgttcgaaatagtgggaactggggagtaatcattaggtccataatagagtggactttgactcctcctcttgtgaatgttactaccactagttctacttctagtcctctctgtctctagaaagtggccaagagaaggagtgctgttggagtcagtcacagcatcagtggttagctttgagcaaagtgatgagaagagccaaggcttggatttgaggatctttccaccactaaaattttctggtgttcttcctctagtggatcttcgggacagttgaaaaatactagagacgccaattagattccccagtgttttgctcttgtcatggaagaaagatccagtggactgaaaacaaaatattatacaaaaaatgatttaattaagaaaagagagctgcaaaacattttaggacacaaattactgctacaaacaataacagttgagatagacccaaaggtgagctccctgccgataccctcttctcacaacaatgtgattcaaatgtgaggtgctcttatgatcagttatggcatttgatttttagtaattgagcgtggattggcgtctcagatcacaatgttcagaaggccactggccacattgattatttaaatttgaatagcatctcataactttgtgacttcttaaaacatctttcaaaaataaaagactacaactgcatacaagtcttgtctattttttttaaagtgatacattcatgtcttttcgcattatgtttttcatgtgatgcaaactattcatttaatgccaaagacacaatggattggttattcgttaatgttatcgaccaattaaagaatgagagcaccaggggctttgaaagggtatgagaacctccatatacataatacaatacacatgtatatgataaagagcaatacaaccagtgccatgaaaaatatgatgtgtgaaagaaaatggtagtttcaaagtggattttaggctgtagaaatggtacccttttattcatgtaaatcttcacaaacaaacgaaaatagaaatatagtttccttcttcagtgaagtaaatggtgttggcttagagaaacgctaacctctgtatcaagatctgaggaagaaatggtggaggaggtgggagaagcagttagagaagtgttgaatgatgctgatccagaaatatcgagggtacttatcaacccaagcctggcattaagtggtctgagtccgagtggccacccttcttcctgcacacaacaaaacttcagtggaaaatcattgattggttttccataatagcacaaatcatttacaccgttttagtgtttgattaatgagaaaaatagagatggatattactacctgttgagccatgagtcttactattctctactgaaataccagattgatgtaccaggagaattcagggtgaagagaagttctcagagagaagaagtgcgtttctaccaatatgcttaaaaagacagagaacgaatcccaccagacaataaagaaggataaggatataagaccaaagaaaaaggagaatgacaaagctttataaggaagccatatacaggtttttggggtttagtaaaacactttattaaaaaaggaaagagaactgattgttatgagaaatggctttgtcattggcagcagcatggcatgatggccaaatggtataagcctcgtgaggatcaaagagtcagcttgaaccaacagcatatagaagaagaggctatggaattatggaattgaggaagagagaagaagaagctgagagtgacgtcttagggtctgttttcgacgattgagcagacagaatagatactggggtgtggtatcaacacaacagcagcaagaactattctgtacgggcgtcagattaaaggccactctgcacaaaacagagggccccagatacaagctcatgcacccaccgtaatgtggattgacaacaatgccccgcctacccttattattatacttatataatttttctattcaagtcatgttacccgactcccaattcactcacacactatgccactatttataactgtagaattaaaatgtgaatttattgtgtaactgtaaactaggagtaattttacagttttgtatttaggtgcgtacacatccatagtaaatttcaaaattgggagagttatttttttacggtaggttagctataagaaatcttatacccatccaacttgagctctactatattattattatgtccctttcaatgtgggctaacataacagaattgtaacatgtggtacagtttctccagattaaaaaatctttataagactgtcccaataatgaaaagttagtcatctctcgaaagtatgttcccggatagctaacttgtgcatccggaaagagtcttgtagaataatagttgccatccgaaagggcgttctcagataactattatgtccactacatgtgtagtcttcaagaaatctaaccttcctctagaaaagagttctcgatggctagttgttccttttggaagggtgtttcaaatagtcgactctagctagctcttttcttatccgaaagctccttcagcatttgcttcagtccgttgtccaagaagcgtatgtatcatccgggagcagcttgtgttgtactgacgtggagattatgttacaaagagtttgttaagttatttaagtcataactaacttaacaacttagcatgtccagccatcgacttaggatcttcatcttgagcctacaaataccaccaacacttatcttttgaagtacaatggattgacgagttttaagaggagactttgagtttgagtgagaaagagattgaaatgtacagagaaaagagagagtttgggtttggattttgtatgaagaatcttctgtagatgaagaagattcttgagcaagagtgtgagagttgaaacactttgaagagatccaacatttctcgactgtatttttatacctgttcttactcaatcaataaagaggattcggtggtgttccaaaactggagtagagtcatagattacattgagctatcgaatttgaaccagtacatatcatggtattgattttatcgttttattgcttttaatagtttctgattttagataactctgttcatccttatttttctctgattactgtttgcgtttaattaatcttgtcattgctaaatgttatgcgtgtttccagcattggagacgtggattccaggtcaacacccaagacccaccagtgggacccttaataaaggtaaagtgggtcgagcccacctagatatgtccttcaaggaacgtatttgggttttgcacttgcagagccttttgccttcagcaagccgtacccagaagcatgtccggtaccgcgagaccaaaaggacgagacaatgtgcgcccggaagacccttcctgtttccctttttattcctgcgaacaaataaggaaattcctattttcatatcacaacagagtattgtatcaagattaatgtggaaacctcttataacaaatattatgaaatcaattcagattaattgcccacaatcagtgcagatggtgttgaccagatcaattcaaattcgatccgcctaatcagcagatcgtcttctttatgggttagacttcatgagaaagcctaagggtattatttactgtaaactctccaatagagagaaatggaaaacttaatgtaattctcaaactactataaataccatacgaatcctatggattaggggttgaactctcttgaaaactttgctcaagaacttgataacatacattctttttattccctaaggcatttacaagagaaagacttgctaaataatactgactcgtgcactaaggctagttaacgccctaaccacgtaaaaaactgtttgtctctttttactctttctctattgatttttgttctccagttcttattatttatattctgttttcaaaaatctcgataaatattttgatgctttcattgagaactaaagaaagtagtgagaccacttgcagattacgttcaaataatcatggccctcactcgaaccaagtctaatcttcgtttcaatgtccctagtgccagagctagagattttagtgaccccaaagaggtgactagttgtcagaaaagtcgtttggatgaagattagaatcgagacaatcccatcattgaggatgcaaaatttagagaaagtagttctgaagatgctgaatgtaataccaacaaaataccagaggatatgcatgaagatgacccttaggacaaagtcactaatgataatgttggaaagaagagccagcctgatgagtcagaccccgtggacatcatggcaagacaactgcagctggacaaaagaaggttaacttgacaagatcaattcaacgagttactactcagcaagatgaccagaatggacgctgtaatgactgccctgaatatactatcttccaacgtgttagtgttgggaatattttaccaagatttagacttactaacaagtatgttgaattaacattgtaaatatgaatatctccaaaacaatgaaaataaacacataagggttttaaaaaaaatcttacattgattgcagcggaatataatgactcattccattcagatctttagcccttgattcctttttgtagcagagcattatcaagatctgaacttggatctctttctctccttcgagttcggttaccacagtcctactcactatgattgagtacttgacttactatgtgtgggcatgacactcttgttaggttttatgccc

SEQ ID NO: 378206 - DNA, 4716 bp, Cannabis indica
tttataatttatatatattataaaaatataattattacttatttataattgacataaattattaagttaattttttttttatataataattagagactataacatcaatattgtaattagtttataacattttcaaaatcgcgtattaaaaatatacatctgtataagaatatttatatcttaataaatataaaatatataatatttatgtaaaattaataattttattctaaattgtggtacgcatataaatatttatatttactcaataaataattttattataatatcatattaaagattatatagtgttattgttgttatgttgatattttttgattgttcgatttttttaatataactctgtttagttataaactttcaattcaaatataatttacttgatataagtatattcttgaatagatattttattgtgtgtatatataatttgtatttgtttgaaaaaagtgattaaagttaggtggtatatgtctttgttatagcgttgattgtggaatgaaattataagatacttctctcaatttttacttgaatgctctctctagccactattctctttaattactttttcttttactttttttttttggaataaagaaaaaagacaaaattaatttatctctttctttcttgtcaaaagttaaaatagaaaattattaatcccaatttttggcaactaaataataagagaggttgaagataaaactagtaaataataatatgttttagaagagaaattgtaaatgatatttatggtgtctagcatttttgtaaggtataatattgttattagtgtaatttaatattgtgtttcatttactttactttattaaagattataaaaaaaacgctaattaattataagacaatatcttatagtggtattattaagtactttagtgtcccatagtaatgtttgttttagagtggttcaatcattaacgagatctacttcactttagtcacttatattgggtgacagatggagtaaatatagaacgaggaaaaattgtgaacaaaaaattagagagcgcaaattaataataagagtttctccttgtttacaacgcaataccactgatagagaagagccctcttacatgcaatcttatggtccaatttatattttataagcataaagcatttcattcgtcaaaatgttttactaatgaaagaaaatacaatgatagacataattaaatcattaattgttagtaaataaacttatcttgtattgttaacttcttcagttttattagaaatatttcttaacatatcacatcagtttattggaaatgaatcaactagtggatttgtctactatcatttgttgttttgacaccggagacaagaaaaatagaaaagtattcatgttgtactgtgatcagtaaagtattattaattcaatattaagtttcacatattttaatttattaattattattaaaaaaatgttaagtatttacaaaatatatatctaaattttaaataaatgaaggggaaaaaaagtctaaatggtaaatttgagtggatatgtaatatttttaatttaatatcaaattttgtatatttgattgtattgatgaaaagggaagttctatttggctgctcttgctctttggctcattgaaaagtaagacaaaaaagataaaaggaacaaaaacattgaacaagtcaaattgctattttgtagtagcaattagagttattaattcggcctataaaggaaaaattgtggacttgataaaaatatgaacttaaacacaatattaaaatcataaacttaagcatgacacaataaacacgaaaacacaacacaaatatactaacctagaaacatgatagcataaattacatccataaaaaatatttctttttatattttaattattaatttatatagttaaaaaaataaatctatctttttaaagatatctaaattatttttaaatatatgagacattgctatgagatatttgagcattgctatgagatattcacggtgtttagcactatgatgaagtattgtcgtataattagttagcaattttctataatatttattaaagtaaagtaagtaagatctgatattgagttgtactaataatgatattacacaacacaagggtgttagatactatgagtgccctttagcatttcccaatatatttatgttaaaaaattactaaatcatttatttcttttttaagttcaaaaatttattgaaaaatatagacacttgtgtaaaatatcaaatctgatcacaacacagactgcaatgactggatagttagacataaaaattaacagattattaattatgtaattattatttatgattttatgttcattagtataaaataagctctgttgtcagaaataggtattagtgatataatttctcaattataaaaaatttagtgaattctaaatgtgttatgtatgttatttatgaaatttggcatttttatattttatgctcggtaacagtaggagttcgacggttggccaatagtgtcactttgatgcgatttagtatcttaaatttaatggagcaaaatatatgaacaattaaaatatcagggttatacatggtggtatttgattatgaccatcttacccttaattatgaaagttaataatcaagcaagggtagtattgttaccacctaagtttattcaagtaattcttagtggaatttttagtaagttataaggtatatactgatttttaattagaatagtcaagagaacaaagataagcatcacttaaataaatcaacacacactccctctctttctctctcagttctaagaaaacccaaaccaatttcagagattattccccactttttcaaggatttcagcaagaactttacaaggttttgaaaggaagagtaaagtaaccctatgctcatctcttctctttgaattttttaagaaaagagttggttttgatgcatggttttatgagtttggctttgttcgagtttggcgatgttagaattgattttggggattgaattatgattatgtggttgagttgagtgagcttgagttttagaactcaaagcttgctcaacaatggtggtttttgctacagagattttttggtgcttttatttgttgaattatatttaaaacatgtttttgagatgttttagaaagtttgagcaagtttaggttagaattgagaaagaaaagttcgagttttagaactgtagcgaaatgatttaccgtttttggagaaataagtaaccatttcatctggaaagccctgggtaaacaggttaccgtttgggaatcctattacccatttggggtgatttttgggtaccctgattttcatgttttcttgatatttagggtatgtcatgctatttatcaatatagaaacttcaaattatgagtttaagtccccaaaaatgttttagcgagacacttaacaattttacgttaatgtgacttagagcttccaatcatcgatcgatttttctactcaggttgactgacaaacctgattacggaattgaggtaagattagtataactaatacacatgcacatgtttagcatgcttttcatatagtacaaactagtgctgccaacactagtacgcctagagtgttgagtgcatgcggtattagggctagttgtacttacagtacgaattaatgctaccaaagactagtacgcctagggtattgagtgcatgtggtattatggctagttgtacttatagtatgaattgatactaccaatacaaatatgcgagtattaaatgcatgtgttattatggtaaatcgttgtacattcaagactcattcatatgtgttggacacgagttataaactcatgataattaagtgtatgagcacttaattacaagttagatatatgtttgtattttatatttttcttactgagtcagtcgactcacagatatattttcatgtgtaggtaaagacaataccaaatctaaacaatagtgagtttaaagctcagtaaaaattatacatgtttggatggttagactcaattttgttagttaggcggcccttttgttatgttatattttgtatgtgtttgaaaaatagatttgaaattctaagatttgtaaactttatgtatatttagtaaagtttttatatattaccaaagtttttattaattacaattttatactaaatcatttaattagtaaaaattagcacaataattaagaaaacacaataacgtaccttagctagtaggacgttagacaagcaatttaagctttggacaagattgtaccttgccttcaaaatatagtcccgacacgacccatatttctatatgggcggctaggattataaaaaatatgggttggaccgaaccgatctgcccatatgtatagttatagtagtagcattacacaaatatgtagaatttaactatatctatagttattaggcaatattaactatatctatagttattaggcaatattggtgcccaaataccaccacaagatagtgccttgtagatagtaatattcacaacaaaacaagtgaggtctgatattgagctgatactattctcatgagagattaaagaaacattaattttttctttttaataacgaaacaaaagttagtttccattacatgttaaagctaataataattcaaaaaaaaaaaaaaaaaaacagacaa

SEQ ID NO: 378207 - DNA, 5178 bp, Cannabis indica
tttttttattttgagtttttgaagtaaaataaaataaattacatgcatatacgtcttgtgttttaacatagtttgaataagttttgtctttgttctatttgtttgcgtctagttatttgtcacatgacgtttgtgaatgtttctgatcaaaatatggatatgcattatgcaaaaaaatgactttatggatgagaatgatagaagattactcatcgatgatggagaaggaaaaatatagatgatcgatagtgtttagttggtcgtttctcactaaaagaagcatagactttcaggccatgcaacataaaatggcatcgttttggcaacctgagagaggtatgtatgctaaagaattgaatccaaatcattttctcttccaattctatcgtgaaatcgacattgaaagagttattgaagggagtccatggacctttgatcgtgtccctttaatctttgagcgtgtgaaactaggaataaactcgcaccaagtggtctgaataaactcaatatctggattcaactccacgatatgtcctcaggatttatgtccgagagcacgatttgtaatgtggtcaattatgtgggaaagtttgttaaatctgatcctaacaacttcactggtgtttggcaagactatcttccagtatgcacccctattaatattgaaaaacttttgaaaagaaagatgcaattggagaaaaagaatgggcaaacatgtttggttcagtttaagtatgaggacttgccaatatttttgctttatatgtggtgtcttaggccactcggaacgtttttgtgagtgtttgtttgatacaccaccataattaattcagaaacactatgatctctctttaaaagcagcaccacaaatatgacagcacactattgggggcccttggcttccggcaaccacaaatggtggttcaggttctgaggctgggttgactagtggaagattacagattaatggcgaggagctatcacaagaattggccacgaattcagttgatttttttggacaataatacaataattcatgtttattctaatcaagctattacaacacaatcaatagatggtgtagtaaatgctttaaaaggaaatgttatgattactaaaggaaattttgctttaattatctctaaagtcaaaaggagaagaactcaagtggaagggtatgatgttgggcttatggaagagcagcctatgaacggggactatggacagtttgggcctgggagtgttgggcttagtggtaagaacatcattgagggagatgatgatgtcattacggtatctaaagtgggcattaatctaacaaacttatatgggacgggttctgtttctcaggcctgccaagcattatgaatatcttgtgctagaattgttggggacttgggaaccaatggattgttcaattccttaattaggttatttctcataaaaaaaaaacccaattttgtcattttatgtaagaccaagtgtggtaaaaatagagtggaatgggtgggtcatttgttgggctttgagggtatctctgtggtcaaggtcaaaggacatagagggggtcttacaatgttatggaagaaggaaaatgatggtacgttgttgggcttttctcacaataatattgacatgagagtagttatgggagatggtgttaattggagacttacgggcctctatagagaacccaatcgaagccgtaggtcccaaacttggaatctcttgaagcttcttgctcgtgagtcgtctctcccacggtgtgtaataggtgatattaacaatgtgttgagtcaagatgataaataggaggtcatccttacccgagatgactttttgatggtttccaagaatgtctttcagaatgtagtttagaggatatggaactattagggaatcccttcacttgggaaaggagtcggagtactgatacatgggtggaaatttgtctgggcagggcattaatcacgaactctaggcctgcaatcttcctgggagcaaaactattgaacctcaaaacttcttggaaccaatggctgactaaaactttatccctgtcatcgtttttgctttgagaacgcttggttaaaagaaccaatgtgttttcaaatagtcaaggactgttgggaaaccaacaacaatatgggaatctcaaattcattgaaattatgtgcctcaactcttttgcaatgggggaaggagattattggaaatttcaaaagtagaattaaaaaatgtaaggaccagttgaagtttctcaaaggtaaacgtggcaatgactctaatcaactgtatgctgatgtgaaaaaaacatttatttgagattttagattaaaggaaaatattttggaagcaaagagccagataattttggctcaaaggaggagataaaaacaataagtacttccatttatgtgcaagtaaacgtaaaatgccataatcaaatatccaagcttaaggatgatcatgagaattgggtggattgggataatggtttatcctctgttatgggtaactatttttcctctatttttgttgcctcaaacaccacctgtcaagaagttattgatagtataacaagtgtaatcccttatttggcaaacatggagtttttgagacctgttttagaggaggaagtcaagaaagcagtcttccaaatgcatcttgataaaagcctagggccagacggtatgaccccgacattttaccaaaagtgttggaccattgtcaaaaaggatgtggtgtggctgttgcaacatttttttttgagcccggttcctttgggaatgggtgtggggatgcaaatgtggtcctaattccaaagaagaaaaacccacaatatatgaaggatttgagaccaatttctccttgtaatgtcttatacaaagtggtgactaaggtaataataaatagaatgaagcccttcatggatttgatcattttagactcacaaagtgccttcactttgggacgtctaatctctgataacgtgatggtttccttcgaagtactacattatttgaatgtcctttttggaagctatgttgtgcaagatgggtttctctgagcattggatccacctgattatggtttgtgtttctacaaccaagtataaactcgttcatggtaaccatgaggtggggccaatttttccaacccggggaattagacaaggtgatccgctgtcgccatacttaataattatttatgtggagggtctttcagtcttacttcaaaagtatgagcataataggtggattcatgcgtgtgaggtagctaatgaagctctaagagtttctcacatgctcttcacagatgatagttatctctattgcaaagccacaactcaagaaactccatgaattcaagaattattgaggaagtttgaaatggattcaaatcaaaaagttgattttgtaaaattgtcgatcttctttagcactaatactgatgctattttgtaaaatcatatttgttacattcttgaaatggctgctgctgaggaggggagcttttatctgggtcttccaagcactatgactcgaaacaagtctgtagtgctagaatatctttggaaaaaagtcaggaatcgattgaagacttgggaaggaaaattcctctcaaaaggtggtaaagaagttctcattaaatctctggtacaagctcttcctagttacggaatgaacattttttgttacctttagagattagtagagacattgagcaactgataataaagtttcggtggtaatcctctaaaggtgatcgtgaagggattcattggttggcttggaaaagactatgtaagcacaaaagaggaggtggaatgggttttaacatatctcttttaggcaagcaaggttggaggctcttaacaagagcaaattccttatcttcgagagtgtttaaggctcaatattacctaaatggtaactttttgaatgctcaaatcggatctaattctagtttcatttggagaagtattttagaaacccaaagcttagtgcggaaaggtgtttgctggttttctggtgatggctgtaacatcctagttcttggggagtcgtggcttcctgatgtggagaacgcacaggctgtatcatatcatcttggccttgttaatactcgggtctacaatttaatgaaataaaaggagctcggtcgagatgacgatctgctacacgatctctttattgaaagaggttggaagctaattaaaagtataccattgctgttggtttcagcatggaatcattatatttggtcaaaggaaaatgcaggcatttactcagtcaagagtgcctataccttacactagagattaaaaggacaatggtgtggagatgttgattcaaatttctggcccattttatggagtttaaaactgccttctaagattcagaacatgttttgtcatgcctgtacaacttttctttctacaatggttcagttacgaaccaagcatgttttggttagcccttcttgacctctttgccgagaagaagatgaatcaattctacatgttttagtcacctatcaagtgattaaaaaatgttgggaaagggtgggcataggtactgctatatctgcaggaagcttgttctttgaatggtgcacgtgttgggattttatgccctaaataaaacctatttcagtgtaatcttatttgttattaattaaaaattagaagtcatttatgtttacatgtattattcatgtttattgtttaatatacaatttttgttaaatctagaacatatagttattcacaattacagtgatgtcaatacagtggaagataattgtgattacatgcttcaaaattttatgtcccatgattcattagtgtactggatttacactaatgtgatagtcaacgataaagtttatttacaccatggataagtgttatgttctttccaggacattgacaaagtatgctagtatcggatgatggagtatacattggactgtgacggatattgatcttagtaaagatattataatcttaccattgtatctttcaaagtcaatatcattgattgatcttagtaaaggtgttcggttatctctctggtgataatgaaattgaactctccgacaccatgcatatgtctcaactcacctatcaacatgctgctctcatgaggtttgccctatccaattggtttcctt

SEQ ID NO: 378208 - DNA, 3128 bp, Cannabis indica
caaaaaaaaaaaaaaaaactgcatggatgcatgcaactgaatttattatatcataaattactttgagtttttaaaaaatagatagaattcctgctataactataatgtcaaccgtaatacaaaaaaattgggtcaaaacttctcctaatataacgaagacataagttcctactggtagagacaaaagtagtgctcctactatagctggctagttgactgttatatatatttaatagattgttacttgtaaggacatctctatttttattatttaaagaaattataactaattttttttacgacgatgtacattatatttattgtagctattttcaaaatattttttaaataatatatataatattaaaaataggattcaaaacaaataataaacacgaaactagatggttaaattctatatgcaatactttgaattatttaaaaaaaaaatagaaaatttgtaaatttattatatgacaaaaattcacatcatcatataaaaaattgatttataaagtgctgaaaaataaaatatatttctacggataggagaaaaatagtgcagtacttacacaattttttatatatatatacatacatagaaaaaatttatagtagagagatcacttttatcttcattagtaagaaatatatttatttttagcacttataaaaattataagtgaaattttatttatgattgtgtatttgaaaaatttaaaattatttacatcatccaaaacaaatttaaacatttagctgcacgtgtgtttaaaaaaaacaaatacatatatatgaaactaaatctttgaactatattttttataacataatttattgataattttttttaacaaaaaaaagaataaaatactataactataataaagagtgtcatataaaaaataatttataatttcttaaacggtcaaaaatatagatgtcccggcctactcatagggaggaaagtagtgttgctactataaattatagagtattgctatagatatcaatgttgcctaggacaatctgaatgtgttctaaaaactattatattaaaatatatgagacgtgatacttagttagaccaatgataatattttacataggaatgtactataggtactactagtatcatttaccatttctcatactagtatgtaactctcaagattaatccttaggccatatatagcataatagcaaggtagtttcttaaacactgcttgcttgatatttggacaagcaatccttacagatatgtatacgttctacatctaatttattaacaacttttttggtggtcccgtcttacaataaagtagctcccttttctcaccacacatgtctcttcttaacgagtcctcttcatagtcgacctatcaccgattaagaaattttaattttcacaagctaataatatcaaactttcaaaggtttctctattatagagtgcctctctctctctctctctatatatatatattatcatcagtaaatatatacattcatatacacagacaaagagaaagaaagagagagcatatattatatatacatctaattatagaccatctattatcaattcattatcaagtgatataattagttgccctaaaactcagcacaagctcatatataagtcattggtatatatataaatattaaaatgaagaaaacatatttggctgtaattctgatacaagccatctatgctgggatgaacttgctctccaaggcggctttcgatggaggcatgaacaacttcatcttcgttttctacaggcaagcagcagccactgcttgcttagtccccgttgctctcctcctcgaatggtaatacttcttttttttttgttttacattttttctggtacatctcaaaatccaattaaggattctgtattatattatacatataaagaatcattttgtatattaaattatttctgtcaaattcgttgattacttactacactgctaagtgtattaacacaaaccctttttgttttgtttttttacaggaaaactgcaccgccgctacctttccgtaccttctgcaagattttccttctttcattatttgggtatgtacaaaaatgattttaatcaactaattctgttgttaattcaaccatttttgtaaaatagtatatagttttttctttgtttatctctcagaatcatctatatatgtttgttgcatttaattcgatcgactgtagctgttgtatttttgcttcctttcttaaattcgaatataagctgaaaagttttaaaccacgtgcttaaattgaatatatgaacggtactgtgtatgtatcaggggaaaataaatatctgtcaaaggattataaagaaagggaataatagcgcatactttattatattattatcaataatatcacgagtcatgacatacccaaacatgaagaaactacgtaattattatacacacagtatatttgtacattagtgtttagtgtagtgttcgagtatatctatatataatatttgactaatattatgtagtttaaaaaaagagaatgatccaaaatgtatacgatccaattattaatatttttggggccatattttttgttttgtaggataacgttaagcttggatatatatggcattgctcttatttatacctctgctactctggctgctgcaaccactaattgcctccctgttatcactttcttcttggcacttctactcaggtaattgttttaacatgtaaataattaattttatacgtataatgtttatatgtataagctagtaaataaaatatataatgtaaatacgggggagattattaattttcttgtatatataaataaaaacaatgagtactgtatattaattctaaatactttttatatgatgttacaagagacatctcactaatttttagaaattctaactaaattatattgcataaagacagagctctaaaataattaaccgtatgtgtataagaacataatatacacccatctattggattatttgaaacatatatttactacagtaaattatttaattttttgtggcgtttgattagaaggaatgaaaatataggaataagaatgagaatgagaatatgaataggaatggaa

SEQ ID NO: 378209 - DNA, 1856 bp, Cannabis indica
acaagaatgacctaccgaatgacctgttgagtatcggccaactcttgtagaccatcagtggatgcattcttcacaaccttttccaccatgagcataaaattagtaatgtcatataaatcaaatttatgttagtaaagctgagattagaagaatgaatggcttgattatattctataattggatgaagtatgatgaacacacttacgactttcgtactacaacccttggattctatgtctaactgtttattgctcgtttcagatgttcttgaggtatttccaatttcaggcataatccacatcctgctacaactccaaaattatattgcataaagttggttatgaatcagcaacaatatcttatggtaataaagtgaaaatgatacagttaaacaggaaataacagaattttgaacatcgctgttcacatagcacgatccattaatgataattaattacttccaacaccagttctacatgataaactttctagcaattatattataagggggaatgaataattaggattttcagattttcatttcccccttatatataacggggattgaaagttctgatatactaagccataactaaaatttgactgaagaattaagaatggaaactttcattacaatgccagacaaaaccatattacaaaattcacaagaaacaccccaactgagagcataaatctctcaaatatgaaaaattatatgagcccattaaagaaaagtacctattggtgaagaacattcctgcacaaaagctgccaaagcaaagcaaaagagcccaattccttctcataacatttcttttagctaaatcaccggtagcccctcctttgctcctcaccgacattttgttccctagtatttccttgggaaacagaacagcaagaaactaaaatcaaaggattgaaagagtcgcatgtatatatgtacacatatagaaccaagaaacagacttagattcacaaatggtctagtttccatacctgctcagcatcaactctctcttcttaaaaaatgaaaaataataaacaaagtgttgtagttgcgtagaagaagacccatcaaccgctttcacagatgaaagcaccataaaaatgtagaagaatgaacggtacgctactgtcactcaccacagcgcagcactcacagacacagtgaccggcaaaatctgacccaagctccatcattgacccaaatccattaaccaagacgaacccacttatttgcttttacttctcagtcgaaccaagtgaaaaaaaagcttgcattaactctacctatcacttcatctaaagaagaattaaacccagaccattaaagatgagatttttatgagcatttcttcctttttcatcagaatatcatatggtatatttactaggaaatttctgatgaggtatattaacgttttcaactgctaaatccaggaattacaaggtttggtcgtttttattgcgagaggagttaagtcattttcttcataaacaatttttggtcgtcgttgtcaagtttagatcaacggttcgtgtgtccttgtcttcttgtttagtttttgccaattaatgtgtttttttttttttttttatttttatttattttttttttataaaataataataataaaattactaaaaattctataatgcactctcttaaaagtgagtatcccaaataattttttagttaaattttttctcatagtcatgtaaattatatattttttagggtgattctataatgcaccattagaagggatgtactgatgcacccttaacttgtttcggcatccagaaaaaaaatttagtataatttttttttcatattcatgtatgttatagttatt

SEQ ID NO: 378210 - DNA, 2178 bp, Cannabis indica
attccaattgatatattttaggggtatttttaactacacttataaattaaggggcatcatagtatagtgtcataagtacaaggactaaaaaagctaattattcttgattaaattcaagtattagtactaataaatttaatttaaaatatcaaaattattacatttgtataatcactcacaattacattaaaatcaccatgaattccaaaaaacaaaacatatattccaatcagccacaaaaagcacaactataatactgtccctttacttgctatcctcattgacagtgtgtagctcaaaataaagagatgtctagtctagagcatcaccatttttggtagtgaagatcaattttaatgagcaacctaaaatcatgtcaacattatttaatgtggtcccagtaataagttttgtaattatgtgaaattcgaacaaagctactatatatatatatatatattaataaattttttttaaaaaaaaaaaaacgaaaaaaagaaagaagcttcgaaaagttcatgagttctcctaaaaaaaagtacacaattaattggctgcaaaaaaaatatattttttcttattcatggaaagaatatcacagtttgattgagacagttttttggaacaaaatgcttatcattaaacaatgcttctgatcatttgtcttttgtgtagagttgaattgatctggattttgtacgaggcttatttgattaaatatgtaaagggagtagtctcttattacagtttttaaatcaacttgctgctccaaaacacatgttaattaaagatttcttttcaaaaaaattacacggaagtgttcataattagatacaacactttggcttatttgattaaatatgtaaaaaataaacatgtatattattttttttttctattttcttcttcttttctaatacagtaatacttatcaagtttacttgactaatatggattactggataaaggttgtggtccgacaccatgttaatatagtgggtcacgtacttaattggtcatgatgagtcatgtgagaggaaaataacgaccaaaaggcttgagcttcttgacccattaaagctcccatgtggatgtattatgggtcctcaactcctccttagtccttaattaaccagaactaactccatttttccatggttaattaactgaagatggcaaaataaaaggtccctcctcattgggtcccagaaaaaagaaacacacttttttcctacgcatcgttttttttatgtaaatttgtttggtgacaacatttgagatttttatttttttttgaatgagcatttgagatttttattaagaaagagaatatataaatattcatatatatctaccaaaccatccacgtaagccaccgccaatgtgaaattactttttcatccatgtgagcattattattttattagattaaaaagtgtaagattggatcttaaaatgcaattgagtcttattcaacacaccagtagtgtctagtacctttagacatatcacctaacaattagttagtgattattttttaaaagttaatatattaaattatattggactcgatacttaattgaactaataacaatattaatacattaaaaaatactagacactactaatacttttagcatttctcaataataatatatcatttttttgtagtgtttacaattataaatgcacataaattaattctgcatgatttaagggtggatagaaaatgtgtgagatgagattttattagggattcttaacttgttaggtttaagagcatttctaatggtacatcattttattagattgatgaaaaatcttcaaattgttttactccaaagacatatcaaattatgcaccaaataagtttttttccttttattctttcttagcattgttgattttatcgttttggggttacgtctcttgtggtagtttgcctttaagtttgactcataattttcattgtggtgttttctggtttgttatgtcttcaggaagtatctctgttttacaagcggagaccttggcacttttgtttggacttaattgggctctttcatgcggaatccaaattaaagaggttttttccgattctctgtctctagtcacaactataaacaaaggaaaggtttttttcaacgagctgggtgtgctttttgaggatgtcatagc

SEQ ID NO: 378211 - DNA, 4247 bp, Cannabis indica
aatggttgtttctatttgtctaaataatttgatacataagtggtatgaaatttttttaacatgtcttagatttagattatgttatcccaaaatacattaataatttattttgttgtataattggtaaagagaatataatatcaataatatttcacacagattggtatcctcattcatttttccacatataatatttcattggaacattttgtatttctaaaagattggcattggcactagtttgcttgacttgtataaaaagattatgaaatgtaagaaagaagcattattagctgaatatccacataatgtcaaacttgaaaataaattttgaaagcaagttcaaagaaggtttccaatggttttgttattcagttagagaccatactctcagtctctttcacaaagccatctccagtccaatccttatcagactgcagccctttcttaatggcctttctctgcttgatcgcctcttgctgcctctttaccaaatcggtgtgagtagtaaagtatggaagtgaagccctgtgaaattggcaaaacagattaagaaccaagaaataacagtaggattattatgcataagaattcttagctgcatgaattgtgcctaccctctaaaatcttcgatcgatgagaaattgtgctttctcatgaagtctttcagctcgtcacaaagtttcttcacaaggccatatccatgcatcataaccccggtacagacctacagccaacattcaacgaaactttggtataaaaatatggtatcgattagaacaaaattatctccaaccatctttgactcctttactttactttcactagtcttagtacaaagaaatgtataaaacaaaaattacttgatcaaactcaattggaaaatgttaaaagatttttccttgtacctgaacagaatttgctccaagaagaataaattcagcagcatcaccaccggtctcaacaccaccaataccggaaagagagtaatctttgtcaccgaattctgccttcatcatttttgcaatgttcatcacttttgcaagcgcaatagggtgtactgctttggaagaatatcccccgggagttgagtacctgacgaaaaattaggcatataaacttctgcaataccagatgagaaaacttaaaacaattataagtatagagaagtattagattcaaacccctcaacacatggttcgggacgtaagctatcaagattgattcccattacactcatgattgtgttgattgctgctacgccttcacatccagagcgcagagaaattctcgccggctgcagaagatttagacaattgatatttagctattgggtacataaattatcaaactactttctaaataacaaacatttcgagatttgaaaagtatagaatacaattagggagatttggtaaaaacatctctatttaatttagattcttattatttgttctgaataagaacagaacaagatgaaaatagtaagtaacaaacaattttcttccaccatatccagattttctttaaattgaaaatagatctacacagtaacactaacaaataattattcatcacatacttgaataattgacccctaaattttttgaaatatattattgtacagggaacaggaatttctcatagcaatgataagaaaagcacaacaaaaacattaactctcaattcaaactatgatgttttgataactataaaatatgagagaaaaggtacaaaaagaggtaaaacaaagaccactatgatctttatggagcacattatctgttagaatttgggataaggtgaatggggttccatctcaaaactaattgacaataagaggagtagccctttcctgttatatattctattatctttctacacattagtgatatgggactatctaacattatctgcttttatactagattgaattcaagattagctgacctgaaattttttacaagaagggataacttaatgaaaaacaaaagtttacctctgtaatatctgtgatgttaggagtcatctttgcccaaacaggaattgtagctttcgcgttaatccaaccacaaacctcttccaatagcgcacaatcttgaccgactgcagcccccattttgcgctcgggcataccatgagggcacgaaaagttgatttcaaaggcatcctaaagtcataacagaatgttagatagaaaaatctcattttcaaagaacatagtaaaagttctgtaacattatagcttacaactccagtttgctccactcgatcaataagttcctcccacgcagctttattatattcctccataattgaagcaataagaattctatctggatattcctcctttagctgcttgaattcctttaacattgtttccaagggccgatcactaatcaattcaatgttctgccatccaataatttgtcccttggtagagccatttgcaccagctcgtaatcgagcatagcgaggagtgacatttataacttttgctgcatctagtgacacctatcaaaatcaaagaatgaacaataaccatcaaaacaaaaaacaaaaacttagctctactgtgactctaacatattttacagcaagtaaaagatattccatgctgctatttgtaatgacaagaaaaccttatcattacaatacaaaacaataatataagatcttattttcaatgtacaaagattactgcaaaatattacaatgtgtcaatcatagggtgtttacaaactgccagcagtaatcaaaagtaagaaaactaaaattcatgtgcaaatcataatgatttaccatagaaacgattcatcattgcaaactttctaatctaacaaatgattcaccgcagaactgattaattagccctcaaaatcaatagcagaaggcaattgggacccaaaatcatactaactgggacctcccttaaaacaagtaaataattaaagtctaattagccactttcccagaaagttaaagcagcaaaatttgatcaatttctctctctttatctagattttcacagcagccaaaaagggtataatcaaggatcaaacccaaaagaaaaaatgaaaaataaaactcacagtcttagcaatcactgcaccccatccttcatcaaaggccctcttcatgacggtgtagttagtcccgggtggacccgacccgataacaaacggattaggcatatgcaacccatttacagtcacactaagatcaggctctttctgggtctcagaagcaaaaactctaaacccaactctatttgagcaggccaaaccagtttttggacgagttctggcgaaatcagcaactgggtttttgaatttgacatgagtgaagcttagagacgccatggatcatacagtgttgaaaattttgagtcctccgcaaataaatctgacgttattaaaagaagaagaagaagaaaggaaacaataattgaatcttacgttaaaagtattaaaagagatcggaagagaacgtggattcagaggaatcgtttgtatttggattgatttgggcagctggaaatggatgaattattttaataatttttgaagtgattccatgttacatttgacactaccccacgaaatataaaaatgtcaactttgaagagttttgttttgttcatcaaaaaaaaagaaactttcaagagtttttatttgacaaacagttttattagtagaaaaactagccataatattcatcgtcatcttctacttcttgttatgaaaactcaaagttttgactttggtaaattaaatcacatatacatttttttttaacaaaaattacatgtacatttttatgtgtgttagtatgatcaatcaaagtttaactctttttcatgcaaaacaaaagctcaaactctttaacttgaacacaactatatgtttttttttttttgattaaacacaactatatgttaatttaattggtattattatgatatttgttggtggtctagtgagtaggcttatccactacacatcaatattattatatataggaatttcttatgggctactcaaaattttataataggatcattttcatttttggtatctacaaaaattataacacaatctttttttatacaattatatgagttattttaagtgtggcctacttacaacttttttttcaaaacattaatgcttaaaatatcaaaaataattgctataactacaatatacttagtccttcgtataaaaaaattattatttttctatata

SEQ ID NO: 378212 - DNA, 2463 bp, Cannabis indica
atataagaaatgaaattaacggaatgaatatagcaagcaagattctgttaagtcattaatgacatgggatgttcttattggttggaaatagacagaaaattttaagagatcatctgcgtcccaatgaattatgaaaaatgttctcaatcatgtactataaagaatattatttaatggtttaggtaaatgtacagctaccttttctcaaataaataaatagataaatgtacaattacccaaaagatttcccatatctaaaataatttgaatagtaaattttatctacaaattaaattaataaacaatatgtgcatgggaacgcacattattattaaataatgacatgtgcataatgctatggatagctacttaatttattaatataattggcttcttggtagatgagatcaatatcatctcaactatataaaatcccacctccgctagctaactccatacacaagctattacatcaataaaggttcattaattaggttggagaagaaatatcaaaggtgttgatatagtgaagactaaaatgagtatgatgaatattattgtggtgatagtgagtgctgctttgatgatttcggtttgcaatagtgcgatgagtaatgaggatggaaaagtgatgggaaagcgaatggagcacgaggaatgtttgaagaaagtgagtgagcttttccatttcgacgatgtggagacccatcaagtttgcagcctggccgaggacgatagggttagcaccaatgtcgaaacttgcatcaaacaggtgcttgagaatctacccaacccagctgaatactatgagtctgtcaaaaagtcatgcactgctgtacatgatctatttacctctgcctcggtggaaactagctgatccatcagattggtcattattcatgatcttctattgcgttgtatctgtttatgttaattttccttgttgtaatgtggttgagattgcgctaataaaaacattacatttctttttctttagttcattccatatatcccatcctatatataatagggctatttacaaaaatatgagaaatggaagataagttttgatatatatggcatcaaaacttaattataccaaatatgtatttttttatttgcagcttttttattttcttgcctcctctagatggaattaaggctgaaaaatatacaacattaaatcaatgctctcaaggagcccacttcctggaagtttatagagatttgctctgaattaccctacacttgcgttgttttcattgccacgtaatggattctcaggatcagtaatcttttcgaagactctatacagttatctcccaatgacattagtttcacctcaatccgggtgaggtgatgaccacaagaacaaaccaagtgctcttaggaaagatcattaacagatgcaagtttggaaaagctgcaatacaaggctcattgaacctctcttggaaggcagttaaaggctggaaatggaaggaaatagaggatggccttctccaattcacattcgccagaagggaagatgcaacgaacgtcctagcccgcaagccctggttcggtgcggtgcgctcatggtgctcatgcccttgcccgcctggctcacaccagcagaggtccgttttgacaaaactccgttgtgggttaatgtggagagtataccacccttctactggaacctttctaatcttcaggagatggctgccaaggcctcaccggtccacgaactacccgcaggaattgaagatgctgtgggatcaagtaccctgagattcagagcaaccattgacatcaataaacctattttctgtggcttcttccttcggcgacaaaaacggaaggatctttggatccaatatagatacgagaaactcccaaaactctgctttcaaatgtggtgtgctctcacatggacagagttcatgctttaaagctcctaccgtcgttaaagacagtctaggcaatttctacccgttatatggaacttggctatggaatgatgtcaaagaaaaatccacgttcaccacccccttagctaaatggttccaagattgggttttgcagaagagattagggaaggaccctgttctacgcaaccaagttaaagtccaaaaagccattcgaaatggggaggaggcggagatgcgtgaatgcagaatgcaactcccgtaaaagcgaagaatagtggccgagtccgatgaagaacatgatgggaaagagccggcaatggtcattacccaactgcctatggtttatcttcgggtataggcgaaatattcccttttggacaaaactcaaagcaagtcaatgtccaggagcttattgatgctgcaacaccctctgaaggcaaaaagacaaagatgtttaccataaagggttccaactcaaaaggcaataatctcctcacaaagcaagacaatgatattgcaatgataaaagaggatcttaccatttctgtgg

SEQ ID NO: 378213 - DNA, 4736 bp, Cannabis indica
ttgtcttcatcatcctctgttctccttcatcactagtataattctttttttgatacatttcttttttatctatattttagaaaatattaatatctaactgttctttattaaaaaagaaaaaataattaaaataaatgagtagataacaagcaagtagcttatgctagagagttctgtttgaggggaaagtaagatagggtcgtatgtcctttagttggattcaaaaagtagtactattttctttgaaattatatataatgatcacttctgtagtggcctttttaaaacagcgtatacttacttcaatatattatcttggtctagtatacgcaacatataggtttgtatcaattttgacttgtgaaagtgaagtgatagttttatactgctttttataataggctgctttttatacttcttcaatatcaatttgatttatctctttcaaacttaacgaaaaagacagatgatattaaaagggaacaaaataatcggacgtcataataattaattaagcaaatgctacaggtgagataacgatgaaatctcatattagtattgagtttgaccacgaggtaggtacagatcatgtatataatataataatttttaggttcttcacaagtttaacttgatctagatgcttgtagttgtacttgaataagaagaaaaaaacagtttcatattagaaataatattatattatccttagacacgacacatgtttgagtggttctcatgtgctctggcacacacacatatagctagagatgaatgcatgaaccactagctataagagttaggaggcccttatttaattcttttatgtggtccaatttcaaaatttttatatatttaaaacatgacaataagcctatttgcccctaccacaaactctatgatcacttttcttcagctaatttgagatgaagaaaaagaaaatattaaggtatatatattatataccacaatgtgggcatattgagatggtagcatattactatgatggaactactccactaattaaagtattcaaacttaacaaggttattttaatttcaacttataaagagataagattcaagatataaaacattacgtgttgaagttgtgtgtatgggggttggctcaagaggccatacatgatattgatgagcgtgactaattaaggtgttagaacatgctttttaggtggaaaatttagtaaggcctaggcgtcatttttctatttgttgatttgcactgcaattgactattttggttgtctctcctttttgcctgtttgtcttttttccttgggtctatctgaagaatagtatataaatacaaatggtgatgtattgcattatcatcacattcttatgcggaagttattatcttcacaatttacgaagtcttaggccttcatgaacattcatgatttatttcactttttgtcttgattagtgagacaatatattattccagaattttagcattcacttaactaattttgagatatttagttagagatcatctttcactgctaatttcaaggtttattgttggagaagttagaaatatattgttaattcttatactgtatggatgtattagtgaagattgtttagattattggaaaatttagtcatttagatgagtaattgcatggaaaggaataaatctgagtatgtttgtgaaatgcacattagtttgtgtcactcatgtattaaaagacataggaaaattaggaaaagtgatgatgacgtgcaatgggcctaagcgcgcggcttgaggttacatatttctgccaaaagaagacttgaaaagataaaagttgtgtcattaactaattaaagggtacacttttttcagtatcttgtgtgatattcaagtcataaaaactttatttcacattcatgaatattccactattgatgttttgaatcaatgaaaccaatggaaactcattactcttgactttttgcttttcatcttatgctcatgttttgtgcccacgctatacattggttcaccaaattaaaagcaaataataggataagatagttatcacttgaataattatgtcttaccttcgttcaccttatcttcgtatttgagggaaagaaacagatgaatgaacgaaagtagaatatagttaaattttactactcaacgaagatgcattgttacaatgatgggcactagcattaaactatagagtttgtaatcttttgcacctaattccgttctaatgaatgggtgtcttagtttctttttcattttgagaagtgttatacaatgataggtaggttttaagagtgaattgttcattctaacataggattccttggtcattctaactcagtaatagtaatgaaatcagatttttaccatttgctatgagaaattgtgttccctttcttccaagcttttaaaaattaagtatgatcatctgtttaattacaatttacaagcaagctcgtatagttagatggagggcagcttaatcaagattctaattccattgcgtgatttgttttacactgagactttaacagttttagaccataaggccaatattcttgatcagcgttcagggaaaaaacaatactgaattaacaagaaaaggagatccctacaagcaaaataacactattggctttggaatatcattagcatttttagtagatacaattgctaatatatgttacaaatattttatacttttcaggggcaggaatatttggccacctctcagactctttccttggaagaaaaggctcactaaccatagtttgtttactaaatgccatctttggttgcataacagcactcactccagactacatcacctacctcctcctccgcttcctcactggctttagcactggcggtgttggcctttgcgcctttgtcctagccacagaaccgataggcccctctaggcgtggcgtagcaggaatgtccactttctacttcttctcaactgggatagccttactttccctcatagcttacgttttcccaacatggcgtgctctttatattgcttcctccattccttccctcatttttctagttttagtcatccctttcatatcagaatccccaaggtggtacttagtgagaggaaaagtcaacgaagctatgacgatcatgaactcaatagctaagtcaaatggaaaggaactaccagaaggaataactctaggattagatgatgaatcaaacactaaaagtatatcagaaagtgttaaccccacttcgaataacggagtatctggttctttagtcgacgttgttcgatctcctgtaactagagttcgtctatttttggctgtagccataaatttcctctgttctgtcgtttactatggcttgagcttaaatgttgtgaacttagatactaatctctacatgaccgtggttctaaacgccgtagccgagatgccagcttttacgatcacagccattttgttggacaagttcgggaggaagccattggcaatagggacactctggtttagtggattgttctgctttttagggagtttggtgagaaatgacgtcgttggggtgtggaaagtgttaagaatgatatgtggagtgttgggaatttttgggatggcagggacatataatcttttgttcatctacacggctgagcttttccccactgttgttaggaatgcagcgcttgggtgtgcaactcaggcttcacagatgggtgcgattttggcaccgtttgttgtcgttttgggaggtgcattgccgtttgtggtgtttgccatatgtgggattgttggggggattcatgcgttttatcttccggagacgttgaataagccattatacgacaccatggatgggatggagagtggagaaaaagatcgtgatcttttaattagtgtttgaaaatgaagaggttatcgtcttgttttatacatcataagttttttttaataaatcaatatatttatttatgtagaagtttcttattaaatgtgtagcctttttttttttctttatttctatggatggaaattctacctgtagggatgagttccatgcaacaaataacttagggtgggcaatttttttaaaactttaggaagggcgtagatgaaaaataaaattttaggtggacttaagtataaaataattatttaaaattaaaaaaaaaaaaaaattgtcattttttagggtgggcaattgcactccctcactatagtgtaggtctgtcattgatcccatgcatacccgatcttattaggatggagattccccacttaaatggggaatagagcgagaatggtggcaatttctcatctctgagtgtcaaatggggtaggactaacatagcacttttcgcccaaaagagaccttgattaattttatttattttgttatagtatttttcttaataaatatttttctttatgaacttttattacttatcagtattttttagacaattttattttattttaaataatctctcgtattttaaattattattattattaagataaatactatttatctagtttttcggcaactaagtattttcttagagcttaagaaagtgatgtcagaataaatagcaaaataacaaataaattttacgtggttcaagcgttaattatccttagtccacgagtccattatatctctatttgtataaacaattcccagtcgatgagcctaataaaaataaatgttatccatatttttgtaatcatgacacgtggatt

SEQ ID NO: 378214 - DNA, 6055 bp, Cannabis indica
atactatgtggaatgaaattcgtacgtctcaaatgaaagatgtagcacatgtatcatcatcactgtaaccaaccaaccaacctttaattattatttactatttttaagttcatagtagcaagaaaaacaaaaagttggaaaatataatttacagtagtccggtgtaaagactgagctttttcttttacacgaaaagcccttcacccatgatattttcagcttttaatagcatatttctcactaaaagcatcgataccccccaaaggcattattcatattgagcaaaacataagtgaactaattgcaaattaaagtgagacataattacaacatacacaaatgatagacaagacgatctgccttgaaattgaatttaaaacactaccattttaaattttaaggatatatatttaattgaaagttcaatcacttgttatcacttatcacaaacaaccaagaggtccaaaagagatttttatagaatagacataacatatagcattttcccagaatcaatcatctcctgaaatgataccataaaaacgattaactctgcacagattcagcaaacaccaacttaagcaactataaaacacaatcaccatggtaaatgaaaaatgtgtgtggagcaaaaatttgaggttactactagaaatgtgctacatcagaacattgcaagatcaagaaaagctgggagccaaaatttgaccgccactctgctttatgtatatataaatatctataatactaatatgagcctaagagaaaattaacaaaacacatacagatgctttttttttttcttttgggtaaagatttgaacaatccaacctccattattggcagggttgaagacatgattttgggtccaattgtatattaagttgaagcattaaaaccagtatgggcaccaacattgagattcctaggatatagtgtgtgtgcgaacagttaaatatctacaaaagggaaactgatctgcagccacccataacaaatttacggaacaacaccttgacgacccgaacgaattcccttcaagatacaattgatacagcaaagaggtgggggtcggagactaggaacaacatcaaatcactcacttaccacccatccccaagaagcacacaagttagatgatgacctcaggagttagcaaatgctcatcctcaaatcactgaaaaataaacgattcaggcatatcaactaataataaaaacattaaaaggaaaaagtattggtttatgatgaaagactaaacgggccacaaatataagctgaaaaacctttggatgtacaagaaagatatgaatgtgcatgattcagcaatattaaaaattagcctgcagttgagttcaaaataaagtatattaaccagagaagaaagaacgaaaaaaatggtcttcatttgctattacacgtcaacaaaaatattaattgcttgaattgtctcggctcattaacttccttctagaattctctttaaccatttctcttatctgttctatattctttctatccataaatttctatgttgaatctagggccaaagatagagttgtatgtattcccctatacaaaatttacaatcacagataggcaggaagtcaattgttattcatctgaatgaaccaataactaaaaagacagttctgcggtgtgttgagccaaagataaatccaatcaaggagaacagtaaaaaatgctccgtatgatcttatataattcgactggaggcatttgcaagaggttgacagcagattcaatcaaatattaaatccacagtcttgcacactacagtaagaatttacatataagcaacttacaagtttcttttgtcaccagaatcactaacacacgaccctactgctgccatggcgattgcttgaagccatcccaccctccctcgggctctttcctcttcaaagtgccacctggcatctggaacatcctcatttgctcatccaatgggagttgtgaactggcaacagacagctgctttggcgcaagatgaaaagattcatctctaccctctatttctgggcctccaggcccagcattaagatctaaaccctgccttccccattttctactgctctcaccactactgttattgctaccatccgggagactaataacaaaaggccttgggtagttggaagaaaccccaccagcagaggttcccaacaactgtggatgcactgctgggaagcaaacccttccaccagaagatgagtccaagtatgttgtaggacctccagcaaaagtgcttgggggcatcgagaaactggttccatatgaaaaaactggatattgaaatgaggtagaaggaaaaggcattgctggtgaagctgacaagacagatcctcgataaacgtcaggagtaaatggattgccaccaccggggggacccatcatcctctgtggtccaccagctgcaacaattgggaaaggctgctcccctcgatcaggaataacagagggaatggtaacagctgagtaagtgttgttccctgtatgaaaccatgatgagaagttccctgcttccgtattgttcatcctaaaaccagaaacagatggttgagatagaacactactcctggcttgttgaataaaatgtgcaggttcagaactcatctcatccacagaaggcccatcattcaaatcaaaatccctccgaacacctacatccccacctaaagtacccctagatgaagaattgactagcatacttggaatctcagttcgacgactattgttgattgtgaaactgcccatatctaaagtctcatcagcctggttcaaatcaagatcaagtcctcctgaactacgaaaaggtgctgcacttgtggattgatcacaagcccgaccacttttactcattgcattggaagtcgaacttgtctcatgtgaagaataccgagatgtcatatcctctaaaagtctttcatcaggtacatttaagtcaatatccagaggagggcgtccttgcttcccagaagtggattcagcatgtgagatgttcactgcaccaacaggcatatctacaacttttctcggttcagccggacgaaatgcacttgtagctgctgaacccttccaaccaagtacccctttgctccgtaataggtcctcaggtggaagaaaaggaccttttgctgcagccgtcacagttacggaagaaggaaggggactgacatagaagtaactggaaaaaggcaatggactaatcagatgaccagtaggtgaacatccaggtgctgagatttttacatctccaattttcccatcgtcagcattaaatccttcattcaaatcaaattccaccttcgcatctgaacctgaaaccccaacagaagagatagaagaaacatcagccgcacattttgatgcacactccccagcttcattggtttccattcgagtcaacttagaatccctggacctcaaaagttgttctgcctcatgcgcatcacatgcagatggcaatatgttagaaacctgctcgccaccaccgcattgttctacctctttacttttgaggtcatgctccaaagagttgctactttgttgagttacactacttacgccacctacagcccgattctctgaggttgtaagagagttaccttctggctcatttctttgatttacagactcattaacatgaggcataattcccataatatcacgcttctcggactttatttcacatgctttttctgaaaccaaatcttttccatgatcagaaggcaatattacttcacaagccccatttacaaggtcggattgcatcactgaaacggcctgcttttcatctgtcttatcaatactgtctgtttcttcattcttaaggttcaccttgacatcagttgccaatgatgagtgtggagacaatcttcctagattttctgtctttaattcattcattgtgcctgcttctgtgatcttattttcatttaacaaaggatcacttacattgtgtttaacatctaaaatgccctcagtttttactcccccttcaactgacttcccaccagttggtttgcctccttccctgtctgcagctttatcacttaccctcgaaggagagatcacaggagaagctaaactaacatcgttacactttcctttgctatcttcaatgccttcagcttgcttaaaatccttactgggagatcctacacgtacagtgtgctcagacgtaggtgtatggtcagacagaaatgctgttttatcttctttacccttagccataagattatcagattcactagcatgcttcccattctcattattagaaccgccagtgaacaggcatttgttttgtccaagctcaccttctgctagtaattttacctttaaatcatcaccagtagaggagggttcaacggaattgtttctctgtggagaatcaaatggagaaaccaaatcagatttggacatctctctagcagccacactagcaagcaggttcataccaagatcatcagaaccagacatcgagccattaccttcagaaaacttcacacagctttcaactaaagcattcatagaagtacaggaaggttcttgaagatttgcagatttatgctcatttccagatgatgaggatgcagtttttgaaacttctgcaactttctttgtttcatcaacagtcctacaacgttcttcgtcagtcaaagcagcaggtgatccatccccttcatcagaggcagtaagcatgtctttaaagtcattactctgccaggactcagaatttacatctgaagcagcgttaactttacaagcatcgcttttctccttcaagccagaatctaattgatccgccttctctgaagtcacaggagaagaagctctactactcctgattgaacggtcttcaaaataacctccaccacttcgtgcaggactacgaccaggatttggaatcttgactatcaatttatgagtattcccgtcaacagtagtcctttccgacatcttatcaccagtcaatccagaatttgatgatttgtctattgggttcttatgcagtgaagaacttttgctagacccagtttccttttggttccctggtagagagccttgtaacccatttattggttttcgaggttgtgatgagccaccagacaccttattcgcattcattgaaccagcacttgagcttcttgcatcatccttgccagaaacaactccagctctggcatggtcattagagcacgattggctgttgttgtgagactgactagaactgctgctcttctcatctctagtggctgtcaaaggaacatcagacatgccaccgctggcatttcgaaaatgaccatcctttatgttgttaccagctgatccgggggacggaactgactttacagaccctggagaagcagaagcagacctagtagtactatcgccatggacaagcttaactgaaacagatttggaaggaaaaacctgtccaactgagctctttacagcaacatcagatggtccacttgaatttctgtttccaacttcaggtagacgagctgatcttccagcccaggagacagcatgatttgagccaggcttcacatcattgatattcatttcagcttcaacacgtttcttccatgtatcaaccagactcctagatttcttctggatttctgagtttttatgagatcgcaaatgattcacagactttccaatattacacgttttcaaggcatcaagattcacaggcagcttatcaagtgcacgaagtaaaacaagaagaaactcctcaattaatttatcaccatccttcgatccactactgtcaccaatctttcccttatgaatttcctggagccactcatcaaaaacaggcaaaccacgcagctccacaaatcggctaaggcaatcaaatttatctgtggctgctataactccagcaagcattgaccgaccagccaaatctattttcttttcatttctatcaggtagcatgagctgcaccaatttctcaactccttcagagtcaacaagtccccccttttcagttatcttggatatctcaaattttaaaaaa

SEQ ID NO: 378215 - DNA, 3783 bp, Cannabis indica
caatgcaagacaagaatataaaacatgttacaatcaaatatcaaataccatcatcctcagaagaggaatcatgagaatcctcaagaaccatcttgccctttacttctagatgtagacaaggggcgagtaggttccacaaagctctggcctccaagcctaatccaaagagaagtgtcaccaactatacccccacgagccaagaactagcagagggggctctctctcttctccaaacctcatgctttctgagacagaggcacgtcatcatccaagtcagggacttttccatcaccaagaaagatcccttcagtagctggggctccatcgacaataattgatggaccctaggccctgataacttcaaaggcatgagggtataggtcgtacctctaaaagttggccacactagccaatatgattatgttcctcttcttcccagggagggacaggatatgattcaccctatccctcatttgcaatgtagggatggagcacttgtaagatgacacatgctagaactggcgatgtatgatctcatggatgccccaagaaatgaagtaatctgggatacccaccgacttttgacatagttatgctattggtgacacccaacaactggtggccaacttggataaagtagaagtacccagtctgttttcgctttggggtagacttccgatcaaaacaatatccaatctcatacggagtggactaaggctagcctagctccgcatacaaaacaaacatcgccaaaaggtactttatacttttcggggtgatttgtgttggacacatcccgaaataagtagtgatgtctctgaagtatgggtgtagtggcaacactgcccctattgtaaatgacgctttgaccacgccatccaaccaagggcaagtcggtgcgctctctgatatctagcagatatctcacggtgaacacccctcactagaccactggcttgtatctcctcaaaagtctacatagggaggacagatgcgagagagacccacctgtctccctatgatctagcatccagaatttgaggctctaaagactggatcaagacatggtctagacccatcactgaaggctgaccaagcctattcaatggcttccagtcagcattgtatccaccatcaggaaagatagataagttcttctcctaacgggcgtagcgttctcaacattagattcagagtcagaactctcaaccccctggtcaacctcaggtgcctttgcctgaccaacctctagatctttatcctcacgaggttgtgtggcctcctctacaactctaactctaccaattattgccacccttgcaacatgaggatcatatggcagtgctctacgacatacttttttcgttctggccatgactattagtctgaaatcacacaagagtagcaaggggagagactaaatgctctctcccaaaagcaaatctggtgggatctatgcggctgtcacctccccaattcgacactcaaaatcaccttcataaaagagacaaggggaggtgaccaacctaacaaagctacaaacaaagctctagttaattgtacccatgggtaccttccaggtaaatcaccttgtacaaggccggtattagcgaagtaccatctgaagtacatctacttagaaaaatagtgattcctaagttgtacactcgactataatggtttcactatcaagttctatacactgttcccaaggggaaccacgcataagactacagttgtatatgcctccaaggttatcacgagaccctagccaaggtcaacagaggacacaaaattggccatccgcttggaaccttggccttggtcggccaggcttcccaagccttagagggccaaccaggtcccaagacccagcctagggctggcaaggaacttcacttccaggcataggctggccagcctataaggtaccacccttgtccggccagaccccatggtgaccaaccttggcccgtcaaatctttaataagacctccttagccagccataatttgtacaggatctgagcatgtgtttttcaagaactcaaacacgttcttcatgttcttcgtgctcttcgtggctcaaagatccaagaatcacaacaaaagtcaaaaccagatcattcttgtctagaaattacagattagaaatcctaagactcccacacatatcaaaataccaaaaagattacaatctaacgtgagaatcaaaagacatgtagaagtgcaaagtagtcaagttactgtaacaaatgagatcaaacagtcaagagtaactatttcaaagacgaaaaatgtcgcaacatttactcattaaggctatataagttccaacgtagctggcaagtccctatgtgcacagacgtccgcatagggacttagggggcaaatattatcccaatgtttcccacttgatgtggcatgcatacgtggaaaataccagtgccatgtggcattacagctcaccaacaaagaggtcatgtcaacaccctagccaacgggggtctaggcactcaaacgggacgacgagtgacaaaccagccacctggccagcttctagacagcagaaggccagctagcctgcttcttgcaggtgcctaactgaccaagattagacctagctagattttggtcaacaactttacacgtggactacaagcaacactgcgaattgggtcttaacagcccaataaagtacacagaaaatacatatgtttaaggggcatttttgtcttatatattttattaatttagtatgtaaatattgcttattttaactactaattagggtttaaggtctcttataaaaagggccttaactcaacactaaaatccctaagtcattaagtcatagctaagtgtttaagcctcattgaagctctaagtctgatagcattctctctctcacacacgcccactatagcttttctcaacacttgacatctcccatctttgactcctactttgtaaccttaagagagctatatcagatcccacctatagtattatgaatattgttatctgtcggtatcaatacaattaaaagaggagtagatcattgtcgggaattgttttaccaggatctagatttactaccatgtatgttgtttaacatcctaaacataaatttcgaaatcataaatggaattcaaacacatataaagttcaagaaaccttaaattggttgctgtggaaataaatgactccttccactcagatccataacccttgttcctttctttcacagagtattatcaagatctgagcccgattctccatcaggtgttggattcttcacagttttacacactatgattgagtactagatatgtccgagcatgtactcaatcactaagaggctcaaaattttctaaagaacaatgaaggaggttcgaatatagaagaaggaagaagaagaagtctcaagaactctctagttgtctgacaaattgtaaactaggttataagtcattagttggataatgagaccatcttattcgttttaaactatttcacttaggaatagatttaaattatatggcattaaaaaaatgataaaaactggccaaaatcaccttaagtggtcggccgcatagtgggccccactaaattggaattttgtcattttatacaactatttatcattttctttcacaaatgccatattttccaatttatatcatttaaatatcaaaactatttatttaataattaaaattaattatcaaataaaattgtcgtttaatttatttattaattagacttaataaagtctcttaat

SEQ ID NO: 378216 - DNA, 10367 bp, Cannabis indica
aggaatggatgatgttaacagtgaagttcagagcaaaagtaagtcactgaatcatgtttcttggattccggtgacccctgcaaagccaaatttggttggagagaagccgatccatggccgtggatctattataccagatgaaatcacagaaaagagcaacttcaacaatttggaatctgatgataacattttggggcggttaccgaaagcccattttgacgaagaagctgcaaatcacggacaaattcctttcctagagctcatgaggaaagtagagtccggaaaaatggagttccgtgctccggcgcagccaaagaagagtgatggtgcagctggtagcaattctgttcttaattttgaaaagaaacagctcctccggtacaatttgggggcctccggcgacagctcttctgcgacatggcaaccgggagactatgagatcagttttggaggttggagatgcccccaaggtatgtggagctgaccaaacatgttttagtgtctgcacttcttttcctcttctttgttatcagttgttcgagtaatgatatgtgcaccaaaatatatagttacgtacttaacttttcatatgggacccaccctttaaaagaaaaaaggaaaagtattgttgtatctataatattttagtgcacatactttttttattatatataaaaaaagtagtgtagtgttatattacgagtagtggttctatcactactcgtaatatctacacgttccgttactgtaatataatattttgtagtgcatatatcattataatatattatgaagggtagtgtaaatgtaactaactacctaccaagacataatacaaacgaactactgggattagagtagggaaggagattgagtgatgataacataaagatatgactgcagagcagaacaaatatatgttaggagacagtaaaatactgaaaaggaaagagcataggatggccaattacagaccagatatttcatctgttgcttaatattatcacaattcacaattcattagcttgtgaagtatctgacttttttgtttaagctttgcaaatcaaattacttgaagacatgatttattatatgaacttaatgccttttttctttatccataatatattagagaaaacaccatattcttacaacaaatataaggatagtgtgaattcagattagttgcagctaagtaagatgaataactagtgtaagagcagtagtattgacaggtgatattgttataatcattagaataaatcataggatcacccaatcacagaatcatgtaggacatttcatcttaacttattagtttttgaagcatttgatgttttttctatatttgcaaatcatattattttataggggacacaaattctgtagttgataaatattttaatgaacactcatgagaaatgaaaatgaaaaaacttgcagacaattctctagtgcagcagctgcggcgtacttattatgatcttaatttgacacctggattcgatacttcaccgggcaagggcatacacaattttgtacctgcaacaccagataagcccttcaaagtatatagtaaaagggattctagaatgcaaaagttgtatgtaggtgatgtacaagatgaggacagagtgaagctgatgaataaaaatactactgagatggtggatgtcaatgaattaagtagtcttcaagaaagcacaagacctgctagtgatttttcagcagctgttgattccacagcacttcaggctaatcaaaacaccaataagggagacattgaggaagtcgacacgaataaaacgccacagcaaaaaccaaaaaggagaaggcacaggcccaaggttgtcaaagaaggcaaaccgaaaactccaaagccggtaaccccaaagcctgctgattccagtaaaaccccaacagggaagagaaaatatgtcagaaagaataaagtagaaaaggtatcgcaaactccaccagaactagccggatccaaaatggaaatccctgccaagaagtcatgcagaaagcccttgaattttgaagagatggaaccaataactgatgatgctggatgtactcacaatgtgtgttcagagacacaggtacatcataacagcaacagaagtgaaatatcagaatcaaccattaaagtatgtcatgaaattgaggtgaagatggtaggaaaacacaagcaggcactgtccgtgaaaactgttctgcacatcatatggaggaaggttacctgtcaaagaatggaacagaaactgtaagaacatcagttcctgtgttgagaaactctgctttggtgaaaatgaaggttcatattcaagaggactataaagatgttcacatggctgccaatgttcaacgtgaaaactctgcacaatttctgttggagagggaaactcttccatgtccaatgagtccagatggttctgactgcagcagtagtgtaaatctggcaaaaggaaatgaacaagctaaaaaatctaagagggaccaacattgtgctgtcaaacaagctaataccaacattagtaatatgtatggtggtcactataataatttagagacgtatttgataccttggccacatagcaaacgaaagagaactgagaaggggcaagggcatgataatacagcagtaaaagactgtagggaaatcataactttataccctcaaaatccgtatggatcaaaagccaaaaactcgatgagcgctcaatgtaatcctaataaggttttgaaaaacctgcatagtgatgctgaatgcatgatcatggcttttagtccgaaggagacaccgacaaagaaaagatctcgaaatgttaaaagaactcgcaatttgtcttcattacttatggcggggcacaacatggggaaaacttgttccactaacacgaaagtggtgtaccaaaatgagaagagaattgagaacttcaacagaactaacgcctgcatgaatgctctgattgcgcagacaaaaacaacacttgcaagaaagagacgaacaacaaagagaaatttgcaacgatgttatgctaagttatcaggtacttgaaccaaaaaccgaatcttaaggctatctattacatttttcatactcaatttgcagatagtgatattcattcttcacacttgttgcaggttctgctcgtgatgtactgtggacagagatgcttgatttaattgacaagcaactgaaatgcttagacatcaataaggaaaatcccttacttgaatttcaagagagaaatgcaattgttcctttccatacaagataccaagaacacaatgcactagttctatataggagagatggcactgttgtaccctttaggggttcatttgatcttccaaagaaaaatcgtcctcgggctaaagtagacttagatgaagaaactaataaagtatggaaacttctattggaaaatataaacagtgaaggtgttgatggaacagatgaagataaggcaaaatggtgggaagaagagcgcacagttttccgtggacgagcagactcatttattgcaagaatgcatctggtgcaaggtacgaaagtttctaactagtcactatgcatatcagaaagattgggaaggtagttttgtgaacaaaaaagactgcaactcttcaagatatcatgggttatggtagtcaagttactagaaatggccactgcatatgacacaatgaatccttcagttctccctatatcccaatccaaatgaacaatagtaatagaaactaatgaataagtaaaagaactattccatgaaatgagaaaatgctgttaaatttttctctaataaaactaagtccaaccaaataaaaatttaatggaatgacatgtacaccctgatcctagattggtgaatactccagggcaatagacttacacagctcaagagactagtgaattttcagcatagtagtatcgtattgtttacttagttgtattacctacaaaagtatgatgttatagcacaacttatgcaggagatagacgattctctcggtggaaggggtcagttctagattcagttgttggtgtctttcttactcaaaatgtttcagatcatttatcaaggtaaatacagtttcaaaaacttttattagacaactggataatagacattgagtggaaattctctgaccaatcccttcatggtgttatagctctgctttcatggcgctcgctgcacattttcctcttaaatcagagaatcatgacacagtatgctcagtatcaaatgaaccacaagtgtgcttagctgaagacacttcaaaccaaccaatttgtggctggccttcactggctcctcgtgatgcagaacctgatgaaatagcaagtgttgacaaaaacgtaagtgaagatagcaatactacacaatatgagaaggagcacgatgagaaagcaactagtctaatttctttgcagcccaccttagattctttatcacgaactcaagagaaatcaggatcatgctcagagagcaactctgatgcagagattctaccaagcaaaactgtgcatgaaaatttggaagactccatttcatcattgaaagctcgacaaaaggatgattcttccttgctacatgaagtttaccatgaaaatcaggagattgtcactaacaagctcaacagtatttgtgacaagtctaaatctgcagagcatagcgataaaagacaaattatagacaaaggtagtcccacatgttaccctgtcaataatctctacttgcaggaaaccactaatacaggatcaacgttgattgagtgcttcgaaaaatccctagcgacggaacctgcagaaatttcttggaacaaaactgaaaacagtgcaagtgatcagagtacactgacagtggaatctgcaactcaagtcactatttataaaaaggtgacagtcagtccccaagaagcaacaaggccgattgaatcagataacatcattcagatcaacaaaaatgtacttgttgaatctcaaagcagcacagttggaaaccttaaagttgttgaagcatggagttcggaaaaaagcagtataatacaacaaaatttgacaatccactctgaagaaacccaagaagttttgaaacagacagcagaagtagatttgaacgagtgttgtcattcattacctaaagagtgcagtgagctggatgctgctacgtcaaagccaaagaataagaaatctggaaaggagaacacagaaaatcaggactgggacaaactaaggaagcaagcagaagccaatggaagaagagagaaaacaacagatacaatggactccttggattgggaagctgtaagatgtgcagatgtcggtgaaatttctcacacaattagagaacgggggatgaacaacaagctggcagagcgaatcaaggtactagtataacattcaatatgttttaacagtggaggtaatatagctctagaagatagcacatttttatgaaaccctttaaagtccctacttctcaccgggaagttcacgcaggacttccttaaccggctggtaaaagaacacggaagtactgaccttgagtggctgagagacgttccacctgaccaagcaaagtaagaaaagaacccaattcacaatttagcaacatgaattagtttaaaactatttcccttgcatgttatcacttttccataggtgtttgttggcttactgtgtatccagttgtgttatatgctttagattcatttaacttgaacttgtagggagtatctgctaagcataaggggattggggctgaaaagcgttgagtgtgtgagacttttgacactacaccatcttgctttcccagtaagttcacattataagcattattacaagacgggtgaaatacatatttacaatttattgaatctttggtaggtggacacaaatgttggacgtatagccgtacgattaggatgggtacctcttcagccactgcctgagtcactacagctgcatcttcttgaactgttagcactctaagccccctttctattcatgcaaactataagcacttaaaccatgacaatattattttgtcgcctcacaggtacccagtgttggaatcaattcaaaaatatctctggcctcgactgtgcaagcttgaccaaagaacactgtaagagaaaatgacttctaagtttgcaaactaacagacatgctaacataacataaataagggaaaagtataagctgatcgactgaacttgactgagccatttcatttttgttaacagctatgagttgcattaccagatgataacatttggaaaggtatacttcgtttgtatttttacgattgaaaataatgttcgaggtgacaagctccttgtaactgaaattctatttttttggtgcaggtcttttgcaccaaaagcaaaccaaattgcaatgcatgtccaatgagaggagaatgtagacactttgcgagtgcatttgctaggtttgtataccatttcctccaactccaaacatctgttatgcaatacatttcacacatgtagctccagtaaagcattatcatgtagaaactagaaacccctttaatatgttcatcctgaaaaatagatggaaaataaaaaataagataaatcgaagttgttcagaggatgtcaacatagaaaagtaaatcaagagtaaactgacatactgtgcgttttatcctcacaaataattaaccaaataactatgaatccagtgcgcaacttgtctgcctgggctagaggagaaaatgttgttatttatagtttgatttatcctaatggtgtagttattgcagatatgtagtgtgattttatcatctcaaatttattaacaaaaactttaaatgcagtgcgcgacttgcccttccagggccagaagagaaaagtgtagttattgcaaccgaaaaaagaaaggaagacataaattttactgttaatgagagaacacccttaccccttcctcatgccaacaaacaatcagaatactaccacttaatggaagtaaatgatcagtcagaagcaaaagctgggatcaattgttgtgaacccatcattgaggaaccagcaacaccagagcctgaaagcccaacaatattagaagatattgaggatgctttctgtgaagatcctgacgaaattccaatgatcaagcttaatattgaacagttcactcaaaatgtacagaactatatgcaacaaaatatggaacttcaagatggcgaaatgtcccgggccttagtttctctaggtccagaagctgcttctattcctatgcccaagctgaagaatgtgagccgactgcgaacagaacatcaagtgtaagttggcacaaaacacctaccaaaaagaaaactacactccacttattatttaaatatagattttctaaatcaaatataacaagaagatatgttaattatactacttaccaatataacatagaaaaaaagttcaaggcctgtggtcctgagctaattagtgatttttagatttcagtgaacacgatttatgttacaattcagatggttacatatgtaccttcaatatagtattggaacgtttttattatatgccccaaattgtagcgattcattcaaatatttcttcaacatgatgcagttatgaacttccagattcgcaccctcttctggaaaaggtaagttgcgcatctacatattgacaaagaacatattatctggattatcaagatttgatctctaaaggattcttgcattgcataacagttacagttggagaagagagaacctgatgatccgagcccgtaccttttggccatatggacaccaggtacaacaataacttcttataaatctattttggatggttcaagtctgtcttgcagatttataggattcatatacatctatttaagctgatacacaccaaaagaaacgaaacaaaccattagatttccaaattttgcattctcgaatcaattcagtttataatctatttcaggtgaaactgcaaacactattgaaccacccgagaggaggtgttgctcccaaggatatggcagcttgtgcaatgagaaggagtgtttctcgtgcaacagcatgcgtgaagcgaactcccaaacagttcgaggaaccattttggtaagaatacacttggcaaatcggttacaatgccagtgtgttgttaaacaatagtaataatgatttgaaaatgaaattaagcaatgcctaaatatgtcaatcaacagataccatgcaggacggcaatgagaggaagcttcccacttaacgggacctattttcaggttaacgaggtgagaattacaccaatctagacatattactctctaattgaggcttatggtaatagttgtctaatattggcctcgtattatccatcccatgcagttatttgcagataatgattcaagtgtcgacccaattgatgttccaagagaatggatatggaatctacaaaggcgtactgtgtactttggaacctccataccaactatatttaaaggtaaatatagtaacctataatggtatagaaacttttatggataaccagaggaaaactaatggtgctaacataaatatttataacaccagggttgacaactcaaggcattcaacagtgcttttggagaggtaaaccttttaatctcttttcctaattccatgacatcctagacgttttaattgatattacatattactttttagcatctatgaacaaacaaaacatagaaccattggcttttatctttattactcgtatgcatatagacattctcaaacattttttcccacggcgattggaaaaaatagactgtctgttagcttttcaaagtattttttaagcccagagaagttttttttttccttaaataaaaattaaatttcttccaataagtgtgaataattcactaaatttagtttagtttttcttagaaaattcgttggaaaaatatctaaaataaaagacacttactgtttgacatattcaaaagtttattctcactgacatattgaaaaatatagaacctgatgacaattgtttataaatcacacttaaataccacatttcagttagcttaatcaaaattatagaagcacatacatcatacttccccactttttgcctaagtcaaagtcaacagtctcttgtagctagacctattatttcttcatgtcattgttgttctgttttctgcttaagaaaaaaagaatcatgattcatggttcatggcatacattttggtttactctaaatgctactaacctcgactgcaggatatgtttgtgtgcgaggatttgaccgaacaacacgagcaccacggcctctattagccagacttcacttcccagccagcaaggtgaaaagaacaagagatgaaaaaaatgagtagtggtggtgtagaaaagggagaattgagggtgatgatgtccagcaaaaccagaattttaccatgtagtataaatagcataaattccaacctagattatttaacaaacaactctaaactggttcttttagatagtatcaatatatatattacatatatatatatattacatatatatatatatttatatattcccacagagacagagaatgaaaaagcaacctagttgagctgtgctgaatgctcccatgattgaggatgggaacaaatatgttgccatgtagtacgtgtacatgattacttagtctcagagagagcttttttgctccaatccaaagtttgactatatgacacgaccaatgcgttttcctacctcctcatccataaccaaaaccatgaaaattgggagttttatgaaggtcattaagacaatcacaatacttaaaaaaaaaactcttcatttgaattatatgattaagaaaataattagtttcaaatatataaaaaaaataggaaatcattcccaaacatctttcttaccgaaattactttggagagggaagaaataaatcatcaaaattggcttcttctttccctcattccctggtgtgctcaatgccttttttcttggcaacttttcccaactatatgaaaagcatttcccaacttttcccaacttttcccaacaaattccctacaacaagcatccgaataaatttgttttattaaattgaaaaaaaaaaaaacaaaaactaattaaaattaaaacaaaaacaaaaacaaacaaaaaaaaataataagaaaaaatgaagacataccaaattagaatgctccccaacatcctttgattttcttttcttttgacgcactagcgtcatcagaaatagcttttcttttctttggttgaaacaggttttgcgataattttttcggtttcaaaatcatcatcactcgcagatggaaggacattcgtatc

SEQ ID NO: 378217 - DNA, 2056 bp, Cannabis indica
ttctcattatatccttctgaattctgaattacctctggtgccatccaaaacggtgtttccacaaatgtctggtatatgttccataataaaaatagtacactaagggaacacgagaatatattcttaagttgaactcaagcttttgcaactcgtaactattcatgatgatttaaacataaatagagattgagcatggtaaagatgctaccttcctccttgatattgtcctagttaattgtgcagaaacaccaaaatccgcaacctgtaacaataaaaaatgtaaccatgatgactaaaagcaaacgaattttattgtaatgactgacacataatctaagcaggaaaatataccttaacatcaccattctcagtcaataaaatgtttgccgctgtaagaaaaaatcaatatattaccttcaaacaaaaaatcacttccaaaaacatgtatttaacattcaaagctactcctaaaagcacctatgtaaacaataataacagtaaataaatcaaactaaaagatgaaaacctttaatgtctctgtgaatttttccttcattatgtaaatactcaaccgcatgcaacaaatcacgaagaatgcaaccaattgacatttcatccagtggtggacctgactgaagctgtagaagaatataatttacattaaccttcacgaatataatatacagtatttaaatcataacattagcagaacatgcaaacaaaaaataaagcaaaaagtaataacaaaaacaatgccaaaattaaaaattttctatcagttttttgtatcattgtaatgtgacaaaccaaatgtagctcatcaaattttgacagctaatgtttctccattcacataaatatgcaagtttaaaaacaagcaaaaataatttcaatgaaatataatagaagcaaatcaacagaacatactaggtcagcaaccgaaccaccagccatgtactccattattatccacaatttggtctggttgagataggaaccataatactctgtaatataaggagatcggcattgtgacaacacagaaatttcctggcacaatattaagacaagttaaccatgggattcctttgtaacatcatattaaattatcagctcatcaagagcagaaggtaataccttctgaatgtcctcaatctcatcctctctgaagaagacaagaagaaaagtattttagaagagctaaggtgtggataaatattagatgaaagaagcatattctacactccaaaaaaatcatccacaactattttcatgcagaaaaaaattatgtgagatgagaccaacacttaaatgttgtgtccagccatattctttatttcttggtttggtagactctaaaacagggccattaactgaatagtcaaccagggcagatcaatatgatcaacagttgtgtagcaaaatctactaatgaatgccatcatgcaggacaatgcagaaatatgaaatataatcaaaagaaaaatagataagatcatttaatctagttataatttcttgccccctttggcatgactacatgccactgtcaaattaattgaagatttagtaagaaatagtagctgcatgcagcattttatgggccgagggaaacaatcattgtaaactaggtataaagtggaacgaaaatacagggcaccacccttaccaaatagtttttaaataaatccagttcattagcaaaagcaaaaatctgacattgaaaatatagagtaaaatcttgcacatgaataagagggaacttacgactcttccaaatctattactttgatagcaacttctttgttaagctccttgtcaaacctgtaagaaagaaaatgtgtctaaggaaaacactcaatgttcaagaaatattcagcacatgctaattctgaaaccacatcactatcctctgcgtcctcttccaccaaaaaaaacaggaaagatagatagatagcgcatttggatccagaagacataaagggctcgttttgaacgtcgtattaggtcgtatagtattgtattgtattatattgaattggattatatatcatat

SEQ ID NO: 378218 - DNA, 11916 bp, Cannabis indica
cttatgtatatatatgtataatgtatatgctagttgtactgtaacaaatgagatgaggtggtgctatatgatgatatggtgcaatttaaccacgtcaaaaattttgaaagaaaagaagtactaatcttgatttttgttgaaaattatgtaattaattaacccactcataagtatatttgcctctttttgtgtcaattttactctaagatactgaataagaataataatgcatttcattaataattggcatctgtaaaaatatgtgactaaaaaaacccaatgccacaaatccttaacaatgtgaaaaattacaacatcattaagaacaaatcctaagggtgaatctataacaacataatatgactaagatttagtgactatatattcctcatcaacttctagggaaaaactcccaagggctctctatatgatgcagacactaagacctcctccatcaaatttttgaaaaccgagactacaagaacctctaatcagaatcaatcgcagtatcaacattaactttgcacacccagagctcaagacatgaattgcaggtaaatttaataagttaaatatattttaattgagaggttataacatgaatgaattatattaatgtacacaagtattaattaggatggtggttatgatattacttaatattatcaatcatatataaatcatacatggaagtgatgaggagatgaatccatccaatccaacatatttgattattaattaggtaggattaggattaggattgggattaagatacatgaatgtataattaagtaaagaagaggtattatagtattacgtaaacacatgtcattgaaaaggagatcaatgtgtataatatatagtaaagacgtgggtagtaatagtagtactagtagtagctagctcattcctataattattaatagatatataatatagaaaaaatttccattatgaagcaccatagagaattttatagtttaaaagactctttttgaatattatttttgacatgttaaatcttttcgaatctatcaaaaaatgttaagatgttttaaataattaaaacatgaaccatcataaaaaaaatcgaacaaaaaatttctcaaatgttgaaataaattggaagtgcatcaatggatatatttattttaaaggaaccctattatatatatctacatctatatttaatatatataaacatattatatttgaatttaattaattgatgaaaaacgtacgtagttatgtgtttgtgtgtatagttaaccacttcctttgtctctctctctcccacgttacccttcacctacctcttttgttttcttctaggattctagaacacaatctcttatacaaattactttgatctattcataaaattaactactttcttatatatgtctttctaatttttacctaaaaactttacatataataataataataatataaaaagcctcactgagtaatgatattaagtggggtccatctctaatcgatttgattggtcacctaacaagtaacaacaacatatatagagagtaagaatctacctgagttcaaaccatgcatagcaatagcatatcatgcaccatattattgattaagagtaatactataagaggtggggtgataatctaagagtgccgtgatctacaaagaaaaaaaattgagaatgtgatgattttaagactgtatagatatagaattatgcaattaaagaattcttaaataaattgactggtactacttatattaataagatacatttttttttattatgaaagagctctaaagttaagcgtgcttaatttagagtaatttcaagatgagtaatctcttgaaaaaaatttctaaaaagtgcacgagtaagatcaaaaaacgctaaaaagactcgtattgatctacaagattaagtcatcattctatgaagcaaccaaaagagacgaacccgtatataagagttattaacccttaaggaaaacccgataaaagcttgaagcggaaacgttacagtgtaaacgattagcaatgttaagacctaatacataattatactaatagtaatatgacacgttaaaaaatattagacagtactgttgtgttttagcatttatctattgattattggattaagtagtcatctcattcttacaaccaaccaatcactcgctcactaagatttctcagaattcattcattcctcgctatttgctggtgcattcatccattatttgctgctttgattgtattctcaactctatggaaaatccctcacttcagtttcaaaacatttttcattataatttcaaatctcacacacacacacacacatatataagacactttgcagcatagtaaaaccagggtacaattgacaatttgaacagtttctagcaagaaggatcaattggcaattgttgctaagacattgaaaagtaactcaaccattcattcatagatatatatatatgcaaataaaccagtcaagaattcaggaacacaaaataaatccatctgttttctgtttgcacagtattatacgaatgcaaaattgacttaactacatattggaaccccttgttggacgacacacgtgattccttttgcgagcgtgttcttcgctgtggtgttgtgtccgacaaccatatccataccagcaatcatctcttgcagctgcatcccccggaagaagctacacaagtgtacaaaacaaccttctcaattcatctcaaaaactctcaaccatatgatcgacgaacaaagtcttagtctttacttacatgtttgggtattgaaatccgaaaccagtacaacaggaacgacacaagtttctcataacaatcactgcatattccattcaacacacacaaatattacaccacataatcattcagtgacatgatgaataaataaaattcagttttaccaagaaagaatctatggagggaaacatacttgcataaatgggtctcagctgttatcatttcagcatgattaagcggcattctacttcgatctgcacagcaattaaaataacaaagtgcaaacccataaaagctgcctttttagaagtgaacattggagcaagaacggtaaagcatgtttcgtgagagaagaatcgtaaattcaaacaaaattaactactatacgagtcagaatctaagcaacaagaccaacatttcgattcagagagcataagtgggaagcaaatggagaactttggagcttaaaacaaaagtaaacttatgtaccaatctctctgttgttcaactttccaatccattctgtaacaacatcctgtagtgttctgcccatttgtctaaaacacttctctgtaatctaagaagtaaaaaaacaaaagaatacactagtaattcgaaacttttatcattaagaaacaactgtgctatctctacttttaatgattcatacatcttgctcatgtcggttcttttcatgcgcccagaaaggaattctcgagatagtacgttctctgatctgcaaaccattaaacattacataattcactcaatctatcaatttactcattccattatagaattatatatataatttcttataaaatgcatatatacactagtaaatatgaatgcatgagagtgtgtgggatgcatgtctataaactcaacacaaacacatgaaatttacacaccggtttaaaggtctcagaactgcacattgcatgagctcctgttcctatagctcttaaagaatgccaataagcaccacaaaaagccctatcacagcctaaacctgcaagcacataaaaattgcaataacataacccttcagtatattaaagggattcttaggccatcatttcatcatttgaaatgcttatagtgttgtcaccgaatattaattgtgaaacaaaagaccaaagagtattctaatgtatacggaaaaatcttacagtgttgtgttacattagcattggaccgtgaaggcatcattcctccacatgattgacattgtaagtggatagtgttatcattgcagcgaaagctaccgtattcagtacctaaataaatgtaaacagaggggttccaattaaacagaacacatatataagaaaacctcttcgagatcatgcaatatataaaatgaggtaataatttcttaaccaaagtcattatcaaactattagtattaccacattgtgggcatggaagatctatgccaccacttaactcgtccacgggtgaataggccctcttccgacgacccatctttccactcttaacgacctaccgggcattacatgcagaataatcaatgatataaaataaacatgtcaaagttgaaaaggttcacataacaattttctagatgagtattcacgtacagatgtatgcacattctacagcctaacagaaaagtaaacgattactcacaaggtttgattgtattgatgcatatttatctaaaactgcaacttcatcctttgaacgtgttagagaagaatcagcctccagtatatcctataaacaagacaagaagcaaagttaatctttacggcgttcaaaggtgattatgatataagaattaaccattacatctccaatgttcttcagaaagtggtttcttccagcaaactgcacaacggctctacattgaggacagagtacattcgagcgtttctcttctgatcgccttaaccattctgagaagcatccgttgctgtggataatgacatattgagtgagattcaataagatcataaagaaaagattggtcactaacactaagaaaaataatgagaagcataccagaagttatgaaagcaaggggcaatagtaacaacatcgtgccacacactcaagcaaatgcagcattttgcatgatcaacatctatgcttatctggggtaaccataaaaatccagattaaatccaaatgatattaaaaaaagaagctaaataattaacatccaatacttaaagtagtcacctttaatttcttctgagtggtttcaggtcttggcattagtttgaatctatagctcaaaaaccctaaaagagaaattacaatcattttcagaagtatagatacctatacatacatgataggtgattttaaacaaataagttctaaaatgacaaactaagatttcctagcaataaaaaaaatgcaagagtcaagtagaacagcccactaatcatttttaatgtgctttagagtactgtttaaatatgttaaagtgatacatacatatataaattgaatggaagaattagacagaagtctttaaatctaaccattttcggaaaaatatttaactgcctaaaaagttcagacataatttggtaaatgtcaaattaaattacaaatatatagtactgcctagaactagaatcttcactagaaaagctttgagggagtgatattacatacaaaagagtaaagagtaagttacaagggctcaaaccttctttacaaggaccaggaataatttcagttccacagttaatgacaacagagtcttcatttgggatgacaacatcatcagcaaggattgcatgtgaactatacatatatacatacattcaaaaagaacaagaaataaagaaagattaattcttttttaatctcttcagaaatgacattgttatatagtaaataggcaaaaatgaaaaaacaacctcttattgtgcaaagtagcagaagataaatctgaatttcttataatctgacaccattgatgttgctcagaagaagaagaagaagaagaaagtgttatgtgggaggaaacaagaacatcatcaacctttatctcaacatctgaaaatcttgaatcggagggaactgcaacatcgagagaacccaaaaaccactcataaaactaccaaataattactggaaaagtttatgtacattgttatcatcacattcatattcctaagaaaaaaagaaagtggcttaccaagcttagcccatgtttgatcagagaaagaggagtttgagctttgacccacttcggtttccgccatccccaaccgatcaaatacccaaaagcgcaagctttttgtagttatacaaacaaagccaagtatttcgaacactctgaatagtgaatcgtataggcaaagctttgttttttatttttatatggaaataactcgtgtaatccctttcattctctttcaagggcccttattaaattccaatttctaaaagaagaattttttaattaaattggtccaattgctccaaaataggaaggattttacactagagcacgtttagattaaaaaagtttcaatttttattattaaaaaagtttggtccaatgctcttctgaaattatttattttgaatatgggtatttctaagtgatacttttcaggtttggaattctttttggcaaatttctaaggctagtaatgtcacctctcatgctcttgctcaacttgctataacaatggaagctccccaggtttaatgatcggggcttcctagttgcatttgagtgaggtacttatgtgtacttgacacttgttggaaccttttaaaagtgaaagaatttttaccctagagatagtctcacatgggatgtgagttcttgcaattatgacacttggaatagaggtccaaatgatacttagttttgtgtaatgagtgagaacacacacttgacctacaaacacaattttcactaaaaaaaatttcatttgcgatatcatactttgagggtgtattcaacggttctctacagtgcagtggagacccgatacagtaaactaccatgttgttttaccctagagacaactggcaattttcaactgcttacacatttctcaacagtgttgcaaacttcttaaagagaaaaacttagttcgcgacttaatttgaaaaacttcattcggtaatatcgtccaccttttattttcagtagtactggttcgatcttttggctttgtgtctatttttatatgacattactttcaaacaaaaatgttgggcgcaacaattaagtgatgaaatatataaaagataacaaattgaattattggtttcttgtcattgaaaccaaagtgtgttctgtttcaatcagatttcatttacaacactgctcagaagtgtgttctggtacacaatacacattcattcatcaatcaaagtatggtcaaaatcacattctgttttttcttttctatcatatcaaacagccaagagagagagtagaatgtagagcataacacaaaacaaaacaaaactaggcttatacacctccagatgttcctgatgattcagcaacatcccccaattccaatcccaatgttatgcctacaacttcttcttctgcttcttcaatcatcttccctctatccctatctctatccgccgaaccatccactgcatcgctcagtctcttcaaccaaatatcatagtcaactgcatatggtgttccacacaggctatcaacataatccgcaaatgcctttaggatagctgatacttccccgagctgctgctgaatcgaccgcttagcccacgccctttccctccattgcaatgcagactctatagaatcctgctgctgttgctgctgctggtggctgcccccatccccactaatgaacatcaggaggtaaaccaggctctccgcatctgatgatggacaaagcttcccgtgttgaagtgcatgagatgaagagaattgcaaattgattgcggggctgtctctatcttcaagcactgcgcgcccccatgatatgggcacgtatcttacaccttccttgtccacaactcggattatgttttctggacaaatgtcaccatgttgaacatttcccattgctgcacttctcagtgcagccagacaatctctgcaacagcgcactgcttcctcgggtgagaaagggccgtccctagctaccacacatgatagtggttcacctactggagatgttacaaggattggagttccacaccatggatgatcacacctcccacctggactctcctttttacatggaccagaatgcagaactcggccagatgaaactatttcgggcaaatgtttgtttgaacttccctgctgcttcaagatatttagcacttttgtttgtctttgtacatggtaccaaagactcatatcctcccaagagggttccagtctcgatggatgagcgcccacgtataaagccaacgaattcatggggtgatcaagagaaatagcactatagagaaaatagtttcctcctatcacagattcttgtatttggaaacttttctgcccatgttgttgatcatccagtagtaaaatctcaccttgcttaagcttcaaacgtgatcctttcgtcctttgaattaaagactcgccctggtcaacttcaacaatttctccttgttgatgatagccagatgtttgtaagggaaccaaagcattctcgttctcaacagggcgacactccatccaacgtctctgaaggcgcaggctgtgatttgaggccaaagaggatatagatttcctcggtggtccattccattgggcaatagagtagaaggtagccataaccatttgaagagttccctggtcaccccaattgggatttcctagcttgttccatatcatgtccaccggggaaactctgatttcagcatggtttttcatccactcagccacagactcatatggattgattgagttcaagtcgagttttgtaagatcacctcccaatctaaccactcctccatatctagaatcttgaaccaaaatgaagattgaattgctgtctaaactaatagtcttgctcaaaaaccttgcaacaagtatatgaaaaccgtaaaaaattgcttcacaaataacccgagcagaaaatttcaacccgttccctgacaatatgtcttgtttgtaaagaacaaactccacaacctggtcccaacgaacatgtgaatcgcttccaagtcttgacatcaaagcaaagccacaaagctctctaagccttcctcttgatattgccttgtccacagtgtaaaacttggagccaggataacgcggacaagacagcaagaaaggcaacggccctctcttgtgccaaaatgtacgccacaagccaatggcaatagcatgaaaaaagtcttccaccgcaaggtactcctcttcctttagatcatcagaaacataagacgagcatggcattcggaagagttgttgaaacaaaaccccctctagcgcaacatcaagcttgcgcaattcatcaatcataaagggagagctgaaaaaaggttctgcattgtttgaatctgtatataaattatcaaaaacccactcctcaagattctgtgtgaacaactcaaagtcaacgagtttctttccataatcttttagcccctttaaaaatcgtctagaagaaggcccaaacttgcttgaaaccgaagcccctgatagactgtgtgctgagataactgcatcattagaaaaaaaaaacaatatgaaaaagtcacacatgttgagatgcttaaaatgacatagtgaagtttgtttcttggcacaaatgctatgagagcagtctaaatttgtcttttagtaatgcttattttgaattagcagaaaagaaagtaaagcaaaattatagagaagaacacaataaattacaaaccactatttgactttctgaaacttccatccaagcttggctctggagacatgtccaaatcattgtgtgggatgcctaagaaaacaaagtttgatcatgagattcatttctaagaaattgataacaaagatgcataatgtaaacaactgtttgccattactaagaatccagaaaattattactctaagaaaaacattgagtttcagtctcaaattattagaggcaacagactatgaaaacagctactagacaaataaggattgtttaagattgaaaatgaatacaaaccagacatgaagttcctataactgccactcatactatggccaggggaagaatccaaatcagcatgttgagaacctgatgagatgaatcaagttcaagtcatttgtatgtgaagctaagcaacaaaatgcatctaagaacaagcacaagcacaaaatttcagtacttgggctgtctgtgattgtaactgataatgaactcagctacctgaaaatgcaattcaatctgattaacccatctaaacaaaaagaagattctttttattttcttttctttaaaaagtaaaaacagatttaaaaggaagataatagcttaagtttttactgtatttttcttcattgaccctagaaaggctaaaacaacaactaactccaaaaaacaaacaagtaatgtaaagacacataatggtaaaacaaaatgttttcttttcttttctttatttttatttttctctttctaatttctcaccaaatcaatctcgaaataacaaaaaggaaaaaggaaagtgtttcaagaaaaagaagggaaattggtactaaaaaaggatagtacaatggatccacaacatgggaaatctttaagccatccattaatgaaatctcatataagtaagctaaacaaaacaattacctggcttcatcttgagaagtgggcaccttagacaaaacccagaagctagaataaggaaatggagaaggattttgaatcacctgagagtggcattgttcagaaaatggttctgagaggcttggagacacaatgaggtgaaggtaaaggcatgaaatcggtaaaagaaggagagatataatacataataacaatagaataaaagagagatcttgaagcatggaatgtgataaaaatgaggtctttttttaatgtaaatgttgtacagctacaagacaacaacaggtacaagtaaataaaagaaataaaagtaagggaagagaatggaatgttgttgcagaatgagaagaaaaagaagatgggcaggcaaggaaattgaaaaaggaaggacctttgcttctgtttttatataaatatatataatataataattgaaaggaaagtggctaatggctaatggctaatggctaatggcttatgggttgtttatgtatggtaatggtatgtggccctcttagtgtattgtataatagctatggagattggagagaagagaagagaatgaagcaatggaatagaagaagaagaagaagaagaaatgggaaaatgggaagaagggtgccaactaggcaaaaggcaaagaaggctcagagaaagtagataggaccagaccaaagaccagaccagaacagaccaccctttgggcccttttactaacctcacatatataaatatttatattaaaaaaaaacacaagcattattctatctatctatgtatacaaagtattttgtattcttattgtggcgcgttgatacacgcgctcatattgtgtttcaaacaacaacagtaaagcaaagcagggattaaaaaatctgattagtgtgtcttctctctatcattcttattaaaatatattaaatttttgtgttctttcttttaagagagaaagagagtaatggattggtgagtgtgacaatgagagatttaagtcctgtcaattgtcaaaaatgtcatatttcttacattatattatatatataaaaatctatacttttattttatgacagtgaaggaagggagtgccttgccttgcctggcctggcctgacacactcctccttggccagctagctagctaatagtttgcctttgaccccaaactcaactcaaatcttccctcctttttttatagtgtgtttggatataattactatgctaattaagatttttggcctctgaactttgatatgtatcaaatcatgttcttgaactttttaggtcattgaaaatgcctccttaactattgagattgttggatttaaggacttttttctaattttagtaaaaaagtctaacatggatgaaagttcaaag

SEQ ID NO: 378219 - DNA, 3426 bp, Cannabis indica
atatatattttttgattaatataagactatatataatcatgagaagttaatcagtcttgtgttaacattacgaaaaaatgttaataggctaattcaatagttcatgttcaagtaaaacaagttaaaatatctaaaataacttgattttttttttccaggccctttgtgatttgctaatcgtgggagatatgcagtattgtaattattttcaattactaaaatgtaaaatgccgtcaaacattttcatttatttattacttccaacaattatagaaataaacgctaaaacatttctggtacttcttatttggtcaaaaccaaatcttaagtacataaatggtaggtaatgactctattagactagctcctataatgggcttctcagttattctattcttagttttctacaaagagaaaaagattcaaatcccaaatatgatagatatttggcttctaacagagtacttagcagaaagccatctcaaatatccttgagaaaagcccttgtcaatgatcccaggcttgtcttcagggaaaatactaatagaatattcaagcttctggttcacttctgtgaaactaagtgttggagggtcgatgctaattttagttccagccggtgtaacatactctacagtataagttgagttaggctcacccacattagtcacgatccttgtaaagttcagagggtattggctaagaattacggaaatggtgggatagttcagctcatattctggtatacttgtcacttgagaacatttcactgcttgttgggagatgagagagacttgatcgtctgtatagttcaatccacaaagataaggtatgtaatcttctggtgcaatgtcatatataagacctggattgtttgctttggaggggtttacatggcctgccccggtggcgaaaatgtctgctgaggaagcctaattgaaagaactttgtaattagtaaacttgaattaactaatcactacaataaaaaaaaatagatttagtactgattgtgttaattaagtacattgtccattgtttcatcaattatctctaaacaattcttataaaaattgagacgtttagtgttgtttatataagttatggtatttgtagtacttaagtgctatcaaatactagtattaataccgtttcgtccaaaatgggatttccaccgatgttgttgacgtcagcagttgtgagaatggcagatttaatggcggctggagaccaatcagggtgagaactcttcagcagagctccaataccactaagatgtgggcaagacatagaagtacctgaaattatgttaaacggtacggttgaactattgtctaccgaaatcggccatgcagctaggatactaacaccgggtcctacaatgtctggtttcaagattgaaggactagccccacttggacctctcgacgagaatgaagacactgatggagcatgcaaatctccgatcacagttcctttaaacaagattgtagccattggtgataatgttgagtttatataagctttaatcttcaatgaagagacgaaggcaacattactagctggaagaacatgagcgtcagctaaagtagtgaacccatctggcttttggttcaacagaatcatggcagcgccgccagctctcttcacttctacacctttgtcgattcttgctacgccaccacctctttcacaaaccacaatttttcctgctacaacttcactttgaagtgagcccacatcacaaaaagcagcggactcattaccactagctcccgagtagacaagtggtaacaattttgtttggtcgaaatcctttggctggaatagagactctccctcgagttcttctccatttccgagtttaacattggctttaatttttcggtctatggtgctagctccgactgttagaatccaaggagcttcgttcgagagagtgaagtaatcaggaccttcgttccctgccgagcagcttacaaaaataccttttcggatggctgcgaaggcaccaacagctacagagtcagcaaagaaaggagctgagccaccgccaagggagagagaaagaacatcgacgccatcagccacagcagcatcaagcgcagccaaaatgtcagattctgcacaacctgcttcactgcatactctgtacatcgccaaatgagcgtatggcgctataccaacagctgtgccattggcatttccgtacacactagctccagggacgaagttccctgtagctgtactagatgtgtgagtcccatgtccttcctcatcaaaaggaggttggctttcaacgacccctgtttttgaatcggtaacaaaattcttagcaccaatcagtttgttgttacacacaccgctagaaaactcgcacgtgcctttccattttggtggtggaggtgggactccttcgtcgctgaaggaaggatggttggggaagattccagtgtcaagaacccctacaatgacaccttggcctaatttggactctttccacaatcctaacccttgacgaagtcccaaaaaggtaggagtacgagtggtgtgtaaagaaaagacttgttgcggtttagctgaaaggacgctgtctttggctgccaaggctttggcctcctcagccgtcaatctagctgcgaacccggtggcaacattatggtatgtgtgaaccaaacgtgtgtgctggtttgagcttgaggttgtagtagtagtagtagttgtagatggtaaaaatgagtcgtaccaagtgttcaaatccttagttgaatgatcaaatagattgtagtgttgtggctttttgacgtgaacaatgtatgtgtttaaggtctcttcttcagctagagcagctgaaccattgaaaacgacaattgacattaaaggaagaaggtagacaaagtgatccaacatcgtccattgtcgtttaatctccatatttttttacaaattatagtgttaatttgaagtgtatatattcaaacaatattcattgttatttatatatataataaaggggctgcatgcatggtgaaacctatggagatcagtactatcaaaacaaaaagcaaatgagactttgttacagttggaacaaggcagcgatataatttatgttagacagcaattagtttggagtttaaggtttggacttgggttgtatttgtattgattttcacattgattgcgaactgtctttgatttcttacgataaatcttctgaataaaatgtatttttgggatgtttgtccttgatacaatgagtagtattttgtaatttttaatggcccatttttgttgtatatattaatgtatttctatattttcctgcgaggtgccgttctgcttgctattattttatgtactaatcacaatcatataagacagagacaccaaagaaagggaatcatgaactatttcattatgaaaa

SEQ ID NO: 378220 - DNA, 1804 bp, Cannabis indica
agaaaaatagttgggaataaagatgttttgggagtaaataatgggaatactattaatgtgaatgggggagacaaatatgtagatagtcaaaatgaatttgatcataatagatcctaagaggagaaggacccaaggggaaggtactgatgggtttttaagtcagattgaaggccacaatgttattaataaagaaatgggccatgtttatatggaagtggtggatgaaaattataataggagtgggcctggaaggaaaatgaacaaagggatgatgtgggccaggccttagcttctaatggggttcaagaggacattgatggtgggaaagaagtgggtatttctctaagtggcattatttcgaaaaatgcatttttggcgggtaatcattttgggtcccgccaagagtcatgagtcttttaagttacaattaccaggggcttaggaacccatgggtagttcaattccttaaggaaattattttccaaaacagacccgatcttatttttttgtgtgaggctatttgtaaaatgtaaaagtagaacatcttcaaaccatgttgggctttgaagaaagttttattgttgaagccagttatgttatggcaaaagaacaatgacgagaaacttttgagttttagccaaaatcatagtgatattgagcttaaaattcaaggttagcctttgattcgtgtgactggattttatggggagcctcatagaagtctaagggataattcgtggaggttgataacagatttagctcaacaatcagtgcttccttggtgtctaataggggatttgattaatgttcttcaccaaagtgataaaatgaacgggaggtcgtacccgagtaggttgttgactgacctttaagaggtggtgtcagaatgtaacctcattgacatggatttggttggtcatccgtatacatgggaaagaggaaagggtacaaatatttgggtcgaggtgaggcttgatagagctttgatatctcattcttggaatgcactttttccatcagctagattggaggtcgtggaggtttcggtctctagtcatagtcccatctagttttgtcttgttttggctacacctgagttcgcacctcgaagattttagtttgaaaatgcttgggcctgagagccaatgtgtcgtcaaattgtcaaagataattgagcagcttatgagagtcattccttgcaactaaagattaagtgttgtagcacggctctagcagaatggggaaaagatataataaaaattttaaggagcgtctgaaaaagtgtaataagatattaaagtgcttaaagagcagaagagatgatgagtcaataagaaatataaggatacccaagctcaattgtttgaagttcttactcaaaaataaatgctttggagacaatgctctaagcaactatggctttaagtaggagatcaaagcacaaagtattttcatggttgtgctacctctcataaaagaatcaatcaaatcgtgtgtttgaagaatggggaaggggattgggttggctgggagaatggtcttactgaggttatggaagactttttcaaggagctgtttatagcttcaaactcagactgggaaagagttacttcatgtgttcgaagtgctatttggaggatcaaaatttagggttgttggctcctgtggctgaggatgaagttacgaaagtggtgttccaaatggaccccgacaagtcaacggggccagatgggcttaatcttgggttttaccaaaaattttgggatgtggatgggcttgatgtggttgttgggttttgtgccct

SEQ ID NO: 378221 - DNA, 1150 bp, Cannabis indica
gcactagacctcatcgatcgagttgacacaattcgaaacaattaggtgaaaacaatgataggccgaaggattctcatctccggctacgttcgaaacagacccatctcggcatttgtcattgtcaagttgtgagcagtgggtgcctttggatttcggacgccacagtcggatattttatgcgtgaattagtaaaaaaaaaaaggaagaaaaagaaaaagagataggtgagtggatagtggttgctgtgtttttgaatgtggaaatttaggggtgagaagtaacatatggttcgagggaaatttaattgcttgtagagatggaaaaatgaacagataatgtgagttgggtttttatagttttcctttgttctatgtgtacagagtaaattaactaataattaaatgtcaaatgtcttttttttttcttggtcttgcctatgttttttcttttcatgtcaatttttgtttacctgtagcacttgaccatagtatgaccaggttgacaattgttgggattggcagagtttttagattttttgaattgagcaagattggccataggattgtttgagatcaatcaatgatgtggattgatttagctcaaggcgcatctcatgattttgaagcatgtattggacttcttggagactcagttaatctcttgatgtgagattgacaactattggtttgtatttacttccaacaccaacaaagatgtatagaatcagttgatcttctgagattggatttccagccgcacgtaagctatcgacaaagcttttcgtcttgagcacgtatttgtcaatggtcatagagctttttttggtgttagacatcagatggatcatacgtgctttggatctggtgttgaacagttgctcaagaattgtctgaatttcaatggaggactcagagttgacaacatgactaatcattgattcagaaatgaggatagtaaccaagaaatgagaaattgatctaatcgcattcaatgaatgaagtatggattacgtaccatatgttgggattttatgccctaaataaaactcattttcaatctaatctgatttgttatcaataaaagattataagtcatttatgtttacatgtagttttcatgtttatggtttaatgtgtacaaaatctgtgaa

SEQ ID NO: 378222 - DNA, 1581 bp, Cannabis indica
agagagagagaggtgtttaaatcgtttctaaagcccaaaatgtcagtttaaaactgacacaaagcataacattagtcctaatccgacacaaaattttaaaatagtcgttttacatcagttatgatcgttgacagacgtgttaaccaacactagtaccttattttatagtagtatcaacaaactcgccatataaaaatatttagacatttcatttgctggtcatgttcaacttattcaatccactttgattggtcttagaaactactggatgagagtctttcttcttcctcagagtgtgataaaggagattgagaagttttgtcgtggttttttgtggggtctaaaggacaatcggcccaagatccatttggctagctgggagaaggtgtgtctccctaaagctcttggaggtcttggtttcaaagatggctctcgttggaataaagcctcccttgccagatttatctgggacataatgaacaaaaaggacttgttgtgggtgaaatgggttaatgcagtgtatctcaagggtgccagtttatggacttacaacttaaaagcagacactagctggtattggaagaagttatacaggctgagaatggattacactcaacaggaaatcgattctgctggtgtgaggggaacttttagagtttttaaactctataatttgtcctttaatcaacttatagaccatgctgccaaagcgatctggtgcagccttaaagttccgaagcatggtttcattctttggcaggcggttcattcgaaccttctcactagagacatgcttagtagatttcagattgttgttgaaaatacttgttgtgctgtttgtggaacaggtttggagagtcatcatcacctattttttgattgcaggctgtctagtttggttcttaccaaactgtttagttggctgggtttcaatggttgggattcttcctttagcggctggtgctgctggtgctgctggttgtcttctttgcagccgagcttcataggtcggttgatggtggttttgttggcagcaactatataccatctttggaggaataggaacaattgtatatactcgaattattctaaaacagtgaattgtattgttcaaagcattagaaaagatataaagtatagattgagcatgatcaagaaaagaaaagggacaagaatagagattgatttacttgagagaatgatttgtaattaattgttgttgtgaggttggtctttctttgagaaagattgagggtgtatttgtcttgttcgattaatgaaattttttttcttgatcaaaaaaaaaaatatttagacattgttattatatttatcaaatgtgtaaagtgtaggatatataattactctcctacaatttcacttttttttttaaatatgtaaccgtcttccttacctataaatataaaatgctgatcaaagaggaaggatatcgaatcctattgtgctaaaactctgtcaaattaagtagaaaattctcaaaaataatattaacttataaaattagattaacttaattattatttgttttttgatgaaaagcgtttatattatagaataaaa

SEQ ID NO: 378223 - DNA, 2788 bp, Cannabis indica
aagctgaaaattacgattttaaactcattttcgtcaagaaaagaaaaatatgcattcaaaataaaattggcagaaaacttgtgacggctgccatagcacaaaatctcgcaatgatagaacattgctagaacttgatgaaaagtcattcctacgggaaattaaaaggaaaaaagaagaaaaaaaaacacgttaaattaaagtttcaagacttgcctaaacaaattccaaatttctctactaaaataaaataactcatcacaggagatcagcaacatttgaaggcagctcctcgatcaaaacattatagaacttctggatgtcagagaccatcctatcatcgtcggtagttatgaagttgattgccacacctttccttccaaaccttccactacgtccaatacgatggagatagttctcaggctgagttgggagatcgtagtttataacaagtgagacttgttgcacatcaataccacgagccaagagatccgtggtaatcaaaacacgggaagacccagatcgaaattcccgcataataatgtctctggtgttctggtccatgtctccatgggtggcagacactgtgtggtctcggctcctcatcttgtcagtcagccagtctaccttgcgacgggtgttgacaaaaatgacactctgggtaatggccaaagtctcgtaaagatcacataaggtttcaaatttccaatcctccttgtcaacattgacataaaattgcttgataccctcgagggtaagctcatcacgcttaacaagaatcctcacgggattgttcatgaactttctggtgatctccagagcttcagggggcatagtagcagaaaataccccaacctggatcttgcttggcagaagctggaaaatatcatagatctgaaaccaagaaaattaaagagtgaacaaccgcacatttactcgcatcataacaagtagagaactttagatgcaactttctaataaattcataatctattttcaaccacattcagaaggccagaaagaattaattcattgtaaaaaagttacttattaaccaaaaataaataaataaatagtggggagaaagtaaacctgatccttaaaccctcttgaaagcatttcatcagcctcgtccaaaacaaacatttttatgtaatcgggacgaagggactgtctcctcagcatgtcaaaaacacggcctggagttccaacaacaacatgaacaccacttgataatatgcgctggtcctctcgaacacttgtgccaccaacacaggcatgcaccttaacaccaagatagtctccaagagcacgcatgaccttctcaatctgttgagcaagctcacgagttggtgctagcaccaaagcctggcattcggtcacatcatagtcaagctgttgcaaaacaccagagcagaaagttgctgtctttccagtaccagactgggcttgttggatgacatcaagacccttgcagaatggaactattcccctctgttgaatggccgagggtttttcaaaacctaaagaagtcctcaaccaagtcagagatactatggcataataattgctcaactattaattccatatttatataataacaaaacatcaatcaagatacatagttcatgaaatcgaataattagaagtcaatccgatcagtattaaatccaactattctgttcatcagtaaatcatcaaacaagatacttaattgagaaagaaaaataaagttataccataagcataaatgcccctaagaaggttctctttcaaacccataagatcaaagctatcgcaaacttcatcatatgatttaaagaaatcatcttgtccatcaagtctataaaaaatgttcaatacagcaaacaaaaaacaaaacaaaattagatactcattttttcaacaaattatataagcaaccttgtaacacaaaatcaacaacacaaagtacagtcttagacagatgcaattcttacaactcagtcatcttggcatcatactgacgtgcgtcaaattgtgatccttctggtgctaatcccgccatgactgataaatgagcaagactaatgagtagatggcaaatcacaatatttgtatatgatgataaaattgcatagctctaatcaagaaaagcttactagaaaagcagacaaaaggaacaagacaaaaagagtaaaacgtttgtaatatctgtgagtttagagagctaagaagcctgtaagatgcctctctgcaacttaagtaattacccagaaatcacgaacctaaaagacttatgtagacttagctaatcagagagtctgactaatataataatgcctaacagaatttcttgtcgcttaactgaatgttttcaaaaaaaaattgttcgcttttcaggaacatgtcaaatgctaacaacaaatgctgaagagatgcaaatgaataagccttaattgttcacaactcgaaacaggttattagttggtagctattcaataaattattgtccaatttggttcaaaacttctctaaacaggttattagttgatacctattcaatgaaacatagcctattttccttctattaaattaccggataaaatttgaaactacaggcaacttatttgtccgtaggagatgctaaaataattagcattcaaaaattgcctagaaacaccttaattaaaatttaatttaaagagaagtttctccatggcaccaaacacttcatcaacaccaagatatagaattatcccaacttaacacggtactgaaataaaatacatgtaggaacaaataccataca

SEQ ID NO: 378224 - DNA, 3885 bp, Cannabis indica
aatagattttgagcttcatgtacttgtcgggaagaagacagaatgggaagacccacactcgatttacctgtccatgagagtgtaataatattaatattttatttgtatgaatatgaagcccagaaaaggaaaaatatgtataattgagctagcaacaaaaggacacagaatatcagatttaaattatttaacaataacataaaatcaagatgaaatacatgttaggaaaggtgcatgaaaattatgcatgtaacccttactccttcaaaagcctatgtacttctttatcaattattcagtttttcaaaacatactccattgttttacaataacataatagtcatccaacacaaggctgctcataggattgaagtttgtggcaaaaaggcagcatggtgagatggggacaagataggttgttagaggatgaagagcctgagggatcctcaaatttccagtcttgttattcatttattgtttgtagtcatttcaatttccctccttgatgtactaagttcttttggttccaataaaggactccactgaagacatattgttattgttcttgctggaaaactctcatattgccttttttttctcacaattactatagtaatggcttctttcattttttatgccaggttttcttccacaaatctatctataccaagaacaaccgagaaaacatctactcaaactttaagaaatattaaatgtagagatggaaatttaaactacgggaatgggtattcgtaaggacccgcccctaatggggtggagattccccgagttggcagttaatggggcagtagtcggggacaatttcaatacccaaagtggggttagggtgatactatctgcaccatatccgaccccaatatagatgtatagagtttcctttgttatctttaacgtatatatccagaattaaaattattgattaccaagtattatgcctattgttgactattgatctgccaaaacaagatgtaatattattgttaatttatcttttttctttatagaatgttgcctagcatttgtgttaaaatatatactagtgttaaacattttataatatctagtaatatggatacccgatggattccccataatcgatgggtatttccctaccccgaatctgtcctaccagacaggaatgagggcataaacaagtaatggtcatggagtgggggttgcattctccgcacattaactgcccaatttccatctctaataaaatatgttactctgccaaacaagaataactatagaaagttttgcataacttttaataaagtaaaattcaagtgattggtactacataacttaccctctttcaaagcaatgtatgcagccttcgctgcacttgtttcagctaactttttcgttttctctttttctccactgaaacgctttccttctatctcaacagttgaaacaaaaaccgggcaatgaggttcaccaaatctttccgtgctatatgttggtagatggagaccttttctctgaaccagttcttgcaagagattcttgtggaaggtagcatcatcctattgacatggaattcacataagttgtgtcctaatgatgtataacagtacatatgtaagcatgtatatgctcacttgttatgaaaaaactaaccttttgaaccacatcaggagacaatgacatcaaagcaacttttgcagctgcatgttcagcctcttttaaggtagagtgaaattccggtgactcgaatatttttccatcaactgttactctacacttaaatcgactagcatgtggcggaccttcccgctcagaagtgtatgaaggagcaataagcttatttttctgagtgtacatttgcagatgactcttgtacacatgttgcacatctatgaatcaaaacataagaaattaatgattccttgcaaaaattataacattttataataatcaagaaatatttaatcaatacaagaagaaccaaaagatgatgagatatcatcctggacatggatctaccaaaaagaactccaacctaccgtgattaatcataagtgtaacataaaagatttctagaatttaggaaagccataactaatttgatcatcatttagtaagtaaaaattaaaatcatcaacaacaacaacccactgatgacagtatgaatataaattttcttttaacaacaccccagctcaagtagaaaaaggagaatactagagagaatttctgacctctaaatttattttgactgacaagaaatgttgtacttccaatggtttgaggattgacactcgatgatgttttgtcatcttcctgaggtgtttgctgaaaggtctgccctagcccaactccatgtatagtttctacatcagtaattgcacctgaacaacatgataattagtttaaacaaaatctaaacaaaaatcatgtaaaaaacacaactttacgtacatcaaaaccctattatagataggtaaatgtgcttatacacccatgatttcccaattccatatgtaatcagccatcaaactcaaaaatccattcaaaacatataatcataatgagttaatcggtgaaattcgagaaaagtaaaaaagaggttacttaccggtggaggaggagaggaagtagggttgagggaaagaggaagcgttggggataggaggaagcagaggatcatcggtgggagagaaatggttgaaggcaaccctagcagcgtcgttttgggcttctttggaggatttggaagaaccagaggtgtggaatgattggccattaacaacgacggtagcggagaagcttgggttgtgatcaaggccttgcttggtggatgtgtatgttggaagagtccaatggttcttctggcataattcttgtagtttcgacttgtacattgtctctctctctctcttctctctgtgatttttttctgttgaggaagacgtggttaaatttaatatgatcttgtttgagtgagattctgcttttgttattttcatgtatcaaatattgttatttttccaaaagtttttgttgaagaagctaccaaaactggtttattaacatagcaattttgagcacatatctattattcaagagtaattgttgctgtcatgataacatgttgaggtgataattgttttatctaacaaattaatgaattaggagcccaacaaaacatagcaaccctaactattctccaactaaccactaaaaaagactccttcattctagctttcaaataagcaaaaatacattgtcacaaagaatgtaatatggtcatgaacacatcgtaccaactagcacatgctttatatgaagctgaaattttgttagcaaacactctgagattgctctccacaccacatccagaattatttagcatagtttgatccgtcttagcatcttgaattaacctataagcatttttcatggtatagcactcggacctttccttccccaaaatcacaaatcctttaagtaattctcactttcaccgttaaaattagtacaaaattatcatacttataaaccaagcaaacagggttcaacacttcaaatttcacaatgcccaaaaaggcattaaaaatatgactacatacagcaaaaaacaatcaaatcagttatattagtttcaaaatgacataaccacaaacaaacgctcttcttctgagctatttttcacaaaaagacctaaaatgcaaatgtagaacagagggaatcacctgagaaaaatcaaacaaccatataaagttgagaactcaatttggattacagcataacagaatcaaatcagaatattagcatatttggaaaccactaacttataaactattttacagaacaaaacacaggttgatttaattgcttttaacactgtacacaaac

SEQ ID NO: 378225 - DNA, 2614 bp, Cannabis indica
gggtttctggtggggattatgtgcgatttacgggtatttatgggaatcctaatgcttcacaaaggattcttacttggcagctacttaagagaattggtgattgtgtgagagggccttggctgtgtggaggagatatgaatgagatcctttccaactcagaaaaattagggggtcctcctcaagggatggaagctatggcccgattcaagagaagtttggattactatgttttggaggatttgtccaaagaatttaacacctttacgtggtgtaatggccatcgagatggatttgttcaggaaaagcttgacacattgttcgcaaatatggaatggtttgatgtttttcaaaggcgtgagttcaaatacttggactggtgtggttctgatcataagtcgatgttttttagctgtggttataatgttgtaccttcaggtattgttcctaagaaaaaagcactcaaggttcaggaggcatggggtgacgaggaagaatgtaaaaaaatcattagagatcattggatggacggtacttcttgtgtgaatccggccatgctaaaagtgaaaagctctcagtgtgggaaaggtttgttggggtggaatattgtttgacggaaagaggaggcacaacaggttgcagtgattcaacaacgtatctcaaaattatcaagtaatatgaactcgtcaaattggcagctacttaagaaggaagagaaacaattgaatactattttagagaagaaggagatgtattggaggcagcgtagcagagccgtttggataaaatgtggggaccgtaacactaaatactttcatcacaaagcttcccagcgtaaaaagaaaaaccatatcggctctttggttgatgatcacggggttgaatgggttgacagtgatggtattaaggatttagtacaaagttattatgacttactgtttactacttctcagccggccttggcaaagattgaggaagtgcttcttgtggttcagtctaaaattttaatggagatgaatgcactacttttggctcttattacgggggaagatgtggagtgagtggtcaagagtatgaatccaatcaaagccccgggtatggatggttttcctggtttatttttctaaagttctgggattttactaaagatgatgtttcttgggtgtgtctgatagttttgaataatgatgttccgttgcaccaacttaatgaaacttggatagcccttatactgaaggtttctaagcctactaatgtggctgaattttgaccaataagcctgcataatgtggtgtataaggttgtgtctaagtgcttagctgagagacataagttgactatgggagatgcgatttccagtgctcaaagtgcttttgtcagcgggcggatgattcatgataatgctattatcaggtttaaaggattgcattgtatggataaggatagatttggcaatggtaagatgatagcactaaaattggacatgtcaaaagcttatgatagggtggagtggaaatttattgagttaatgatggttaagctcgggtatgatgtgagatgggttgcgaaaataatgaattgtgtgacatcgatgtctttctctttcataattaatggagaggggaaggggaaggggtttaaggctgggagatcctttctccccttttcttttccttttttatggtgaggcgttgtcttgcttagtgaaggctggcgaggctcggggtgacattaatggactgcggttattcaaggtatgccagcctatgttatgagctgctttcagctctcaaaatattttctcaatagtgtgcatagcctagttgctaagttttggtggtgttcgacggagaggaaacggaaaatacaccagtgtttgtgagaagatttgtgtaaaaggaaggtgcaagagggactgaattataaatatttggagctttttaataagaccatgctggccaaacaagtgtggagggtgatgcggaatagtgattcattggttgcgcaagtgttgaaacatcattatttttgaaatggagatgtcttatcggctaaaatggggtcaagtccttcggtagtttggaggagtgtaatgtggggtagagaaattattttagaagggtatagatggcgtattggatcgggagataacgtttggattgtggaggatagatgaataccgaggcctacggagttttcttttcatgtcaagccagttattccctcaggtttaagagcagttgatctttgtttggggtctggggaatgggatactgagttcttgcgggctcacttttgtaaggaggatgtcgatcttattcttggagtggtttcggttgacttggatagtgtggactgtattatctaacattaaaatactagtggggagtatactgtgcaaagcggataccaagtgtcgatcaaaaaaagagagattatagaagggtcagatagggggggagtcgaacaatggtggaggaaggtgtagcgattatcggttccgccaaagattaaacattttctttggcagttgtgtcatgagtggctgctgacttgtatggtttttcaagaaaaggggatgaaggaggtgagtgggtgttgtcgttggaaatatttt

SEQ ID NO: 378226 - DNA, 5598 bp, Cannabis indica
cccctttaacatttttcaaaacatatgtgtttttccaatcacgactgacttcaaaaaaataaaaaagtaaaaaaataatggttagaaatataagtgaggcttcaaattgagatgactactcaacaaatgggaagtgacacaaaaatttgaaataatgtcgtccatagtttttgaacaatacaacaccacaaaacaaaacgttctccactgttacctctggattgaaaactgcagaggacttactcacatagcagtagggagacaaaattgatgagccatgctcatccacactcgacaaagtcctggtaacctgtccaagcattttcttaaccctcgggtttaattctttcaaagtactcaaaatccacagcctcaacatattagtaagtagtaccgtaccccattcgcctagttcaaaagaagaaaacacatcatgccatgcaatccacagctcttcaccagattttcactctttggttttgttcaccattaagattcacaactcatagcccttaaccgtgaaggtatcggaaacctaagagcttggatattttgaaaaataaaattttgagacagttctgggccaaaatttgataaccatccaaaccgcgaaattgcatatataggattcacaacacttcacccctcaatttccaaaccatagtgttcctccaaaatgcctctatcagttcttccaaatccacttgctaccttttccatttccttgagttttatgagttctcgttttatctgattcactcggttgaagacagcagtgagcaagtcatcctcgtcagttgatgatacatgacgtgtcaatgcagacctctcaatctcaagttgctggaacaaattagatagacaattcttctgagtataaagcctctcctcggccatttcatattcgatctcctgtgactttctcaaggcctgcaaaacttgatcaatctcttcttctagtttgagagattcagttttccaattaaaagactgaatgtctgtttgaataatattcagagggtcttgctggttaacaacatccagtgcagcatcttcattattagaggtatctataagcaatggaaaaacatatattactttgtgatacaaacatcagtgttttaaattccattatggcagcacatgtgacatgaccctatccgtgatcttaggttgagagcaaagaattatgggtgacgagaaggcgcgtgagtttgtatgttaatccagtgtgcaatgcgttcatacacaaagatacaactttctagaattccatgacaaattgtatgctaagctaaagaaaagggaaaaaaaaactttaatttgtctggatgaagagagaaataattttgagaccatttcctaccgttttacctgatgatacttcatacacaaggacatgaaactggaaaaactcatgcactggtataaatataattaagacgaatacagtcgtataagaattttaagaaattaccttcagaattagctgatgaattgtcttccagcttccagatgtcctcaatatgagtctcgtgttcaagctgatgccaaaactaaatggtgagcaaggctttaaatagacagctacactttctattatacctaaagaataacaaatctacctttccaatagccaactgaatacgatttaacaacctctttgcactagttttccgcgatccatgcaaaatggagacaccaacttttaaaattctatcaatatcatctcgagaattaattgattcacatgtttgcaatagccttgtaacatgtggaatcaaatctgtctttgcatcacaacgtcgacaatagtactcggcatccaacccaatgcttcctcctaccttccccgccatgtaacatcgtacagcacagtcaatatgtgcaatatgcccacaaatataactctctcccacagctgcttcacacttgatgaaactgtagccttcataggtataatctacagtcttacaacacaaaatacaacagcaatcacgacaaaatcgagattcagtgcagcagatgtcacaaggcatgactgctacggaagaattttctacttgctctactagactgttgcacatcttatttctagccttacaacctcctgtatcagagttagaatccaagtcatctgtatgctcttcagaaggtagaagtacattgctccatggtgcattacctgttattataaaagataaccagttaatcattcaggaattttggcaacaagttaccttacacagtaaacatcatctagcacatgtgttaaaaaagggaccctcacagagaaagggctcgagaaacaatatcatatgcatgatgaaacaccaaacatgtgaaaaatgcaaaatcataaataacttgtgaattgtggaagattacagaacatattttgattccttaaggtgacctatctagcaatatgctaaatgtttcctaacacccaaagaataaagggttcagcgggagaaccaagtataaaaagaaatcaaattaatatttagtttagagtccattttacaacttcagaagtggtgtgcagtcagcaaatcctcaagctaccaatttgctatgaccatatggtaaacttttgtgcagggtagtgtgtgggatgaagaatgtgtccctgaaaaatggcatgattcaactttcacaattgtgatattacatgatggattggatggaacagatgaccataacatactaaatctaatggtcagaactttgtctctagcagccttcaaagactattacttagtctctaacagccttcaaagacttactttccaacagttgacaccattaattcacttaatagcggtgtaagtggtaaaacaatactagtgttaaatttagacaatcaattatcttaaaaaaccaaactattatgtgttaaagcaaaaaaatgtttggatattgtggagaagaagaatgtcaaactgcatcatatttcagagacataaaacaatgcagaagtcaataaatctgtagaaaccagcaagaacggaattaaagctgaccatttgtcaatgatgatgattgtgaagggattttccaactgaatgatgcaaaaaaagcatcaagatctaccccaggaaatttttctcgaatatagcgttcaactgaaagcttgctagcaaaaccgaacttacgaccggacgcctcacttttgcaaagacgcttgggaagatacagatacctatcgagaaagaacccacttcgagcaattctctttcccacccgccaaccccaattatctccaggcttcggccaattcgcaggaccatagggcagaccctcaccagctgaatcctggcataccggctttaaaacttgtgaatcctcttcagtgcctggcatgctttcttcattttctttgtaagcttctacctccatcaattggttgattggttgacaaaaaggtgaggtctagtatagtgtagccaatgccataccaagaatattaactgcttatggagtaccctaaagcttcaaaaaacacaagcataaaaccatgttgcggctcaacatcacttgtatgaatataaatagcttcaaaatgcaaacatttaagcgaagcataataaaaccatttcaaaaatactttatgcttttacagtcatatgaaatgcatgctccactcatttaatttatatgataataggtgccataaaccaatcagagataaaggcacacactagcaaaatcactgctcataggcaacccgcaaactcattcaaaagagaaataggcttctccaatttcgatcaatcacacttaaataccaaaaaaaaaaatgtaaaatccaaactctccttgtctccacataatactgagaagatgaaaatacatgagaaaaaatccagatttcacttcctaatcctgatgtatatattaatcttaattaaattttataaatcaagtgtattgtcatttttaatgccttgtgatgacttagttcataaaattagaaaataacaatttgctaatcacaaaataacaaatcaactacactccaggtggtacaataaaaaagttgagcttcggaatgataacagcagtatgtttttcacccatatgctacttacaaaattacaagctaaactgccacaaactatacaggaaactacaactaatttggtaaattaacaattaacccaaaagaaaaagcatcatagtgattttagtaattaattaagtactcaatcaagaaacagatgaaatatgacattgaatcttgttatgaagtatttcaaagtcaaatttcccagaatattataatgctaatttaattttaaccccaaagactgaaactttatttccatcttgtctgctaaaaatttgaaacccttgaaccacatatttaaactagaaagaacatatattttaaagatatttgtttcttaaggcttacattggtgggtggagataggtccataagaatatagggcagttctttagtggttcccatgaaatgtttttggcaaataaaatgttataattctaaccttttttaatatggttatatggttgttatagtaagactcacaccaaatttcggacacaaagtcaaaattggctttgaattattcataattttattaaaatgtgtgaaaaaatctctttgaacgatgattttggtatttgccaaaattggtgggggtctgctacgactgtaatgtacaccgcttataaacaaattagggttatagcttctccatgtgccgaaaacaaagtggtcttctttgtagaggactcctagagaattttccaagaatatattgtccactaagatcaaatgagacaaggaaggaaaaaaaggtctcaaccacataagcaatatatttatgtgcaacagaaaattatgggaaaagataaaaagttgtgaaaagagaaatctcaatggaacaaaattcaattatacaagataacttaatttgatagctaaagtaaccatttcccaatatactctactctataaatgcataacaaggataggatgtagtcaccttttgggactggtctcttcgcactcttcatgcaatattgcgccaatacacaacattattggtgcaatattacataaacgatgctacatattgtgtgcatcatgcaaggagacaggtctcaataggagactacatccaaaacaaccgaaacgcaaaatataatcatctaattttaatcatcttttataagttattctaaacctaccaaggatttataaacgcttataaatttctccaaatccttcagaattgtggtattataagctcaaatattgagccatatggtttgctaccacaagtctaaggttcaagttcctcctggatccctatgtaaccattgcttagtttcccaattgggttgctacataacaattgtttgggtatctatataacaattgttatagtttccacttccaagtccctactgagtaggtatataacaattgttatagtttctagtctcagttattgttggttatgtggggagcctagtctcaactatggtttataaggcttattccttaaaggatttgatttcatgggacaatgatcttgcaagcaaaacatatatatatatatatat

SEQ ID NO: 378227 - DNA, 2754 bp, Cannabis indica
taaataatatatatgatgtgtactaataaaacgcatcagtagtacaaggtagcattcaacacttactcattaacggaatagtggagagcaaaataaaacgggagtttagaattaccattaaaaattgggtttttgaggttaagtgtaactaaatgtagagtttgggcaatattgtcgccaatatctctaataagtatattgaataataaataatgtgtaatattttaatttttatgtaatttaatattttgtacatttacaaactttattttcgcattaggagatttcttgtctcgtgcatgtcccattaagggattttttattctgttctttatgggttataaatgagaataggaattaaaattcttaaattgataggggattactcttcgccaattctctactacgtgtgtatgcctaattagaatgccacatttttcgagttagtatcaaactgtattagacatactctaattctcatacatttcattgataattctttcatttcattgataattctttggtgagaattatattatatattcttaagtatttcatattactattaaattactaatacatttcaaaaaaaaaattactaataaattcctgtaatattttatagtataacactcttccttcctaattgggtccaggagttgaccaaacaccccctcatttcaaacttctagtattaatgtgatttttttttaccttaccaaaaaaaaattatgtgtagtgatttgtgattatcctccaggctccaactgttttctatacatacatatatatgtttcattgttaaaattattaagctgtatttataggaagaaaatgagttggataattaggcctggtcataaatataaaaataaataaataaatggcaatttggcatctcacgtgtggggtatctaattctatctctgctttttctatgtaactgcttttacaagttgttccgtagtctagtgaatatatatgaaatgtgccaccaaagtcatgcgtcatccaatactctattgaataagaataaaaataaaaatatctctttagggaggattatactttggatcaaaatgaacttcctacaactaaacattatcattacttttatattctatgatcaattgtcacaagagacaaataaaatattcattttgagaagtagttagagaatatgagcatagttgtcatattgatacctaaaatattgtaggaaaatttaatgtgcagaatccacatatatttttattatgattgtatatgttgtagttattttgttattaagacgtgaaaaatatagttcaaacagtatattatactcttttattttatatacatgtgaacactaatttttatattataaattattttaaattttacataatatattattatttctgaatacgtatattaataccctttttgtggggcacaccggtgtaaaagctccctaatatatccatacaaagttcaagatcgtattagtttttgaagtgatgaaatattatacattaatattaattctcctgataatttttttcaataatcttacatgttaatcgaaaagaaatcatgctatgaaaaactacatccaacaaaggaacaacatagaaaaaggaccaaggttcgtatatgaccctagcaacaaaccaaagtatacaaacttgtctgagaaattttacaaataaataaacacactcgcacttcactaatagaagcataacaaagtcagatcacacaaatcacaaccaaaattacataacaaaacaaatactaaaaaccattattataacaaaaaaaaactaccataaagtaaaacacaaacagtgaaaacaaaacaacaactcccttcaaaaaaaaaaaacaaaacaaaactacacgtacgctaacagggagtaatcacgtgttgtgtgatgtaatagtagagtatttttttttttttttttgttattttttgcttcaatcaagggttcgaatcgcaccacaatctctcttagaatgtttggcatttttgttggggtatcaactcaagtcccacatcgaaagaataggtaataattacattagatataagtgttccacatactccattggtatgggaccttttgggaatgtgccaaaaaaacaaaattgtgagggtctaagcccagaagaatggggcgcaacaagtgatgacctcgggattgaagatctatagtgacttgtataaaaaatctacctaatattgacgggtggtcaaatagtgtgtcccattgatgattacaagcgatacaaaatggagatctatgtcaaaagtcttcctgacaaagttgatggtcaggcgacgagtcttccacctactctattagtagacaatatcatactaatgttggagctaatgtgaggtggcaacctaacaaggtggaagaatggggagcaacacttttaggaggctagcttgttgtagcagtgtcatccttaatagaatggaaacctttgaaggtatattgccaatgactaaatttaagggaggatgaggtatgagtttcatatagctagtgtgtagtcctcgagattttctaaactaaaggaatggagaagggatcgtcaccacgtgatcacaccaacgacctacaagccaaaaggagcgacaagtgacattgccaagcaactgaacaatcaagaagagaagccccatcttggggtaagttgaaaaatgcctcttttattcatcaattaatcaaatttacctctaattttatatttatt

SEQ ID NO: 378228 - DNA, 3276 bp, Cannabis indica
tgattttgctcaaactataactttttctaaataaagataattatgtgaataaatcttttcatttttttacttttttgtgcttatttgaattaattccatattttagtatttaagattttgtgtgaatgtttttaatttcttatatgtttgttcatttcatccaatttttcaaaaggatgtatatgcaattttcatgtagttttaataattaggggtcactcaacacctttgttataaattaggttgtcatcatttatattaaatgttacactttaaaagtaatatggtgcattgaaaatcatatcaaaaccaacaccaaaaatagtaatgtgataccttaaattataactaccaataaagataaaaagaactaaaagaaaaatagtgattgtgacacataatttgcacacattatttatggaaattaattacacatgagtgtaatagactctttattttatttttaggttgtaactttttctttcgtttatagattttataattttgcgattgataatatggttaaatgagtttttgctcaaaacttaactagtataattatggaggtatcaacaatgtcaacgaacattacctataaggactaggaagtctaaatttatttattatctatagacgctacttttaaaaaaaatattctatgcactataactttgtttttaagaatgtaactatcggagtacttatgttgtaagtacccaaatttttgaaattgttattgctataaaattaataattttagcgatataagtactcaatattagtataattgtaattttcgtcaagttttatcactacagactcaattagtttcaaatagaacacatgtaaaactcaaaacctaaatcattaaatctagaaaaaaaaatgtaaagtatcacctatgtacataaacttttgctttcaaagaatataattatcacataattatctataataaaaattaaatatacacataaaatttgtgggcaataaatttacttatacataaacttttgctttcaaagaatttaactatcacataattatgtgtacataaataagaatattaacgttatgagtatctattgagtttaaaaacggcataaagttaataaatttttttacgacataagtatctaatgttatgtaaaataaattttcgtcaagttttgtcattacatcttctgttagagtcttaaacaggacacatgtaaagcctaaattttaagtctttaagtatgaacaaaaacatataatatcagttaattacatccagattttctttcaataaattcaaatcactaaatctgattacaaattcaagacactaacaaaattcataaggatgaaataaataaaaattataatttactataatgcttacatatattgactctatataccacttatacaaacttaaaactttattatatcgtaaatacattgaactttttgtaatgaaaaaccatgtataggattaagatttattttataatcttgaaatgatataaacaaaataagaatatatcattgtatacttttacaattgcacttctaaaaggggtttataatgcacccttatttattttggtattgaagagaaatttttagtttaattttttttatggtctacgttgtagttatatatatttaagtcatcctgtaaaattttgagaaattcaaaaaaattaacacgccgaaaacagggttcaaccagtctgttgcactcgagactcttttgttttctatgcttgtaaaatatactgtttgaaccctattttcagcgtgtcaattttttttaaataactacaacacacagatgactagaaaaaaaattagacaaaaaattcaaaacagataacaagtgcaacaatagatcccttttatgggtccattgtataatttttctatatcatatatgaaatgttcatgtggtttagaaagttccacacataagactgaaaatagcaatatttgattttggaatttgtgtggtttgagttatatatatatgtaaggtacatttatacatgttgatagtacaaaagccaataataaaaacaaggatagtgattttgcatatgggttataatttgttgcaaacattattttcttgccattttgaaagttacaacgttgtccatatatactacaatattattatatataaagatatgtaatttttcttcactcacataatattatttatatgaatatataacgtacgtgaaaatcttatctgacctcaacatcatatatatttgtacaaatagccaacttcagaaaagaaaagaacatcatcaatagtttcttttcttacatgtgactcaaagtactttttacctttttgtgtttcaaaattccttatagttgtaataaaaatgtaacttgatggtgttaattttttttcacctaaggtaaaaataataataatatgtgtatttgaatacttgttatgtgaaaagccttttcgatattttaatatgtggagtgaagtatcagattttttagtgagagttgagagagatcgaaagcaagaagtacaaggtggtccaatgtttagccttactcgaaaactcaaaagaatcaagctaattcttaaagaaataaataagaatgggcttggggatcgtgggggcgcaacaaacttttactaagatgaatgtttggccggaagctcttcagaaagatccaaccaacctaaatctgattactcaaaagacgaaggctcaaaaggattatacttgttatctatgttttcggataaaaacaagtgtaatcccaaaagcggtatagtcgagctacttcaagcccaacagcaggtcaacgataatagaccatatccgttagtgaagtcatatcttgcagatgttgggtatatgactcgtccatgtgagatgaccctccagcatagtgtattcggaagacctcagtcagagcatccagagaagtaaccagcgagcattcaaatatttagctcataatcattaatattatcagatcccatgatattaatactattctaaagatttcgtctgaggatcatatcttcccaatataaaaagataataattgacgaccaagcattaaagtatctttattatccacaaaagtaggacacgacttgacaactataaatgagatgtggcctcacgtcatcaaacaatcaacgcctcatgggcagggcctcaccaaatcggcccaaagtcattatattatctgtatttaccccatcattgggcaagaaccctagcactatatatataaatatatata

SEQ ID NO: 378229 - DNA, 4893 bp, Cannabis indica
gttctatttttcttcatgggcatgctttttcataaattcagatgctttgtgatcaggcagtaatattatctttattgttgttgctatactttacaattcaggtttcattactttttaatagaatcttgtctcatttaaagtttttggcctaacttattttgtcctgcagctcactgtcggtgtgtgcgttgcatccttttgactttgagagtccatgcactttccgagaatatacctcaggatattaaggtaagaattggaacaattatttgcttatttaaaaagaagctcaagttaaatttatgctgtcccaaaaagtatgcattgtccatgctgaagaacacttcattatttggatatgcaaaattgcaatatggtgcccacattaagtagtttttcactgttgcaaatttcagttatctgtttgattgcattcaaggaggatttggtgttaatactatctatgagttgatgttactgtagagtataggcacactgatggtaaaatctacgtaaaataaaagccttacactattcatttcttaagaatacatgatctacttctaagatttggaatttgaggtattgattttaaatttgtttcaaaaagaggcaagttaggttaactcgtagccattaacttgatctttttcagtttttacatatacataattatatataaagaaacagaacatgtattcatgaggaaattatttggttttttttttaattcttaactgattaattttccatttcttccatctatctttcttacaggtagagattgaaaaggcaaaagaacaactagatggcaaggtaggccttaggcattctatgattaatatatatatatatatatatatccttgttattggttgaaaattcctcctatctcagtagttcttgattaaaagatgaatctgtttgctttattgaacaaagaaattgaaaagtacaaaatgaaattccaagcttttgagaggtctggatctctccaactagatctatgctctcccaatttaacaaaatatccaactgactctcaatcctcactaggccacctgtaagaatctgaccaggatacaatttaattagttaattgataagggctgactaaaatactattaattaattaataaggaccaactaggatacaatttgtttaatactcctagaatgtgcatttaatattggcctatcagttatctcgtgaaagaaggcctcaattgtttgaatgatgttttgttgaaagcacttaggaaagtaatgggaaattctaataagtcaggttaatgagagtatcattctttgttgctctcactatgaccaattgttaaaaccaaattttttgtttcctcatctttggggtttgcttcctttggcataataatagtgataatgtaaggatattactataattgcttttgaaaattaatttattatattgtgttctgcaggttgtcgattatgaagccaccatggccactaaacttgcgattgctaagaaagtttttgcacaagagaaggagttgatacttaattccagttcctttcaggagtttctttctgagaatgaggttttaaattttctgttgcttcttgcactaatattgaaaatgatttgtttgcagcaattgataccttcactcctgttataattttgcgtaggattggttgaaaccatatgcagccttctgctttttgcgagacttctttgaaacatcagatcacagccagtggggccgcttctcttatttttcaaaagaaaaggtaatcatctagttgaattaacaagttggctataaaaagttggtaatctgcatctttatttgttcttctttttcttgcatgtttgcgcctactatttagttttatatcttgagtatattgtctgatcagtttgcacacaaaagtaaataattagagattgaattcagtatgatgattatggaaaaggaatatgtttcaaatatatcaaaaaccaacaaagctttttgtctatattacagcttgaaaaactcgtctctaaggacagcttacactatgatgttatcagcttccattattatattcaatatcatctgcacttacaggtaagtagttctacgtatctattttgtacatcactcgatgtctacaaaaagataatatattgtttggttatgttgtgaaatgccagttgtcagaagctgcagattatgcaagagaacaaggcgtaatattgaaaggagacctacctattggtgtggacagaaacagtgtagacacctgggtttatccagacttgttccgcatgaacacatctacaggagctcctccagattattttgacaaaaatggacagaattggggatttcctacttataattgggaggaaatgtcaaaagataactatgcttggtggcgagctcgtttaacacaggtttatacgcgtaacgaatcttaattgtatctttgctttattgaattattttatgagatgaagaccaatgtttccttgacagatggcaaaatacttcactgcttatagaattgatcatatattgggcttctttagaatttgggagctcccagagcatgctgtgactggactagtaggaaaattcagaccttccatccctcttagtcaggaagaattagaacgagagggagtatgggattttgatcgcttaagcaagccatatattcagcagcaattcttacaggttacagaattattcttattttaaatttcaacagattcttacaacttagagaaattttgggttttcatgtttgtgttattaatcgtaatatcagcctttctcttgtagattacaattttaggtcttgtctaaagtatttatgtttcattgttgtaaattatccatttatcattttattactgatacctttacgttttaagtttttctttttcaggataagtttggagtttcttggcctgttattgcttcaacttttatgaacgaataccagaagaaccaatatgaggtgtgataatcacagtcagatttttatttttctgcattttcgtaattgcagttagaacttagagttaaatatttgtaggtatttcagtatgttatgttgttctttgttttgattatttacttgtaggaagcggcaacaaacaataggttaaactttaggcattttttcatgttcttttgttagagcttcatgtcagacagcattgcggctgtttagtagtttgatctcaagtcatgtcgaacaaacactttttagtaagatgaatattatttatttataaatttttggtaagaatagtaaaatgcaaaataatcatgattgccaaagttgatattttcacacaagcacacttttagtatgatttatgaaatagccaattagctaggattttaacatatgcaatatcaacggtagtattaaggatatattggataaagcttgctagatttcttattgatattgatgaaacgaaatacaaaatcccaagcatttgagaggcttggtccctctgagatgacctagaaacaattctttagttgattctcatgagctaggctcatctatttatacaaagaaatcccatgtcgttaataacacacttccctttaactccatacccatctcagccacagaaacaactaaattagaccatcaaggaattaaagaaacatcacttctctcatcttcaatactcgtgtttctcattccttctactacacaatctcccacctctttaacgcatcacaagtctttgatgttgcataggatgtctccctgttcttctatatcctcttcatcaccttctaccacagatgcatcactatctgaggagtaatcattgatttcctcatctcttgggtcttcgtcttcttccctattatcaaactgtagattgccagtgtttccatggcgttatcctctcgattaggccaaactgatttcgtcttccttgtataaactttccactactattcattgatgacaacctcttctaaatcattctactctctattattcaaaaccgataatcctttatcttttttctgctcttcataatcagcacagaaattgatgacagcttccagaaagttctctatttttcaaaaaaaaagaaagttctctatttttaggccggattcgacgacttaaatgcccttcaaagaactcacgaattattttaattggtttctttgtaggagaaagaaaccagcatctcctttattcaatcaccctttatagaaatcgtgagttgtttcagatggtttctttttgggctattttcaaaaatatgggaaaaattattaaggctatgataaacatggcataaaaagtaaatgccactaaatatggcattatttaaccaattaactaaaaccatataaaacattaaaaagaattctgaatttaaaattcataaaaaataaaacttaattaaattaccttaaaaaatattaaaattcccttcatatttatgtcgaagttgtcactcgtgccggaaaagtcaccggagtttactgtcggcaccgaaaaagttgtcggagtagccgccggtgtcgaaaaagtcgccggagttgctgccgacgctgaaaaagtcattagaattagcattgtcgctggaaaagtcaccaagaaactggtttcttgatgaaggaaccggttttctttcttggtgattttttcggtaattttaccggtgacaatgccaagtccgacaactattctggagtttgatatcgatgccggaaaattcgctggagtagttgtcgttgtcgaaaaaatcgatggagttattgccggcgtcaaaaaaattgtcagaattggcattgtcgctagacaaatcattagaaaaatcaccaagaaagtaggttttttctatcaagaaacaaaaataatatactctga

SEQ ID NO: 378230 - DNA, 6261 bp, Cannabis indica
aaatatttcggaagccatgttcttttttttgctgaaactgaaattgcattaaaccagaaaaagagaaaaaaccagcaaactagtccattgtagcaacaaggggtgctacatccccgacaccaagaggcccaacaatgttatgggacgcagcccaagcagccacattgtgagcgagcgagttatccttacgaggaatccaaaacacacagcaattaacatcaaaattcagacaagaatataaatgcagaaacatattagtaagcttccaagacgggatggtagatccgcgtatagccgaaacaagagggaggcaatccgaaaagaagttggcatcctcacaattcatccgcagatataaagaaaaagcatggcataaagcccagcactcagcctcaagaggagaagcacatttaaccttggcagataaagcatcaagaaaatccctttcctcatttagaaccaccaccgcaatgaaggcaagatcacctcggacagccgcatccacataaaaattcaccactttgggcacgggttgggcagtccttgctggttccagcaaaggttcatcaacagagacccgacctctctcaagcaacctattataatcattaatggcagccataaccttctcaataatagatgaaggagagggaacaataccttggtggaagagctggtttcttgcatgccaaatagagtagcaaagatgagccgcaaactgagggaagtcattgtcattcggagccaagaaggggcagcacaccgaggagaagatccagggaacaatctccgaatcggaaccgaagcaaagtaagtcactgcgaagagcataggggctggcaaaccagcaagctctcgccaaggagcaatggaagaacaagtgtgagagagaatcattgttacctttgcaaaagacacatacggagctgttcccaaacacagaacgaaggcgatccccacacgggaggatgttctttttcatcttccaaatgaagagtttaattcgttcctgaaccggagaagcccaaatcttcttccactccatattcgaaaccccgagccttggtttaatcaaggagagataggcttgtttaaccgaaaaggagccatccggcgagtccctccaaaccaaagtatcttgactcgcaccggggagagcctcaatattgagaatagttgagcaaacagaaggtaaaaaccagccagcaaggagacttggatccaaagcccccctcacagagcagagctcgctaagcatcaccactttaggttgttgaattcttggattgaaggcagctttatactcctcccaagtgagccccggaatccacggagagtgccaaacatcaatatttcttccatccgccataagccaacaagtttcctgacgaataagattcctagacaccaaaactccgcgagcgaatctggaagccgagttcgggagagacaaactccagaaggaatcattacgcttacaatacttagcccgaaacacacggcaccaaagagagtcagtccctctagcaagacaccagctgagtttagaaatcaaggatagattgagatcaaagaacttcttaatccctaacccgccaaactctttaggcttacaaattgagtcccagctagttagcgctagatatcgagatttgtccacacaaccaatccaccagaatttcctaaccaacttgtccaattcagagcaaagactcaaagggagaaggaaagttgacatgggataaagcggggtggcagacaccaccgatttgatcaaggtggtgcgactggcttgggaaagcaacttgcaccgccaaccttcaagacagttcttaactttttccaccacaaagttgaagtcccgactcatacttttagaaaagaagaccggatttccaaggaacttgtcctccaaagtcataggccgataccccaaggtggttagaatagtatccttaatatcatcacgcgtattagcagagaagacaacagaagacttggcagaattaataagctgtccggaccacttgccataagtaaggagacattggataatagtgtcaatctcagaagctttagccttgcaaaacaagaatgtatcatcggcatacatcaagtgagaaattggggggcagcggggacttactttgaaaccatgaatgaggcctctaccttcggcctggatcaacaaacgagacagcacttcactacatataataaacagaaaaggagataaaggatcgccttgacgaagaccccgagaaggagagaattgtctgagaggacccccattaaggagcacagagaaagagaccgaggatatacttttcataacaagctttctgaaatcatcaccgaatccgaaggcctccataaccttatcaataaacttccattcgagacgatcataggccttagacatatcaactttgaggccaaaaaacccggatctacccttctttttcttaaaagagtccaagatctcatgagcaatgatactattctcagcgatccaccgccccggaacaaaggctgattgaaaaggagagataaccaaaggcaagacaacacgcagccggttcgccaaaagcttagcaattaccttataaacaaagttacacaaggaaattggacggaactcatcaaacttacttgctccattctttttcggaataaggacgataaaggttcggtttaaggacttaacgaactctcccgtgcgaaagaactcgataaccgtgcccacaacatccttgcccacagtactccaatgggcccggtagaaccggcccggcatgccatccggacccggggacttgaggggggccatagaccacaccactttacggacttcctcctcagacggcactctagtaagctccacattcatctcatcattgataaccggaggcagaagttcaaaaagatcctggccaatatcgggattcgaagaagagaacacttctttgaagttattggtgaagtaattaccgatctcttgtcgggtacgcaaccagaaaacaccatcatccgagaccgagcttatgaagtttcgtttccgacggatgactgtcgaggcatgaaaaaacctggtattacggtccccatcccgtaaccacagttcacgggacttctatctccaaatattactttgccgagaggacacttcctcaatctccaaaaggatgtcagcttccaactttagatttaccggggaaggatttcgttgttggacctccaggagcaaagcttccaaggcaaccaatttctctttacaaaatccaaacacctcacggttccacttagataacattttccttgtgttagagatccgagagaccaattggaagcttttggctccagacaccgctaacttccaagcatcctggaccacggttttgcaagaagggtcactagtccaagcatctaaaaaccggaaaggtttatgataattctcaagatcatggagaaggtccagaacaataggggcatggtcagaataaataataggcagcgcactcaccccagccttggggaaaagagtaatccaatccggagcactaatcactcggtccaatctttccttaataagatccgggtgctgcctcttgttcgaccaagtgaaaaaattacccacacaacctaagtcgacaccaccagagataaacaaaaaatcagacaagaattgaaggtctccgggatagacacggtttcctccaactttatcgccattgtccaacaaggcattcaaatcaccaagaaccacccaaggcagagacaagtgagtgatatcaagggcaagagactcccagaacgaagctcgatcccctcgcacaggagggccataaacaaataaaccaatccaagaaggcacatttaaagtattatcaaatcgaaccgagatcagattcttttctgccttgagtctagaaaccaccaccccggctttccaacacaaacataaacctcctgaagcaccagaagcttccacaataatagcatcaaagaaacccatttggcgccataaaacatccatcctggccaaattgagctttgtttccatcaagaagagaacatcgggattctcccgtaagaccaatccccgaagggcagagactgtccgagcctggcccaagccccgacagttccaagagaagagtttcatggggatttggggggcatgataaggcccgcctcctcggccattggaaaatcctgcgcactatcaatattctctcccaccagagagtgcaccaagagaggaactcgcgcgtcagacacacaagagtcacccactttaacttggccatccaaaacagcaggagcagaagcaacaagtaaacccgaatctgtcactaactcacctcccgaagtaaccggaggcccaccaagccgacttggactgagaggcacctcactaacctcaattccccccgtcaaacacactcttttagggacaaaattagtttcgctcggggaattatcatctgcctcaataatgaccgcactcccttcaccgaagacatctggaactctatggttatcaagaacagcaatacagtcattccccgtgctctccccggtaaagcccagttcgagatcagagatagaagacactttcttcctcttattgccaatttgaaggtccaaatccctatttgagaatctaaagaccggtttcttttgaattccttttgggccaatcaacttgggccttttaagttggtaggtggacttggaccgggaacccacacactcatcattggtgcaacccgcaccgaaacgaaccggagacaagtgtttttgaaaaatctcagcaacacgttcaacatgttgagtaggaaactgaagatcaacatagtcattgtaggctactgaaaaggccgtatcggatcgttgcctaggaactccctccattcccgtcgggagaatgtcttttctaactgaaggcgcaccaccattctcaccaactaccaagtccacagtaaccccagagggagggggggggagcaatatccaccataaccttagacgccccctccatcacagaattagttgagataggatcacctttagcactagcactacctccaagaatagaatcatctttctccaaagctttaatatcatggatatcccccacctcaaggagggcaaacccattctccaatttagagccgtcccgtaaccacggtccaaacagaggaacacttctaccatcatccaccaagaccacacgttttctgccagaacaaacatcttccatatgtcctatgacaccacatttaaaacatacaataggcaatcgttcatatttaaaatagacccaatgttttttcttaccatcatcaagggaaatcccagggatcattgggcagagaatattgatacggactcggaatcgcagaaagtcccgaaccaggatcccattcttcctcaccttgtcaaccgagatgcacttgcccaagcgagaagccattttgccagcagaatcgtcagttaaaaaaggaagaggcacccccagcgccttaacccaaatatccaacgatgagagatccgccgaggcccaaaccccgtcctctggcatcgccgagaccatcaaaaaaccatcgcaaggagaccacggcccgttgttaaggattcttttaacctccgccggagaactcaaccgaaatacaaagggtttagttttccgatccacctcctgaaacttccagccgctttggagtctccacatcccagagagaaccttcctcagagtcccagtcgagagaggcttcctggagaacaatctacccaccaaagaagactcaatagttttcagagctgcagcagaatcaggggaaatatgcagcgaaaaatcatccagggagaagttctcaacttcctccaccgattcctccaaggacccgaacgaagcattagccataagagcagaacagaggggatgtgaagagggaacgagcaaccaatgaaaaccaagaacagaatccagaagaatacacaaattttcgtcaaaaagaggcagtagaaagacgttatcagcaaaggaattagaagccaaatacctttgctcagcatgaaaagggtaaaaaaaccctaggaccactgcgaaagggtctgggggtagcagaccactacccctgtccgccgtaccggacattcaaatcgtacaaggaggacgccactacctgtatcgtacacccatacgcgagagagagagaaagaaaaaaatatatattttgttggtagttatgtgaa

SEQ ID NO: 378231 - DNA, 4574 bp, Cannabis indica
ccgtataaaacataattagtacaacaaaaaagttaggccatataacaacttcacctaaatcctaaaaactcactccaatcaaaaaattgcatctcatttcttttttaaaccccaattctgacagttctcaatacttagacacaccaccaacaccaaataaaaaaattcttaggaaatatgttattaattttcattcaattttgtaagacaagcaacaagaactaaactacaataaaagtttaagatcaaagtcaaagtaagacagataaatggtgacggaaccgctggcgcacggaaatagtatagagcgggaagtagagaatcgatcacaccaaacaagcttagctaaagaaaagaaagcgttgtagttgaagcgtttggtccaagatggtggtggttaggtaggtactaccgcatgtgtccagtcagctaaatgcatttatgtcccgtttaacaatatatttcatatttgtccatttttcccacacaaattataaaattatttttatagttttattttagaataattaagatttttgctcaattctttgaaaattatttagatggttggatttaattttttttttgtctaatttcattcaattgtattaatatgacgattgttcatatactaaatcgtgtccttaaattttgatatttacaatattatctccctaaattttaacatgcatcaaattatgttctttaaaatttcatttacatcatattttttttagtaaaatttgacaaaagctcttaaatctaacaaccttaatagtttgggaaaaattttgatgaccaaaaacatttaagggaattacttcatatattaatttttaattttttttttaaaatttagaaattattttattttttatacttcaaaacagttttacttttgtatttttacgaaattttacacagaaacttctatagcaactaatggagcaatctaaatcgcaattaaaatttgtatagcaactcacatagaaactaccaaaataacccaaaccgtaaatttaaaaaaaaaattaaaaaaattaatatatgaagtaatttctcaaaaatttaaaaatataatttaatacaagtgcaaaaattcaaattagtaattatttaaaaaaaaattattttttcctataaatacagagtgaacaaacaacggtttcagagattcagttgtggtgtttttgtctatctacctcctctcaagaaaactaaaccaaatcttcggagaatttctctctctctctctccatctggtaaattacattttcaatctgttattttgttttgttttcgtttgcgttatttttctggattagatttcggctggtttgagtttcttattgttgatattagtaatggtttggatctgaaatgagatttatattttcggtttggtgtgattgttttcaggtttataaatggctcgcaagaagatcagagagtacgattccaagagattgttgaaagaacatttcaagaggatctctggccgtgatttgccgatcaaatcagctcaggtttgtattttatctctcgttttcttatgaattgttccacaattttgctccagatcttcaacattaagacactgctaaacgcaccttttcttttagtgcaatttagatggtttctgatctatgttttgatagtagaatttgagcttatcattatcatgtgatcctttgttgtgatttgagattaacttgctctgccatgacaatattagagtgtaaatttacgatttagttgttttaaattgtgaaaatgagaatatttcggattgatctttcatgcatagctagctagcttctgtgattaggatataggctgctcttggttaggcaagatatatttccaggtcaataaaaggttagtttgttttgtgtaatggtacagattaatgaatcaactgacttcaatgagttagcaaacaaggagacttggctttcatcttccaaactggttgtaaagcctgacatgttatttggaaagcgtgggaaaagtggtttggttgctttgaatctcgattatgctcaagttgctacttttgtcaaggagagacttggcaaagaggtaaatatttttcttctatttcgcttcactggtagataagcttcctttgtactacaaagttttggatccattcagctgcctaatttttttaattgcttgttccgttttcttgttgcaggtcgagatgggtggatgcaaaggacccattacgacattcattgttgaacctttcatccctcacaatgaggagttttaccttaatattgtctccgaaagacttggatctagccttagcttttccgagtgtggaggaattgatattgaggagaactgggataaggtaagtttgggaatgaatttttttacttgtttttatgaagaagcttttcctatacagtttgttatgagatgcatttgcttaggtcttcttaagctattgttcctttggaacttcaagtttacaagctcttttgtataaacaggtcaaaactatatttgttccaactggagcaacttttacgtcagaagtatgtgctccactagttgcaacccttccattggaggtaattccttcacacatgattatgtaatagactgtttttctttcatatatgatttttgaaaatcaaatatttaactttatgtgagcttcagagttcaggcatccttcttattttagccaatgtgttacaaaactattattatatggagtaatctattccttttcataaatttgttgacatagagtttttatttaaatccagatcaaagcagaaattgaggagttcattaaatctgttttcgctctatttcaaggtttgtaaatgtctttcacaatcctccaattaagaaaattccattgagaattcattggtgcattagactagtggttagttactactcgatacaaatcaatcaacttttttaaatttgaggttgacttcttttattctcatctgccagatttggacttcactttcctagagatgaatccttttgcacttgttgatggaaagccatatcctttggatatgagaggcgagctggatgacactgctgctttcaagaatttcaagaagtacacctcatttctttattatgttgtgcttaaataaaatgattcaatgcagtctacctgaaacgattccattattgcaggtggggcaacattgaatttccgatgccatttggaagagtcatgagtcctactgaaagctttattcatgggttagatgaaaaggtcagccggatgccttaatctgattacgattctattgaataaggacctattacaagagaatttagctgttagatttcaattttcatttggtttactctcaaggaagaaacctatataatattgcttttccaaatctatctttgatatctggctcaaaaattcaagtgctccaacaaacagaaattcgaaattgtagtaagatctggcgttaatgatataaactcgctctagtccttaattgtctagctaaccaaccagcaagggacgaattattaagtttttcttttactttgaatttcagactagcgcatcattgaaattcacagttctgaatcctaagggaagaatctggactatggtagctggaggaggtgcaagtgtcatatatgcagacacggtatcacttctgggtctaagaagtttacctaattaaattagcatggctccctcccattaccatgtgatgaattaattatcattctttgttcaggttggagatcttggctatgctaatgaactcggaaactatgctgaatacagcggtgcacccaacgaggaggaggtactgcagtacgcaagggttgtcattgatgtaagatctttctccctcattgtcattctcattatgtacttaaccagaataaccaagtttcttcaatactacccttgtaagactcttgcacacacattgtcttactaatgattcaattccttgtccacagtgtgccactgctgaccctgatggccgcaagagagccctggtcgttggaggtggaatagctaactttactgatgttgctgccacatttaatggcataatcagagccttcaaagagaaggtgagcttattcgtgttcaatcttaaattcagtctcctcatttcctcaatttgtaattttgattaatgtggtattgttgctgctgcaattacttaggaatcaaaacttaaagcagcaagaatgcacatttatgtgagaagaggaggccccaactaccagagaggtcttgcgaaaatgcgggcactcggagacgaaattggcattcctattgaggtactacttatattattactatctaatctgcattctgaaacattttataaagtgaacatgcacaagaactctgaaatttgttattctttttgtgttgtgttataggtttacgggcccgaagcaacgatgactggcatatgcaaagaagcaattcagtgcatcactgctgctgcataagcttctaattcttaggatgtcttcttccctctgtattctttccactacgttttttatttcttaaatttttgtgtcgttttaac

SEQ ID NO: 378232 - DNA, 2306 bp, Cannabis indica
tattttttgctgatgatagcctcttttctttaaggcaactgagtttgcttgtataagatttaaacaccttttgagttggtatgacaaagcttctagacaatctgtgaattttaaaaagtgtgcttctactttagttcttgggttttgacgagaataaaggtcgttatgttaccattcttggtgtcactttgattgcttgtcatgagaagtatcttggtcttccttattatgcaggttagagtcagaagagccttttttagtctctccttgataagataaggaatagactttgaaagtctagtttcttctcgtcgggttgctacttattaaattaattacccagtctatcctcacgcattctatgaatatttttaagttttctatttctttaatgcatgagattcatatgctgtgtgcgcatttttggtagggtggtgatgagaacaagaaaaaactccaattgtgtacttgggagaaattatattggcacaagtctgatggaggtttggggttctgggacttaggtctttttaacaaggctcttttggctaaacaagcaatgagactatattcggctcctaattctctagtggctagggttatcaaggctatgtattatcctaattcttctttcttcttggttgttgagtccaaaaaatctttttttatttggagatctatcttatggaaaaggaaatttttgtagttggttcgctgacttattgatgaaggtgctaatgtttttgtttaccatgaccattgattccatgtttgtatggtaacaagtcttcttctcctcgtgttttgcctgatgatgccattgtgaatgacctgtactaactaatggtagttagaattctcctttaaccaaaagctccttctttgtggatgagaagctactgttatacttgccattacttgggatcatattccttagtgcgataatatgatgtggcattttgagagatcaggtctttactctatcaggagtgggtactggaatcctattcgaatccttggctttggggagggctctagttccaatggtctatctgagctttggtaaaaagtttagcaagttcacctccatgcaaaggttaaggactttctttagaaggcctctgataatttgttttctacttatgataatctgagtcattgtggtgtctctactacttctacttgccttttttgtctgatgggtcccgagacttccttgcatgccctctgacattgtgagaagctttcttccatctgtgcagttattaccgtccacgtcttcaagtacctagttctctttgttaggtcatctatgagctcttttatgcttgtcttgatgttatgcctattggtttgtttgaaaagttcatagtctgtctttggagaatttggtatcatcgtaataaatgggtgaatgaaaaattttgtgtggatgacgacctcttatttgattagagcatggattatcatcattggttcactcctgccaatagttgtgctccttgtattggtattctatctgagaattaaccaattgctagattgtataaacctctcgttgaggtagtgaaaatcaactatgatgctggttttaatcctaagttggagaaaactagggctgggtttcgagatgatactagttatgtcttagagtaggatacttggacttgggaaagttgatttcctcctgatgttgctgaggctttggacatctgctctggggtcttgcttgcctgtcgtcttggctatcagagggtggtggtagagtctgattgccttatggggcgtttggtatgaggtttgacttgatgggaatgggaatgtaaaatttaaattaaatttgaatgacaagggatttgtgtttctatgcaagtctcactttttaaattaaaatggtggtaatgataatcccttgaaatgcataggtttcatattccctccaaatctactccctccaactctactctctccaactcaaactcacataacaaacaccccattaggcagcatttggttagaaggaatgaaaatatagctagaataagaatgacatgatagaaaattaagagtaaacccaagaccaatttatatataatatagaacacaataataatatataataattagggatgcgtacctgattgatccatagcaattactgcgatttgatagtgcaatactatcaactaaatcttcctccctagatctctaaatcagaatcagtttatttatgcgattatcaaaaagtatacaattgtgataagacaatatgtatttatagaattagggaggggacatagctacat

SEQ ID NO: 378233 - DNA, 3331 bp, Cannabis indica
ctattagctcgagtggttgaaatatgtattcttataattcatcattatattattatttacacatttaattttttgtctaaactcttaaattgagctagattaatgtatcaattgcttcaataattgagttaatgcaagtataggggatatttgcataggaactttttctttgttttttttgataaatactatttattctattaaatttcactagatcataaacaaattaaattcataactaaatatgttcccttcagttagcggttgatgcatctttcaaagatgagtgaacgaatctagttcagtatgggaagtccaaactaagacaacatcaacaggtaacaggttcaactcttgaggcaaagttggaggccattcgaattcccttgctgtgggcaaagaacatgaattggactagggtgacaattttctccgattctttggttgtagttaatgaatctcatgtctgattagaagctttataatgtatttttaatttaactgttttacgtgtttgtgaacagtctaactatttgatgctataggaatgcggccaatggtgtaaaattttaaataatttatgtcgcatggactgtttgatgaacacccaatgtagtagtactctctaaaataatgtagacatcatgtgatcagctttacattacattattgttataatgtaaatcatttttcaaagttaggaggaaacccatgatatatatagccattataggtccttgaatattcaaccaatatatctctgtagtagaagataaacacacgactttggacatctagaacttgattacttttactgctaactctcacaataacttgaggttattaagtgggaggtcaccatcaaagatgtggagccagtttatgatagtggcaatactagtagtggagttccattgtcaaacattttggttgggaaaaaaaaaacagaaagaatttgaagataaatgagatggattgaaagtatcaataattatccatatttatatataagatttgcaaaaacttgtttagttccagatcaaaacatatgtgaatgaactagaaaaagagaatcttttttattattcctcagttctatcatctttatatctggctgttataaattaaaaaataaaggctagatgttatacgaatactgaaatttagcacctttacttcatcactaaatagtgtaaaaatatatattgttgatcaaaagataataatgattattttctcctctaaaagtgatcttaattcaaaattaaaatctacacatcaccaaccatgtgaacgaccccttaatgattaaatagtatagaatctcctacagaagctaatttcacagacataaatttaatgtaacacaagtttttccgactaagctcaaatgaataatcaattagataatacattaacaattaaaatcaacacaaaattaattaaataaataattaaagaagcataagtagtatttgatccatataattaagaactcagctgattaatccagagctagttaagactatacatacatagagtacatgcatatattatactagttcatcaaaagcaaattaggaaggaagtactatgggttctgaggggggccaggggctcgatgccttacaacaaagtggtgaaacaaggccagagcgttttcagtgacctgagccacattcaacacctttgccttaaccgtagccttcatcttactcattctcacacccgcaggaaactcatcaagacaagtggttgcatcagtcaaagcagagccaacccaagtctccacattccctatgtgccaatccacgttctctctcgtggtttcttcacgccccaattggcggagctccttgatggacatgctgagttgatccacgcacatgtctatctgttccaagcagtctttaacggcttggtattctctctccttcttggccttgacgagtggcttggacacttggagaaggaaggttgttgtgtgttgcgccctgtgctggctcgccaacaacgcgtagtggactagttgtcgagggcttaatatcgtcgtgttagagctgtggatgtatgcagtcaggcttcggatgcataggtcctggtactctgtgatctgacatgatacttcgatgtaggcccgagtccgggaacgcctagggatggttgtctgtgctgtggttgaagtgtagaagaggatgaggaagcttgaaatcaaggacaaggaaagtcttgtaagcttcaccatgaatttgttcttggtagtggtttttttaacttaacaataattgtatatgtgagatactttgttgtgatgagagaactgtataaatagaatagtgaatagagagagcttatcgtgcattgtacgtgcataagttaaaataatccgaacggttgactatagaatgaagagaattattttatttgttgtgtaagatttggatcatatcagaaaagatagacacggatggaccaaaactatatagtagtatataattgctttgctttgtttttggagtgatattggaatcttgactcaaaagaaaatgcttagctgggttgggggcactatttaattgtgttgagctgcataccaacattcgtagaccttcatgggggaaggagcacgtgttctatagattaactagatgacatgatcaccttgaacaataatttaaacattgcttagattgcatgattcttacaattggggttatcaaattctatggaccaagatttcaaaagtctttcgataccgccatagatcatgagaagataaagtagtattttagcaaaactagccaaccagtctaatcaaagtccacctttagtaaagatttgtataactcagctttcttttcggggtttaaaggttcgcattggctgaaagtagagtaagtggtactgtatatgtactgtgtagctttcaaacgggaaagcatattaatcaaaatataaaatagaattaagcagatacataaatatatcgttccatctcacaaaaagaacaggactaaaagttacagattacacaaccagcagctacgagatgttacagtaaaagaaacaagacactagtaaacacaccaagtacacgtttgaatttcatactgcaaggttgggaagttattcagcaaccttcatgcccgagagataaactcgactctgaatcacagtccccccaatccagaaaccaggcataaccataagtcctaccttaggttttgggtcattttcatctactatcatcaaattcttcactacactctccatataaaacctcggagaattcacttcctctcttcacttggaagaccttaacactgggatc

SEQ ID NO: 378234 - DNA, 6160 bp, Cannabis indica
  modified_base (6098)..(6098): a, c, t, g, unknown or other
cttctgttattgactcaaattctcccaaaagttcagccttctcttttcatttactaaaattgcaaaaacgaacaaacacaagcataaaaccaaacaataacaaataaaaactacttaaaataccctcaaaacttgattctaaaactcataaaaaataatcctaaacaacaaacatagaaattaaacgaaataggaaataaacttgttgagatcgaattaggatgctccacgacgtgttgttggcctccaaaaaattgtccccctccaatgtcctttctccattttcgaaattaaggttaaaacctaaatttttttctactttcagcaaggaggcagcccacggagtgcctaaaattctgggcttgaagatttcaatgtggtggcattgtaaaaccatgtcgcaacatcataaccaccaagaaaaaattctttcttgtaaatggtctagctacgacactacaaagtcgtgttgtggcctaaataaaaaatgtaaaaatttattatttcgagcctttttttttcgttaccaacatcctaaaagtctttcaagatttctcaaaaatcgaaaactcttcaattaagcatgtttgagctcattttgatggcatttcaccacaaccactccattcaaagttaaaacaacttaaatgattagaaacactacctaaaatacactctaaaatagtatagaaatagacttaacaaaaccccgagagcctatgtccgagaatctctatcgaattaatttgttgatttttccccttgttattattaagaaatactaatctatccttcttttacaaaaatgacatgtttcttgtttagaaaaataatcatttgactaattttattcattaaaggaaacttatttttggtctctttgagacttttgtaaaaccaattcacaactaaaattccttttgagcctttttaacaaaattcttatttttgtgtcatttttaaaaaagtttgcattggacccaaaactaagttttccactcgtcaaaatattattttcaacatcaattatgctttcaaatcttttattctaatcacccttttatttatacaaaaagttgttctcttgtatttccaattttcttatttcaaaatttggtaaactttgattttcttgtaacttgtagatcctgtcatttattttacatagagccaaaacttgagaaaatcttaaacttacttatatatactaaagctacacgcaaacgaaagcacatgtaaaaattcattttaggttaagagatataacattgcaaaaattcatactcaaaattgccagattttttagtttccagaaaattaaggcaatttgtaagaatcacaactccaatataagagtgtacttttctcgaaaattttaccaggatttttgtacatttgtaaaaagccatcacaaaagtttcagaaattttgggcaagtaaaacataattaaaataattttaaatttggacagtgaaaactaccaaacttttctagatttactccccattgccaaaatgctcatatcttgagctttacaaaacctgtttaagaaattccaaagcctaacatcaattacttttctagtactatcaaactatataattctttcacaaaagcagaaggttaaaggtacgatctgacccattggaattgaaatgtgttagagagtcccacattgttaatgtatggaaagattatagaatatataagaggaatgagctactcctcccatagctaattagttttgagacgaaacctcattcaccttattgcaaattctaacacaagacatcatgcatatttaccacttcaacaatatttaaagcaaaacctaaaccccgtacatgcattcattaaagcccaatcacaggctcaaccaagaaaatggactcaagccattagcaaaatcaagccttcgagatgatggacaaattatttgtccaccgagataaaccttcatcacagtagggctccggatagcatcaagataatgcttctggaaaggtaataaacgagcctttggatattcatatctgtattacaataatctattgttaaatctcacaatatcagggctttatttctaggatcatgtttagaatttgtattttttatataaggaaataaagtaattatcaatcaagcatttatgtgtctttattaaccacaaaagtaagacacgatttgataactattaacgtgatgtggcatttacgtcagctaaagatcaatacctcatagttggacttcacaaaatgagcccaaagtcaacatattatctgtattgaccccatcaccaagtaatgtgtacatactagaaatctaacactataaatataagaaactcccttcatctaattccataagtgtttaggcaaattctagggtttagacacttgagaaaacacttttgcaaattcataaagcttttccagccttatcataatagaggtcattaatccttgaaccatataaaactatggtcttattctttgtctacaatatattttttataagatttattatattttatcggtttctaaaaatctcgataaatatttttgtgctttcgttaagtactgaagaaataagtgatactaacaaagttgtatactgcaaccatgatagccacccaaaccaccatcgacaaatttagtattcgtgattgggatactcccatggatgatgttaattcgactactcaggcgaaagtaggagtcgatggagacctgtcagaagcgaccaattgtccttccaagaagactcaacatactaaaaacatatgttgataaaaatcctatctacaaagacaatccaaaagatcccgataacaatcttgaggactagagaagacaaagaagaggaataatattatgagccagatcctgttgtcactaaaacggctgaagaactccttgaaactaagagggagttggttgaacaaggagaaatgtccgatcgaatgcaagaaactttaatcagaatggaggctagaattgagccaaaaaatgtgaccctagatgaaaatactcatgatgaccttgcttctcaagaaaataatgttgtgaagaaaataaacccaaaagaccttgaaacttttgatcccacaagggacaaaggaaaatgtataatggaagagcctgctaagaagactgttccacggaataactcaaatattcccaaccaacctttgctgaaaaagaaggtggctgatgcttcagggcaaaacacctaattgatccacgaggcaaagttaagcgaaatgataggcttggtgctcggtacaaacgcctaccgtttggggatggagaaactgttctagtaattctgtttaccatacagaaggtagtttctcaaagaggacctcttggaatgcttaaacaccaaaaaagaatgagctacaggcgagaaaacaaggccacgtggaaataatatcagaaatcatataaatgatagagttcatgggcacaaaatctaagttgacactactaaacgtttggaagatcaaatagctagattgaaaaagttcacaaaatatattgcctggaagcaaagtggggtcgtatatgatttgaaagaagaagatatggaaccatgtgtaagaagaataatagaaacacccttaccagaacattttagaatacctcaaatggaactatatgaaggcaggatgaaccccagggcccacctatctaaatatgtttgactaatgcaagtggcaaagacaagcgatgatgcaaaatgtctttatttctcattaacttgatcaaagtctgctgaatattggtggaagatattatctcctagatccatgcactatatataataaataatataatattatttatcattataaaatgtatatagcatacattactattcttatgttattattgttagagtaaagttagtttagttacttgggttcaaattagttaggattagttaagttttccttaattgcttagttatcatttctagcttgtaactgattctgttaaattcatgatgagctgattgagatttattttgtataaatagtcactcttgtaacaatgcaatatagaatctttcattctcattaccaatctttctctctctcaattggtttatttcttcctctatttatctatcttagtttctcattatcttaacatgtcatagaacttaatatggtatcagagctcgattttcttctattgatgaacaatgttattacaaactctaacaatggttttcagactaatttaggaaacatttgtaatcaaaacccatagggtgttcctctaaaaaatgcaagaaatagagatgttgacaatttcgcaccagtcttcatcaatcataatctttcaattcaattgaatgatcacaattatctcatttcgagatagtaggtcctttcagccatccatggctatcgtttacggtcattcattcaagaattatcaattcctctataattcttaactgatgaagatcgtacaactcgaatcatgaatcttgcatactcagattggggtgctcaggataaattgcttgtatcatggttatttttttttatgactttctcaccataatagtaggatgcaacacatcatgttaaatctagatcacacttgaaaagtatttcactcttcaagttcctactaagatcttggagttttgaatcaagataaaaaatttaataaaaggttcactcaatctcaatgaatatcttctcaaggtaaaataaactgtcaatcttctagcttccgtaaaaggggttttcacaattagagattatgttgcaacaatcttcaaaggactgccaagcgagtatgtcacgtttgtaatttaaaccaatacaagaatcaaaagctacgcagtagcataaattcaagccttacttcttgcctcttgaattgagaaagtcgatcaagaatctaaaataagtgctcaagtagttgtcattgaaccaaattttcttgaagcaaatcttccaaatacaaacaaaaaatcaagttaggaggttgtcctcgattcatccacaatggtcaacaacatcctcaatatggtgctcattctcaatacactcaataaggaaacaatccagagcatcctagagagggttttagtcggtatgaagggtctaacttctctctccaaaatcaactggaaattacaacagctgttgagattcaagcaactctagaggagggagatcctatagcacaattaatcaacctcattgtcaagtgttcttcatgcttggacatactgcattgggttatttctataggtttgacaaaacttttagttgttcagctcaaaccaacacaggtaactcgggatctccagttcaaacacagcctaacattgctacctcaaactttggatgggatccaaagtggtattcagcctcaggaaccaccaataactgcacattagattctcaaaacatcatgatagaaaccaaattcaatggccctgacaaattttacgctggagatggaacaagttggcaactctttattatcttcccctcatcttgatcatccttttttacttaacaaaatgttacatgtttcatctatatccaaaaatctattaagtgtgtcaaaattttctagagataaaaaaatttacttcaagtttcatgctgatgtgtgttttgttgaggatcaggagaccagacatattttttttttttgaaggagaaccatgtgaatggtatgtatttgtttgattcttatcaagtttagctccttccatcttattcatgtcctagtcctgctcaatcagagttctctctctccagtcaaaataatggtcactattctatcaacaacaacattgagtcccggtgtcaacaatgcttttattgtaacacttttaatacaaacttgttttatgattttgacttggatacccttttaaaaatgttgtcaaagctatactcaaatcttgtaatcaatccattcaattcaataaagattctaaatctctttgttcaacctgctacttagggaaaattcacaactttcctttcccatagttatccaatactgaatatactgcccctttacaacttttgttttagatctttgggtccttcctntaccttgactttcatggtgacaacattacatactatttcatggatgtctactcaaggttcac

SEQ ID NO: 378235 - DNA, 5968 bp, Cannabis indica
catttgaaaattgttccatgttattattgtatatgtttatttattaattaaatctttattaaaagggtgttgaaaatgaggagtaatcgagtgaaggaagaggatagaattgaaagaacaattcagagccttctcaaacttcctgagaatcgcaagtgcatcaattgtaataatttggtatatatctatcaatcaattttcacctttctatataaatatatataatttttacatgtgtgtatggtatggataaatggtcaaattgatgatctataacatagaattatgaaaaaggaaattgaaaaacaatttgttttgatgagaatttggtacttgaaattcttgacattttctctatgatatgccgttatttatttatttattttttttataacaatacactgataaatttgagaaattattttatatactatttttttttattttttataatttttttaaattttcggactgggttattttggtagttgctctggtaatctttatgtgagttgctttgtgaattttgattgcgatttaggttgaactgttggttgctatatgaatttctgtaaaaaaaaaaaaattactttaaaatataaaaatgaaaaaactccaataaactttagagagtaatgatatgtacacacaaaactgtgtaatttatgtgtaattacatcattagtcaaatttaaaatttaagtcttcctattgttgtttttatggtttttcttccttaatttagaaattgtgagatgggtttgaagttgttgataatttattagtaattaatgataagaggatttcatataacaatgtaacaataaaacctacatttttatatgcagggaccacaatatgtttgcacaactttttccacatttgtctgtaccaattgtagtggagtgcagtaagtgttgatcttcttcttctgtttattttgtttaattgattaatgcaatgcctaaaataattcattttctctatttgttgattattttgagttgggaatttttcagtcgcgagtttactcatcgggtaaaatcactatcagtggcgaaatttaccgctgaagaagtttgtgcacttcaggctggtgggaatgaggtaataatcaacaatgatatctcatttttatatttagttatggatgaagaactgtttttacttgtcccatttacctgttcatgatcattttggtgttgctaaaatcccacatgctcaatttgaaaccatggagatagatatttatgttatagggtttgtgattgcacatattacaacactaatatattacaacactaatgtatacttttagttaaaataactgttctcatatgtattttttgaataaaagagaaaattttattctaacaccacttcaacatttgtttatcttgagcattatcaaggtttaaagttgtggatttaagatatggcctgatttgttgttctaaattgtattaaaaaatataattgctatctttatactaaacttctaatttaaaatgattatttttttttcttaaaattcaaaatttaaagttcaaatcaacttcaatatattcatctaaaattttcaattcaataaatgtattaatttaaattttaactatagcacacaaatatgacgtgcattaaagcgtagattctacctagtaatattttataaataccaaaaataccataaaatgtctcataaaacaaaaatataacatttatttttgaaattgtgtatgtttagtttagttgggcgtttttcttaagtttatttgagttttattaagttttattgtattttatttggggtttttttataagttaaattgttattggactctttttgaattgttgaatgaaaatggggtaagaagagtagcctcacaaaatttttaatcgcctcaagcgttttcttttcgcctcaatctattgcgcgcaatgaggcgcgcctcaaaaacgcaattttaaacattgaggattacatctttctctatagcactaacattagaaaaattacaaaactcaactctagtctttaagcttaatttaatcaacagactgttggctttaattgaaccacaagtatcttcgaaaatacagctatttctgttacaccatatgtggtatatggcggctgctaccacagcagaaacaatgtcatccagaaggcattttcgagggccattagagatggttaacttctctgacatgagctagtctatttcacccaaccagttcgaaatttcaagaatcaactttttcgagaagatgtagttaaagtataagtgagcatgggattcttgatcctcaagacaaacatagcaaatagtctacctaaatgattttagccagcaagtcttgagtgagaagtttttcattaaggcctgccataaaataaacaagtgcttaggagctttgagtttgttccaaacatccttatgataggaaactttcgggattgagagaaaagagttgtaaaataccaacttatcttgcttattcgccaaaacccaaatgtacttagccataagagccacattccacttcctcccctccctaaaaccgatttggtaaacaaactttctcccaccactactacaaattgtacttttggtgtcggttttaaacaaacacttatacttttagtgtcggttcatagaactgacacctattccataatcacaaaaagtcaaatttttggtgtcgattacttgaactactctagagaaaatttctacaaagttgatcaatctctgaagcaagataaagatgcttatttaaaaagttacgaatgccaagcctaacagaatggataagttgagctcttcctgcaaaggagagatgacgactttcccagcaatgaaatttcttataaatcttgtcaatgatgccaccacaattcgaagctttccactttgtcggcctaagattaactcccaagtaattaagaggaaagctgccctcttctatagaaacaatatatattattattttaaaaataatgtcattgttcaaaaattaaactaacttctttacaataatgattggaattttgttataactaaaggtattgaaatttatgcaggttgtaagtattgtataattcaaaatatatttggaagtaatatgctatttattttatgttacaataacatagttttgtatgctattattcatttatgttcattcaatacttcaaagctaacttaaattttacataattagcgagcaaagcaaatatatttcaaaggttgggattctcatcgtgattcctttcctgatggaaggttagctttaattcatttgttgtatgagttttaagttgttttttgatattgaacttttagtactaataaacaatttttcagtaacattcatcatcttcgagattttatcaagcatgtatacttggataggaaatatacttcagaaaagagtactagactaccaaggcttagattggtgaggtttatcttattgtttttttattagattttttgttaatgttgtgattaggagaaggtaaattttgtagagtttaattcttgttttctattttttgaagagtgacaaacatagctcaagtgaaagtaggaaggttaataattgtggtgctgaattcaagagttgtcatgatgaggacaagtttgaacaaacttatgctgaaaaatctaatcatttaggaaaatgtgatgagagaaatattaggtattactatgatgaaagtcgaagtcctcgatactcgagagaaaattcaaggcatggaggttatagaaggagtcctgtgcggtttgagattgttgatgacaggttcagggatgagggatttggaagccgtaggttttcgcctagcgattcaaagttaccgaatagaaaggggaccgcgcatagttcttgctcgccggttgcacgtcctataaaagagatattaggagagaatgttcctactctacatgttggtgagaaagtgaaagaaagtaataagaatcatgttgatagttctgctaaaaatcaagtaagcagtctctttgttatagttttgttttcacatttggatatttatgctttgttaatgcaacacttaatgcaattgcttaatttgcattagcctattaattctgttgtattgcttcaagttaaagaaatgtgattgttaacattcataaatgtagttgtgtctttttgtttggtttgcattgaagtaggacactcaattggtgtctttaacattagttttctatggattaacattttgtgctagtgtgatataacaaatatattggtcattggtggatggaactagtgtagggtaagtatacttgggaaggtgaactagttgaggatagcttaagtggccataggaagatgcgtgtgtgttggaggtcttgggttcgattcccaaattatgcaatgtaatatataaaccgctaaaatcaaatatatatatatatatggaaaggtaagaagaatgatgattttgtatgggcaatggctcttggaagagttggggtctcttcaaaaactcattgctaagtggttctattatgttcaattaaacatcaatgatcacatttacctatttccttctattctcaaattctctctaattttacttattcctaagcagttaaagtaaggtgggtacttcaaatgatcaaatatgtggtttgctcttcttaggtttggcacctcctgagtacctacatagtaattgttatagttttctggttcacaaaaattgtaatgaaggagtagtggataagctagaatagggggcaatatagagtggtggggtctcaataagtttgttcaattaagcaacaatggtcaaatttacctattttcttctattctcaaattctctatgtttcaattaccatatgcacatttacaaattttcttgtcatcatagaagatctcacttgcaaaatgttgtaggaacccaagccaatggagcaagaaattggaaactcacaaaacttgattgattttagtaccgaattcgaaaacccggaacaaactcaacaaacatcttcactcatcagtggtagtagtagcttgccaacatttgaaacatcagcaaaagagaatccatcaaagactccaagtgaaaacactttggaaagtttattatttggtttgtcaactgatgatgtctcattacaaacacctaacaacaatgatattctctcaacaaacaatactccaaatcactcttctaatgatgatctacaactagctgctaataacaacagttgcgccgataccaaagtaaccgaaaaatggccatttgagagtatgttgcagcatcaaccttcttcattgcttgttccaggaagtgactctatttcacagcaggctatgctatcaaatgaagatccaaacaatgaggtaatgatacagttgatcataattttatgggatttttagcataaatgcccttgaagttttattttgtttggcaattgagtaattcaggtcgcgtttggttgagagaaataaaaatataagaataggattatgaatgagaatggaatggaataaaatttaaaatacataaaaaatataataaaattattaatttttttcaaattggaatcgtctttcattttaaaataaaatagtcattccaccaaaataatggaaaggctattccattagaataatattccaatactttaaaatgcaactaaacaaaggaatggaatgaaaattgtcatttccattccattaaattacctccaactaaatgccactttaggggacgtttggttgagatgaatgaaaatgttataccgaaattaaatacagtaaaattggaacgaattaccgatagaataatctggctgagtcgcggacaatgtcgctctctttaagacgtttcgcggctctgcccgaagtgtgcacggcagtctagcaaccacggcgtccccaggataaaacagcctctgtataagtacgatacgtt

SEQ ID NO: 378236 - DNA, 3591 bp, Cannabis indica
ttttttccctataaataataaggtatattttatttgaacttacattaatgtattttatttatttgataaaaacattaatgtattttaataataacaaaatttacctttagtaaaatcatcaatgactacaaaaggcattaaagaaaggtaaaatgaccacaaaaggtagtttcttaaaagattattcgatttcaataatttctccaatattattcaaaacgaattccttaagaaatcttaatttaaaccgtaaaaacattacttccttatatcaacccaaaaattcaagagtgtattgtactaattgataaatttaatattatcgaatccgtgaaacaataaatgaatatttaagcaaaacagcctataaatgtgaaataacgtatacttgtgaaagagagaataaaataatagaattgggtgtatgcctcatggctcatggctctcatgcaatttcttcatctagattaagccaatgtgtttatcccaaaaaaaaaaagcctaatgtgatgatgagaaagtaagatagttgaaaactttaccatctattagtatcattcacgttagttggaaattaaattattgtaaaccaataatgtcgctattgacaaaaacaataataagaagtttataaaattaacaaatgttagcatatgtgcagggtgacatatggacttttcaactaacgtgtacgtattaatttatacattaatttatacgatgagagcgttcgcgatgccacattagtgctactactgcttaattaagacttgttcgagctaattataatttataggtacaattttgtattatttgtttgaaataatcaataactaatattacgtaagaatattgccagagaacaaataattcacaataatcttggtagttacaccaaaattattgtcatatagatagatataggttcaaaataaagcaggtcaaagctattataccaaattcaaattatggttaggctttttcataaccattaattcattcatataaattcaatataaaactagccaagaaatgaaaatcaatttagaatgagaaagtacattgatttggtctttaaaagagagctgacaagttgaatattatttgctcaaattgcatataatatagtaataattaaataattttttttttaaaattaaacataaattaaaacagcttctttttgcaaaatcttaagtaggttaaacgtttggtgaaaaaagaatcctaattccatagttccagcaaatttcttttactagtatctcacccaaatttatgaaatataacatataataggaaaatgagattgttagaattagagtatagtagagagattattaattgtaacaaacaagaccttaccagtttggtgataattaggaggaggaacaagttggcaagacccaaaaggcatagccactttctgcttaagcctactcatctcaggcttatacacccaaaactcccctctctgctgactcatcaaatcatcacaccgaaaaatctccaacatgggcccacaggaccccacaaacacaacgtacaccgtccgatcagaaccacttctactactactactcctgaccgctagattagccaccaccaaattcacctgaagctcgaacacgtcacgcggtggggtcccacacggtaccgccgaaacgacaacatctatatcgtcgtacgctgactccaacaacgacgggagtggaatttccgggcacttgggtgtaccccacgtctggttctcgtcgatccactccgggaaaaaatcgtcccagttcggccggtccgaaccggatagagtgtcgaaccgtacggtgaccacgtcggccaatccatgcaggccacgtaagccgtcgtcgagttcttcatgttctaaattgaccaaaccgagcttaatcttacgagtcgtatttagtttctcggcgattatttcgaaccactccggatatttattcgaaattacgatattgtcctcgtgatgatggtgttgttgttgattaagatcaagccttgttgtagtggagaaaatatagttattagtggtgggggttttctggggacaggagaaggctaataggaggaagagagctagagagagaaaaaagagaatgaagggtctaatatgcttgccaaagtaggacttagtattattattgttattaatattaatataagagtttttagacctcatctcatactatattttcttttattttgggagaaagagccagaggttttataattgtagcaaaaattcgttcattgaatccatgagtttatatacacgcagagaagaatatgaatattctttattttaattattattattattattaatttatatggataattggaaaataataaatgaagtgaagatttctttgtgtaaaagtgcatggcctgcacgttcgccaaattgtcgtttttggtatacgtacgaccatgcgttgcgcgtaagtatcatatttaatttataaatatataattttattttgatgaaatttataaatatatttatatttgtccttcacccgcttatttattctttacttaaattcatatttaagattctttcttaaaaggaaattacagttggagttaataatttttgtaataaagttggagttaataatttttgtaataatgcttttctaattgatgggattttttaaaacatagatttatttagctttcgattatttcacaaaaaaaaaaaagatatatatagctttaataacaatatttagcggtctttttaaaaaaaatgtttagcggctactattaaaaaaaatgtttagcggtttggttttttgaagttatttttaaaaattaaaaaacgaaaaagaaaacagatacgtcaaaaaaaatatatacatatatatatatgataaaaatgaattaaaaaaagaaagatattagagtggacctataattatatattttatacacgtctctaattaattaacagcatgatttaattaatagataataatttattagtttctctttcattttataatttcttcttctatttatatataatatatgagtcgtgtactacaatatgtatagttatatatatttttctaaattatacagttatgctaaatgatcatgactaacatttaacatataaaataaaattatttgtttcgtctggaattatatatatatatatatttcaaaaatattgaaaatgatatggacagagataggccaccttccgaatctttaaaaaaaatattatacttttcttttctgttgtgaatgtgttaatcctgaatacatgaatgagctaattcaacaaatcttcctaattaggtgaatttgtatgtaattaagtcaagtacagttggtgtatatactatataacatattataataataatttaggaagtacagttgggcaagcataatcagtagtatacctatcttattcttacctcgattgattattattggagtattattatttataaatatacatgtagctatattgctcccaagctctcaacccaatgggaaggtagagattctttacattatactgcatataattagaaataaaaaaaataataataa

SEQ ID NO: 378237 - DNA, 2482 bp, Cannabis indica
aaattttatatatagtaagttagatatatcattcttgtcgtggcaataataatcaatgacagaaaacattaccctaatatataatatataatatataatatataatatatgtgagtagtcatctcagagtttccttcaatttattcacaattatgagattattctctaaacaaaataatatataagtttcaaataataataaaaataataataaatatggagaatttatgcaacacccaataatgatcagggacacaagtcagtagacagtaattttctattattattattattattattattacaagtgcataatatgccaagcttctggatagttcctctgtgcctagggctcactatgccatcttcttcttcttcttcgttgcagtcaccgtcgtcgtcgccatcaatcggcgttaacgtccgtccattccgtggcggtagtagaatcaacctctgtcttcaaatactggattcgagctcagtcaacagacggaactccgcatttactccacatgtcttctccttcacaggtaacactctaatctaccattacttctgggtttatgtcctatctgtatgtaaatgccctctatgccgattatctcccctctttaacacctcctgtaaaaagccccttttgtattttgcaataaattttccccatccctctgatccccctggctaatgattagctatacccatttaggtgacccctcacctctactagtgaccttcatagatcccttaggagccactgtccaaaatgcagagacaatcattcgaatatcttccatggagaagttctggtttaatgcgttttgccccttagtgatacttgtccaattctctgtactctatataactgaatatcctctgttattctctgcttcatgtactttcctgatatctttctttttttgtattattcctattgcctggtcccttttcatctttcgcctttctgtttcaagataccaaaagatcatggaggatctgtcccatactttaaccaccactttgaacctcactgagtttgaaacccaaatccatgcttttcctaacaccgctgaacatcctgaagatgatacccgtgaggagccatcagcttttcttgctgtaaagctgttaaccactcgccatttcaattcagaagctttcaaacagaggctttgccaaatgtggcccgagcgtttctccatcaatgttctggagaaggagcctaactttttcaccgtggagttcggatgctttggtgatcgtcgaagggttctcattggccagccgtggcatttcaattacaaacttattgtaatgactctgcttgaagcaggttcggtagtcactactgaaatgctcacttccacaccattttggattcaagtttctggtataccgtttctaaaacgatctcgtgctcttgcacaaagacttggtgaagttcttgggcggtatattgaagtggatactgcctcccttaaggagacttggggcccctatctacgggtccgtatcgagtttgatgtaacctagcctcttccccgtggcactgggtttcatttccatggtatgacagcccctgtgtggcttgaattccgctatgaaaaccttcctgatttctgtcatttctgtggccggttgagtcatgtagtgaaccattgccctgagtttcttgctaagtgtgactcttcctccgctccgccgccactccgatatgatcaatctttaggcgcaaaaatccgagtcacctcaaacccgttctatattgctaatacccagactcggcttcgacctcacattgctagcccatcttctttggctcccacaccattatatcgcctgaaccaaccttttatcatcactaaaagctctttcaacgaatctccatatgattatggtatgcagcacttgggtcaaccacatactacttccctaggtttctatatggctagttcctcacctaatattttccatcaacaacctcatgaccttaaccaacctgccattctcaaccctctaacttcaggccttaatactgctatcacactgtcatcgggctttcacatgtccctccatcaacataccactaccaatctcaaccccaaccattctgcacctgtagctactgctgaacaacttcaggcttcgcttccaaaggcctctttgaccacggctgctactgttgtggctacttcttatgacaatcatcatgtaatccctgtttcccaagccttctctaccatcctggcggatcttaaccccacacaacctcctcgatttactattggcaccacttcgacttcaacccccaagactaatctctctcgcaaggcaaagctagaccgaccagactgccttaatgctgaagagtttcggaaaatgctcaaacgcacacgcaacttagcaaaagcccttgaagacggccaagttgaagaggcaggtgacgctcagcgtgcctgcctagagccatgagtatcatcag

SEQ ID NO: 378238 - DNA, 4412 bp, Cannabis indica
tgaaagttattcttgtcttcatccagttatctctacttcagcacaagaagaaacaaacaacaaattagaaacgtcatagaatatgatccttagcaactaaacttattatatcgaacagaaagtccacatacttatccattgattaagttgagtgttgcaatgatatctcctcttaacttgctgagatcaacaggtgttttggataaatttgatagtaaaatgacatctaggattccatcatctttataaggaaagcagcctctaatgctgactccttgcactgaagataccggttttcttccactatgtctgttgacaggttaagcaatattggtcgttttgggtcgtaaattgtgcgttcgcgaactctagcaacccattttgcagcttcccataccccaaatctgaaatatgtcaaagaatgtaaaaaggttcatgaacacccaggtcatacgttgctcactggctccttgatttgatgattattcaatcaagctataacttttgttaaagttgcaataagaaatgagaatacatcaaattatattttctaacccggggcataaatatgaacacaactaatgagtttgagagagagaatgaaaacagttatataaattaaactatgtatctcctcaaggatcaattaaatgccattcctaatgctgttgagggttagacctcattatttaatatgtgacagaggaatctaaaaaaggaacacagagattacctggtattgaaagaagaggatatcatgacagcaggatatgaagcatcctcctgaatgttgtcataaggagaatatttgcgtatagcatgaaaatcatcaatattccaagggtatccaaactcttcatattcagttgctgtaacgggtaaaatggggtaaagaagagtgttggttgcatctaggaatggaacctgcaacagaaaaagtaaatggaatagtacacgaaaagcattcataccatggtaagaaacaaagaagaaataatagtaagactgttgacctttaaaactgccgcacgaaataaatcagggcaaacattaatggctgaagcaactaaaagtccacctgcactgtaaccacaaccagcaagcttgttttcggagacaatctctctttcaataaggaatttagcacaagagatataatcttttatggcattattcttctttgtacctctaccatcatgatgccacttcttaccccgacctcctccacctctaaaaagatatcacattatgttaagcaacaggcagcgaaaggatcacttacacttaacaagagaatttaaaaaagaaaaagcaagctagctttgaagtatgaaagacaaagcactgtatattcgaaagggaaaaaactctttaaccaaaaaaaacatgggaaacaactgtatccactacaataaaaaggtagctcagttgcacaaaagacaatgtaaaggaatatttcttaaggaaggctaaggataatagctgaaaaattcctaagcccactcaaaagcagcaggcttttgctgaactctatgtaatccataggatgcatgacttacagagtaattacattaatccaaatattagcttcatatattactatagcatttaacacacctaacatcagcatatgcgataatccaaccacgatcaagaaggcttttcgattcactccgccaccgtttatcaagtatctccccataagctccatgcccatgaagcaagccagggtttttatcttgtctcttaactttgcgtgagtatacaatggtcaatggaacctcaactccatcataggaggagacatgatgacactcacatgcatagaactcagacagatcattccacaagttactattatttaaattcatttcattcgcagagccaaaagttatagtctttgaggtttgttctggaatgcttggcaaagaagatgttccatatagaacttttgttctatcatgaagaatattttgttgttgaacaatattccatttcccatttgataggtcataatcaacaacggcatcaggcatctgcagacatttattacaacataccaattcaaagacaaaatatatcctttaaaaagcagcctctaagtaacatattcaatttgtcactataaggtatgttatgttaagaaaacctactaatcacgttgatataaaagtacaataaaaaacatcttctgaacaaacagaccataaggaaatacataccacaggtgatgatattgtaaatctcatggttgatgagtagtagtcatagttcggtccaggtgaaatttgagaaacatatttcggaagaggcaggtaatttggatgaagctctttcagagaaactggtccctatcacagcaagaaggataaaggagataagaccattatggaactgtttttcaaatgtatgatgcagataacttagaagtgactaagtgagaaaaaattagtttcatcaacttaccttaccagcaggcaaaggtagaggaactgaacaaagtctgaagtttcgatcttcccttaaaatcattaccaagtttgtattgcaaaagtccacatcctccacaaccaaatccgagtcattgatgaatacatcctacaataaacaagaatgtgaattacaaaagaaagtatgaatgaaaaatcataacattaaactgaaacagttgccaaaattatagataaaaagtagagttaagcttggtaggtagaaccaaatgagaattatactccttaacataaccaatgaaaagaataatcacaaccaataaaagtgtactttttaaggcatgaaaatttaaattcagcccacagacctcccatatccttggacaggtagaagcatcagctggactgcgaagaagataatgacattcaactggctggcctgctttgggagcatcagtaaatagaaaaagcaatttttgatgatgctcaagtatgcaatgagctagaccttcacattcccatactaaagtcaagccagtcaagggatcagctgcatttatcagaaagacctaagagatggttatgattgcttcatcattttaacaggaaaacaaaatcaaaatgtttactccacaaaaagctatacctttgaagatgtaggagtgaaaatatttacagctacaaagcggaaatctttcgtgtgtctgatgttaacgtaggtactatcatccaattcttcaagaagcaaaacatcctcatcagttgatccaattatgctgcagtataacctgtgacacaagatcaagaaaaaaaataagaaaaagaagacagcattacaatcttaaattcaaacacggaaagtcattagaaccccaatggtaaccacctgcaaggccgtttcttctgatctgtaacaacataaagcaatgcctggccatctttggcccatgccaaacccgaaacgcgatcaacttgaggcttactacataatgcaccagaattcaaattccttaaagataatctataaaagtcattatctttatcatacatggtgtatgcaagaaaccgatgatccggagacacttcagataattcttcataagcataacctaaatatagttgaaataacaaactagtaaaacgactaaaatttacttatgccaattttgtgtcttcatgaaaccaaatcaaaatcaaaatacctccaaatctctcagcttcttgattgtaatcaagcaatttctgctcaattctcctccctgtagtgaaatcaaatccagcagaaggagatttatgcgaaacgaactcttcgttcaagctcgccaatcttcgacatagcaccggatattgctttccctcttcggcgcgacgatagtacaacctgcagcaatatcaaaacgttcatcaatttccaatttccatcagattctccataaacaaacatcaacaacaaaagcggtttttcaccatggtccccaacggagaggaggcgtagataggtcgaaagccaatcgagaagccatctccgactggagcttgctctgaagtctttcggtatcaatcatgacggcctccgcgtacttctcctcctgttccatgtagatatccatgtgacgcattgctactttgtcgttcaagcttgacatccaactgtaagggtcctcccatgtctgatcatggaagctgaagctttggggcttctgtggtggcttcggtggcgtcggtggattcgccgccttgggagccttgtagtgagctcgcctgacgagaatcgtcgccggatgatttccaacacggcggagtagcgtcaaaagctgacgcattgtcgttttgagaataggatggggttttgcacttgttgtattgtactactaatttggcgggttttactttgtgtagggttttagagtcacatgggacacaaacgacttgtcgttcatatttatctaatgattatgataa

SEQ ID NO: 378239 - DNA, 1299 bp, Cannabis indica
ctttgtacaggcgtataggactaatttggagaatgaagctgctaaattgagtgaagagaacagaaaactcagaaagaaacaagaagaggtataaagtttctttataataacactctcttttaggctttgtaatgttattgttaaaagggaaatcttaactctttttggtttattctctttttgggtataaactcttttagattgagaaagagattgctgccgaacaaaaacaactttccaaaaagcgaacccttcaccgaacgtcaactgctccattttgaaatatatatatgtatgtatgtataaatatatcataatgtctgtagtgagttgttacgttggtttttagtgtttaatatattatatgcttttgtaggggagaagagaatagctttatgtcgaaacctgtattgagaggttttgaagagtgagactctctaactactaatttctgttgtgttattttctttcaaccaaatgtatctttgttattttggaacttggttttgtgggcttacgtcttatgtttgtgtaagatgggatttaggtgtttttaatttcttccctatgtgtatattttatttttaaaggttagctccttctcaaattaaaacatttaatctcccttatatgtattttagttaattatatcatatatttataattaaatgttgtaattttaacaaactattagctttccttcaataattaaggttaagttcaaatgccaacttaaacatatttttttagaaagatagtcttaatatttgaactcttatatttagtgcttaactattaaaactaacaattttattgttattttttactttgaattatatttaatagtctaaaaaaattaagcttctatcaatttttaatatattatattatgtaaaaaatttaaattaaattacgtccctcctaatttacgaaaaaaaacgtcggccctcctcatataattactatgtagtataattattagaatagtaaatactacaacctagtaattatgttacttcgttggaaataattactagctagagtagtaattatacaatattagaggaatattagaattagtcccacattactaatatatggaaataaattatcataaataaaataaatgggctacttctgtattcactacaaaatatcttacttttagtcacaacaaaacttgtgactaaaagtaaaaaagttgtgacttattataaattattatttctatgttgtgactaaaaggtccgtgactaaaggtattagttacaaaaattacaatttgttgtgactaaatgt

SEQ ID NO: 378240 - DNA, 4046 bp, Cannabis indica
ggagacttttgacattaaggctgccgcctaggacctatctactctagactcatctgcatttgacaacatttaatggctttagttttagtatttttttcgtgcttttattttgcacttttttggctttgttcttgtatggacttaaggcctttcactttcaaactagtgactgaccaggtagtctttaatcgtggctttatcttctttcaatttttctaacatgtagctggctgggtagcctttaatcctagacttatgcattttatgttcaccttgaagaatgccattcgcacatacttagctatcgatttcttactttcaaagctttaaattttttagctatctatttcttgctttcaaagctttttgatttttgttttaagtatatttgtccttgttcaatgttgtgcatgggtgctccccaagtgatcgagtagacttatgctctcttggtcacttgcaattaaccaagtatatagatcctttgcctatgtatttttttaagaggatcattttacacgcatgttgaactaaaataaaaattaactttaaaaagctaattttttagcaaattatttgagacaatttgaacggaaaaaacattttttattcattaatatgccttacatatgcgttgttgctttgcaacgtcatttttttttatttgtaataaaagcttacaaacataaagtatgctttttaaaaccagtttttttttccacccctacgcggcataccatgcaagggccatcattgaagagtgatggtcatatagctcctttctgaattcctgcacggtgagtgtgcatgaaccactactgaagagtagtgttttttacaagcgggctattggtagtactttatgagattttctccactctaatatcttggtaggagaacaaattccattttttcaatgtaccggccaagtttgtatgcacctttacttgtaaattttgtcacttggtacggtcttttccagtttggtccaaacactcctgccgtaggatctttggcgttcaggaatacttttcgtagcactaagtgtcctacaaataatttcctctcattgacttcttcattgaagtactaggaaactttttactggtaggcatgtagttttaagttggcatggtctcttctttcttctatttcatcaagggattctaccaacaagatatggcttgttccttggtcataggttatcctcctgtgggacaatggttccaatttaatgatcatcattacttcatagccaaaggctaatgcaaagggtgattttttggtggtcatcttctcagtggtcttgcgtgagacatcattgttgtcaggaagatcctacaatgggtatcaaccttaacattttgaaaatccatttggatttcaaaatatgtgatgtgagccaagggatcttctttctctctgtacatcctccaagtaggcctcatgaacttggtagaaaagggcaacaattgatgcctgtagagaaaagtgacccttgcgtcctatccaactctaagttgaacaacttagggccagacatgccttgtatcatattcttgagctgatttaatttttatgcactaaaggatcaacatcaacttgcatttgccaggcaaattattgtactgccctgtctgcccaggctggcttgtgggtgggtagtaggtactctatcagagttggacagatttggcttgttctgccctagtggtggagtgttcaggggtgggaggtacctgtcctgagcattccttcttcagttcaagctagctcaaatatctactcttacatgagggcctattctagcaaacatagaatctctgagtcttaggtcagaatgtgtctgaccgttctggggcagaacatcattattgcccatagtattctaagttctacgattagtgcactgaccacttggctgactagtggcactatcatcattatgactggggtaagactccttactgtgacacctgctctggccttgcattggcaggacttctccttctcccctcttcatctctaagtcaaccttgaaattggtcaatccaaccatacaatcttttcaataaagatctagccatcattgagttgataggatggccttgtttaggacgcatttagtcccctggccttgaggtttgcccatggtcccttgggcattaaattccctctaggacatagggaccttttcctcgacgaggatcccttattagggatggctcttcaacctgagattcaaccatttcgttgaacaatctgatcaggtcgttagcctctccagtagttcagctctgcctattgggcttagaggatcatgacttgttgatccatccgctcttggaatttgggtctctactgggtaaaagcattgcccatagtagcatgcgtttcttatttgtcatgatgtaggagatttgcatgaccctaaacttatcttacaacttttctcagcttggcaagttcagtatcatcccataggtccatgtggggttcatcaatgctagggttgccgaccctaggtccagtctctgcagcataaacacaaggtccaacccctatgctaggaacttcattagttggctagacagtgggtccaacaagaatttgttcacctagttggaccttcgtaggttttgggcagttggccaaaatgtgttagccgaccagccatatttaggttagccacaactagtgacacttggacattaggatccgtagccatagggtctcacggtttagttgaattttcacatcttgtcacaaccatgcagaatggagatcaagaagatgagagctttcagaactagcattctaagctctcaatgaaagcactaaaatgttgaatgtggatttagccaatcgacatagagtctgactaggatcaaatttggcttatgactgtcacgggtggaatgataataaatgtgaaggcacaatgatttatagaggttcaacccctttgttagggtaatgacctactccctcttttagttatattcactcttgagatgataccaagtagattataggctgaaaccttgtaatttctagctatgcctctctttagtattattatgagaatgtgttttgtaggtgagaagtatgagaaaatagagagaggactctaggattttgtgcttctgagcgtacttgagacataaaattcaggttaaggtcccttttaacgtagggttaagaccctttatatagtgttagggtttacaaggtttgttatttaaaaatatgtagaatacggagaatattcctaaagaatagggttgttatttgttgatgaagaatccctaatttttgtgggtagtttgaactgttctgaagtcataggaatgctgaagacactttagatggcttgtgaaggaaaaaaaagtgttgaagcatatctgtgcacttggccggccagccttgttgatgggatgcccggaataggggctgtctaccctggtcggccaggaccttacaggtttgtgcacatttttgtcattgcttgtgtctattgtgcaaccataagtcttgcaagttgaaagcctgcacgacactaacctggctagttagtactgacctgtcttcaatgtatttttcgctttttaccatgtggaggagccaggttaggtgaacaaaaattaggataacacacttatcaccaatgatgttcatttctacagttttttggaacctagatccaggttccatttctcttgagagctatcattttagttgacatggtcccattccagccactgtgtctaaatgcttcttctactgtaatacccgggattaagaaaaggattagcaaaaccctaactagataattatgagttaattgaggaattatattattatatagttcaacatatgtgaaattatatgaatttaacatgttaagaccccgttggtgagccaggggcattttggtaattatgacccgagaagggtaaattgttgagattaatttaattacgtgcttaatagaactatattattatatagtatgcatgtattgtcttttcaggtgtgttctgaca

SEQ ID NO: 378241 - DNA, 4562 bp, Cannabis indica
aagagacgagagagagagagagacaatagtaaaataaaacgtgtgcactgtctgacgagttagtattactatttaattattcaagtctagcaaaaagtgctctgcaatagaattataaatgtgtacaaatatataataaaaaacagagagataataaaggtgtttgcttgttagtgatgttttatttatttatatattgggtaaagaaagatagtagtacacttgtactcttcacttagttctatcctagggaaaataacagagatcaatgttggttggatcacactcacctagcaatatactaaaacaaaaaagcagacttcaattcaatcttaaaataacttgtttaattcaaaacttcatccacatcacttatacaactcagcttctattctatgcagtgtgaaacagtatgctcatcatcatcatcacacgccctcacctgccaaatgtcctctgctctctgctactgctttaatcttttccaaaaatgcaaactcattattaattaaaccataaagaccactatcaacctatcattatcaactctactactctactactctactactttgctttcactcctaccacattctttcctccttttgttctttgtgctattgtatagtagattgtttagccaacttttactgatagcctctctttgttatgtgctctcaaagatattattccccattaaaaagtaatcatattatgaaaacatgtatctttctataccataacaaggtcaaaatgatatcacagtcaaactatgctggtccagttgacctcaagattagaccaaaatatagttgaattttggttgaacatagatcaaaacttaaattggttatttataatttattttatttggagcttaatcttatagtaatttgcagaaacatgataagagcagaccatcataattaattagcataaatttaatcataagtaattaagcaaccattccattccagaaaaacacccactttattcgatagcgatttgcgcttctgcctaaatacttactccaattttgtagagattacgtatctacattctttctactttcctaagcctttttattatttgtctattatttttggaacaaggtgatgactcgtttgtgctcgagcattgttcatgcaacttctctggtaagctgctctttgtatgtgctctcaaagatcttgtcagcatttccaacctcaaatccatctcgcctatggtactctttgacctgatcaggttgtaatgaaaaaaagtgattaataaggtttggaacaaaattgacggtggttaaacacgatcaaaacagaagtttcccattgacaagctatgtacattgagttcagcaataaactattaaccagaaccattatttactaatccgaatttacacttcaaccaatttttcaaaatatatacgagcaaaattaacagcagttacctcctcttcaggtaaattattatactgaggcagtatcaagcgctccgcaaattcgatataggagcatgggacagattcagttgcgccatccgagaatgtgaaagaagttgaatcggcaacagttgaactttgtagcagaagaccatcagggctaactgttaaatgaatttttttcaatgttcagtgccatgctcataattaagaatccacctacacctatacctttagaagttttacaaaacaacctttcagtacaccgccttcagaattcagcttgaacccattttctttgatgaactgattaagattttttatgcttctcaagttagatttcagttgatgagttgaaattgtgacatggtttagtgcatagccattaacaagagtccatgcagcatattcactttccctgtcccataaagcaaacacaaactttttttttataatggagacaaaattcctacaatgtcttggattgttggtcacaaatataatacgtgggcaactgataagatcaataaattctaattgtatccaaacttcaaataatatcaatatcacctgaccaactgttgaaattctgaattgagtggcttctcccatgttaaagagcctagtgcactagcaagggcagcatgtctatttccactaccagatacttcaatgtacttcctgattatttcctgaatattcacagtaatagtttcaagaaaaaaaataaagtttcaaccagtaaactttactacttatacaaaaaaaaaaaaaaccaagtaaactttacagtacaaattgaaagttacacaacattttacaattctaacatgctattagaaccaaaactacactctaacgagtatccaatccaaaataaaaaagttgatcaaaaagaaaagtagggcccaaaaagagccaccaaaaatctgaaaaccgatccaaaaaaatagagctaaaaaagccacttgtgattcagagataatgaaccaaaaagagcagcttgtgattaagctgtccaagattagttagtaaaaaatagccactatcttgaggagatgttagagagagtcttacattgctaatgtgtagaaactaaataacatatataagattcatggtgtactcctctcattaccaattggttttgagatagaaccatgtgcatgtaccttaactacacacctgactctgccctgataattagtgctgccaccaccactacttaacaagtaggtaatgggcactagacaagcgtaatagttctctttttatagttattcacaggaacattttatgtaaattcatttgtaaaacacaccctataaaaagagaaagagtcttctttgcaagaaggggttggaacccagagtttccatataatacacaagcatttcttatatcattttctctactgtttcaattctctgtttgcttcactccttagttcttgccacagttggaagttactttgagttatttgataaacatgtagttgatgtgattctactgttagcagtaacagataatgtacctgagtttgtggactcatttgatctacaagaagctctgatataaaaattcttggcaaaggtccaccaatgcggctaccaccctcaccaatgacattttccggaggagaaaaccatagtgctctcaattttttggcaggaaaccttaactcatcccttggggtatagccaaaatccaagaaaaagcttgccaaggagtcaatcccataaccatccacctagtgttccaaatgacaaaaactaaaacttcaactttcattattcctgacactcttcccaacaatagaaaaataaatataatctaagcacaaaggcctacaaaaacaaaatcacaaaagaatttttcttcacattttgtatcaggagaacaaattatatatcacggtataataggaggcagacgaatgatgtaagtgttgaagtataactaccccaaaggtcctaaaagcaaagtgatcatagcaaattcgttcttcatcagcagaatgaacaagttccaggatggcttttgcagtggggttcctatttaagtaaactgtctccatacttgccaagacgcttctgaaaaatgattcactaccctgcaacagggtaattgaaaaaaaaaatgtcaattataataataaaaaatacagccaattcaactatagatagtttagacagacacacgcagcgaaaaagaaacacactttcaatcactcaatgtacattattatcagaatttcataatcactatggagtcaaagtttcaaaaacaaaattgtgtagggaaatggaacactttctagacctaaaaggtgttccagtcagctacgtacgagtaaaacccaaaagctaactacgctaactctttgagatatatataaaaaaaaaatctacgttaactctaaacaaatcgacatcacactacaaaatcaagcaatttgattttttcagcgaaacctaaaagtggaatttcattatggaacagccaatatattttgaaaaaaaaaaaaaaaaaaaatccaacctggaaagaggacttgccggacacattttggggagtagaagcgacgggtgagatgtttcgtttctgggttgacatgcaatggacggtgaaggatgatctggggaaggaaagaagttgggtttggcgaagagttgatgatgaagtgagaaagagaaaaagattgtttttgtggatggtggtgggcatggatgaggttgaacttgaaagcctcatcttcaacatcgtcaagctcatgcgtcttaagtttgttctttctgcacttatgttagcagaagttggtattgttttggatttcggtttatttgttgcgtactatgtaatgtttttgtttttgactttgacaaggcaagttttattgggtgcttgcatgtttactagatagatatgttaggtggcaagtaagctctatcttaattttattttaatttgtagtattttttaatatcataattttaaaattaataatattcaatgtagtgataattattaaaatttaaaagcataattactattatactttgtaataataattaaaaaaaattattattcgtcctaaatttatcttcggaattaatgaaaa

SEQ ID NO: 378242 - DNA, 1481 bp, Cannabis indica
agagagagagagattttggaaatgggaaagagagaataagagttaggatatgaggaagatgatgatgatgagttggtggggatggtgattgagaatggacgattgagattaatttagaattaattttagagaatcaattaaagttttttttttgagtaatattttctattgtatttagatgatacaattaaactttttttgtttgtaatttctttatgataaagctgagctagctacatacataataatattggaaaaattaaatttaaaatacatatatatgtctacttcaacaatgaagagcgtgggaatcacgcaattataagcacacaaggtcatgagataatggaatagaagtcgttagtgattacaatttaattccacacaaacacacacacaaacaccaaaggtgttgctttaagctaagaaagcaatgtttaattaacttacacaaaagtggctcaaaaggtggggccctcagtcttagtcatctcttagcctataagggatcaagtgagtagcacgcgccgccaaaacaaggagtagcccccacatacaatcttaattaattaattaatataaatgttttgttgttagggctttcattatcaaaaggaatagagggtgggagaagtgggttttgggacccacaaatagggccaaccaccacatgagcgcacatggttcggacacccacttgtctgatggaacctctctctcactcttttttttttcttttctaatctttgcttatttacttttcaaattatgctttgtgtttgtgttaggtttaatctttttctttaatccacctattattgttggacgtctagctagctagtgctagtgctactactagtactcctccgacatatatataggactatatattgctgtaatttgtagcaccaaaacacctttcttctttttttattttttgattaataattattaatgttaattgcagttgaaatttttgtattattataacaatggaaccgaccatattattctcaagctgagagagacttgccttaaaaaaggggtaatagattcttgagttaattatttttattagtctttattagattttagggctaccctcaagtttttctctcttaactttcgaaattatatttagtccctaaaaaaaaaatggaaataagtatttcgagattttcttttctgatagaaataagggttcgagcgagattggcacttgaacttgttttactttctgtattgagtaattatatgctacaaataaatcaatagtacttataagataattaaccaattaagagaataaatcatataaaaactgagttctaaatatttgaaaattttaaaatcatgagtactatatatttgggtgattctacaatgcacctacttaaagggatgtactgatgcacccttaacttgtttcggcatctagaaaaattttttagtctattttttttttgaaatatttgcaccaa

SEQ ID NO: 378243 - DNA, 4400 bp, Cannabis indica
gatttatactccatacatccgatacttgtaaactttgccaatgccctggaaaggacataccacttatccaaggtgtaagaatacctatcgctgattatcatgccagtctaaatccagtgaactgacaaatcagggaattaaactttcgaacatataatcaagattatattccactgtgctgacaacactataatcattaacaaatacatatgttctggacttaatagaatttataatcatgaaataaatcatgtgaaccatgcaacataaaatgttatttctgatctttattaactagtaaatctgattatattgaaatgggttttatttaggggataaaacccaacacgaagtccaagtacggggttggcatccgtaacataaataaaaaaaatacaaatagattattattgaaggaaaaaaaattaaataaattttgaattaaaaaggaaaaatatttaattttatagaattgattctttaagaaatagttttttttttcatttttttttaaaaaaaaggttgattaaaaagtgctacagaatccaccttttatttttaatatttgttttagtgatgtaaattattatatattttaatagatattaattaacttattattataaaggtaaccttatgaaataaccaatctaattaaattagattcaaactataaaattcacacttaaatcaaatgcattatattaatattaaataaaatattgaatccctccgtactcgcttcttccgattaagtgttacttcaccactagcctctgtatattcatttcatctaagttaggtctttagctatgttaacatgaccatctttgggtgattggaagtgctaatttttcatatcaacttccactactacaaaaagcactatttttgctggtgctcaaatcaatttttttcaaggatcgttgctaataaaaagaagtgactttttaaaactgtcggcaatagttgcgtattctcgaagattttcaacattcgtttagtattctctacgattttaaacagtcacaagcacaaaatattgaaatgaggagtaaaaaaggcatcctcgatagtttaaatctatcaagtacactatagttgacggtttagctaatagtatacctgacggttttaaaccgtctaggatgctcatgttttatgtaaaacccccttcaatgtttcagatctcatattcattctcactctcagatctctctccatccttcttcctcctcctctctccatcctcgatctctctttgtccttgctctctctccatccatcgttgtttgcacaagcagacatgctatttttaacgacctactgcttcaatgaagcatggatctgagattttttccaccgaaatattcaggtaccgtctcatcttcgtcatctaattttttccatcatatcatataatttttctctcattttctcttttttctctgtacatagattcttatagtgttccctctccatgtcttattgaattttcatgtatgacgtttttctacatatcaatggaggatatgtgtcaattggggcttcaaaatgctctgagttgcatcgtggtttgacatcgcaactgttcagggtcgtcagagcttgagatatatatctccaatttgttttttaatgtggcagtttaaaaccttcagctatagtgtcagtttttgcttacggttttaaagtattgaaattagacatacccgactgttttctaccgatcgatgcctattctattcaattttgcgagggtggaataggcgtcggtaatagagacaggcaacaataccattactggattcttttaaacagttaaaaaaatcctttcttttagttgtgatcatttagttttagtttttatttaattttagtgatgtaataaattattatatattttaataagtattaattaactcattattataaaaggtaatcttatgaaataactaatctaattatactggattcaaataataaaattcgtacttcatatatatgaatcagatgtaatgtaaataaaatagtatgaatttgatgaacactcttatatttttaactcagagaaatattgaaaaaattgaagatttatattgagaactaatttttttacaaaccattcctctatttttttaatcttggtatcagagcaccagttcatttccatggctactgcagaagaagccccaggaaattgttcaactcaatctgtaagcaatgttagctaaccagaatcctagtgttaatggtgtctcttcttctatgagctatttcacattttgggagtactttaaaccaactatttgctctcaaattggatagaaacaacttctctttatggaagacactggtgaaggccattgcaagaggacatcagtttgatggctacttgataagagcaaggccagaagagtttacaccagtgtttgatacagagagacaaccagaaattggatttgagatcaaccctgagtttgaacagtggatcgttaatgatcaacttttaatgggctagttgtgtggctacatgactgagggtattactactaaagtcatgggatgttcttcctctgcagagttatggagtggtctagaagccttgtttggtgctcattccaaagccaaaatggatgagtacagaactaaaatacaagcttgtgggaaaaggacgtatgactatgacaaattatcttaggcaaaagaagcaatgggtttatgttctggccttggtaggtgatccttaccctgaacctcttcttgttgctaatgttttattaggtttggacatagattacctgcctatagttatgtagattgaagcaagggaaaagaaaacttggcaaaccctacttcgacctactgctaagctttgacaacaagctggaaagactcagttctctttttggaaacagtaagcattctaataatgtctttcccactgctaatcttgctaataaaggttcttttggtgctgaaaatttcagtccaagaaatattagtaacagaggcaaaggaggtaccaataacaacaacaacaatcgaggaaggttcagtggcagaggttgtccaaaacatactttccatgtatgtgggaggtatggacactctgcaacctacttttacaatcattttgatgaatcatatatgggaacaacaccacctaaaaacacaagtgacaacaacaagtctggacaaaatgctactgtatttatggcgagtcttgaggtgctacatgatgatgcataatatgttgataatggtaccagcaaccatgtcacttctgaagctggaaatttgaaccaaaaaaccaagtataatgctagagactctcttattgttggtgaaggtagtatgctgttcattaagcatactggatctggctttatttccactaataacaatagtcctcttattttaaaagaaatgttgcaagtgtccaagataactactaaaatgatgttactgttcaattctcatctaatgatttttgtgtaaaggacaaccaaaaaaaagaagaaattgcttcaagggaaacttaaagaagggtctattagtttgattccaactgtgtcaagtcatctataaaaaatccccacaattaatctactccttctcaatctctgcaatctaaatctacttgtttctctacattgtcatctgttttaaatcaaaatataactcatcttatttctgagagtgtgtttagttttaatccaatcaagaataagtggcataggaagcttagccacctatccaatcatgtcttgaaccttgttttaaatcaaatgaatatgaaaaattttaagaatgatgagtttcatttctattaggcctgccaatattgcaagtcacatgctctgcccttcaaattaaatcatgacaaagtaaagtttccccttgaattgatacacactgacatttagggtccagaacccattatgtcaaacactaattttaagttctataatattcacttcatagatggctttagtagatacacttggctttacccattgaaagcaaaatttgatgttttcaagctttcactcaatttaaaaatcttgtggaattaaaaccaatttgatagattttggaaatattttaccaggatctagatttactaccatgtatgtttcattaacatcctaatatgaattctaaaacaatgaaataaacacatataaagtttaggaaccttacattgggtgtagtggaatataatgactccttccgttcagatctctagtccttaattcctttctgtagcagaacataatcaagatctgaacctggatctctttctctccttcttttgatgctgattctcccactcaattgtactattatgttcccaaaatgtacgtatcaccctgactgttcaaaagtaggcttaa

SEQ ID NO: 378244 - DNA, 3744 bp, Cannabis indica
attaccattttcctattttcttaactcacaagtcgtcttacgtcatctagccaaatgcgaatcactgttcggtcaccatgttaggatgatctagctaattcaacaagtctaatatagcacattgtacttccatgtctctctcttgatccatccagcattagcacaattttgatgtgctaaatgtcgtgcagctgcctatttactgtgccacgtgtcattttattccatgccacatcatttagacagtttttgagataacacttatgatgtccaatcttgagacatgttataatacaatttaatagccaatctatcatattttatatttttttctcttcttttgaaataaatttaaatttaaattcaaataaaagaggctcaatatttatttacatagcaaactatacattttaacattttttttcaaaaatccataagaaaaagcaatattggaaattggaatgcataatgagaaatgcttggatttacaccacttttgagctatcgtgaaattttcgagctcacacatatgtaaagtatcccaaaattagcgaactaaaataaataaaagtcgaaatcgaagagattcccacagcccacccacgcacaaactctcccgcgatcatcttctcttccccatttccttgcacttttattaaaatggatcttccggtgatcgatctttccgactacttgtcgacaacggctacatcagatgcccaactcagtgagctatgcggcgtagtgagccgctccctaagggagactggggctctgcttgtcaaggatccaaggtgctctgctcaggacaacgatcttttcattgatatgatggagaggtactttcagtccccccgtgatttcaagcttctgcaggagagaccccatttacattaccaggtattcatggagaaaaacaaatatgacaattttcagttgggttttcttattagatttttattatgggaagaaaacaaataaaaagttacttgaattagttgaccctttgagtactcattcttccatggaattgagttggtagcatgagtaaattgtatgttggttaaagtctgaaatgggatttgttaaaaatagagcaatcgtgtactacagtgggattacaaaagtggagggaatttttttttgttgatgcgttatcaatggttatcatttatggtgtaaccacagattgattatgcttgcaattaaaataacaggttggggtgaccccagaaggggtggaagtccccagaagtttggttgatgaagaaatgcaggaaaaattaagagccatgccggaagaatatcggccatcctctccaaagggcccagattgtaagtggcggtacatgtggagagtgggtcctcggcccttacaaaccaaatttaaggtctctcattgttctcttcatttcacaccaatgtaatttgattgctttctttttttatgttttccttctgttgtttcaggaactcaatgcagagcccgtcatacctgaaggttttcccaagtggaaggataccatggactcttggggttacaaaatgatatcggccatagaggtaaagcagtaatgtggtctatttatctgtaatttatgattcgttacgcattttttattttattttttaaaaatcaaattgttgaccttctccccaggttgttgctgaaatggcagccattggatttggtctgcctaaggatgcattcacttccctaatgaagcaggtgataggtctttgtgactagaaacttcaactttactggagttcgtttcttaacgtaactgtgatagttatatcgattacattatgtcctcatacatatgcagtgtgtctgatttattctcttactattagtagtataatcgcaacattactctcctctcttaagggatacgagtgtacttgtctacatgtaaccagtattttgtatttcatgaaactgtacattttcatctgtcgcttcctgtttagcttaataaaatttatggcttacttttgtttgcaaacctcagggaccacatcttttagctcccacaggaagtgaccttcaaactcacggccgagagggaactgtgtttgcaggatatcactatgaccttaacttcttaacaattcatggcagaagtagatttcctggtttaaatatctggcttagaaatgggcgaaaagttgaggtgaaggttcccgtaggatgccttctcattcaaactggaaaacaggttagagtacttgagagtcatgtgcataaatcataacaattcttttaacttggttctttcattttgaagctacgcgagcttttgattacataagaggaacatatattctataatgttaaatttttacagcaatgaagattaaccatcacaatttgttttagtgatgttgtagaatagataaatgatcatattttgtgttgaatttatccattttgattttgagtgtgatagttactgttagttttattttttggtcatatttgtattagatatgaagtttcataagagccctcccttagctgtatttagtgtacctaatttatcacgaaggatccagctatgccgatgttatgacaacaaaaattgattcatgaggataataaacttttgtcagattgaactttttagattttcattttgttccacaatatgctatgatcactcgttaagcatagtggtattagttttcgtgctaattccttatgtcacttattgtatgcacagatagaatggttgactgcaggagattgtatagctggaatgcacgaagttgttgtgacaagcaggacaacagatgcaatcaaactagcatccgagcaaaatcggagcctttggagagtgtcgtctacagtgagtgaagctatcagcttcattgaaattgcaatatatgaagtttctttccatctaattggcatttaaagattatttttttctccatatttctgcatggcattttgtataagagtttgagtatgaagaactcaaaaagtcagcaaacataaaatagaaaagatgaatgacttccctcaaacatcttaagcttataattttcttattttttcttttggcagttgtttgctcatatagcgtctgatgctatcctgaaacccttaggccactttgcagaatctccacttgctagcaaatatcctcccctgtgtgcaggagagtttgtggagaaagagcttgctgtaatcaatctgaaaggacaaagtaaagagagctagtaacttctagcaagtgaattctttgttttggccatgtcaaactgaacagaatttatgttgttttaataaaattgagtgctaattgcaacaaggatgctccagacatgtttgtcttctagctgcagaaacttggttactggaggattcattttatcttgttacacaacattttccttctcactctactatgtaatattcaacatttgcgcttgcatggtagatgtttctcatgttttaaaacatcttttgtgaattactatacttgtttggcccttttctaattccataatgtgttcaaatttcttctactgaaaagaaaatttgttggaagtatttggttgatatagatattatatactaacctaaattcttttatatgatgtacattgttgttcttgcatgcaattggctaattttaaaaatagcgaatccaaatttatttttgatattacaaattcttaaaaaaatttcaaataacatttatattatagtcgcggtaatatttttgtttt

SEQ ID NO: 378245 - DNA, 3985 bp, Cannabis indica
aaaataatacattatgtaattatccatattttgtattgggaaattaatttacaataatatacattgttttgtatctaatttacaaaaatgaagttaatattaatactgacgtaccacgtcagctaaatttgaggttttctattcttatttattattattttcatgtatttttaaaacaaacattttggttactaataacattgataagaaaccaattaattactttaacataattttttttattttttattatataatttgggatacattttgattacctccaaaatttatctgtatacatcttagtaattaattagttatatttaagttatattatggtagtttatcattaaaagtacatttaggtaactttaaaaattatttttgaaattagtaagttattatataatataagaagctactatttttatataccaattattttatatatatatttttcttattttgaaagctaattagttatcgtataatataatataattcaatcactataaatttttttacttttagtcacaaaaaaatgtgtgactaaaagtaaaaaaagttgtggctagggatgcgcatggggcgggaaattggcgaagagtgctcctctcgtccccgttcccatccctgttattaaggattttaattctcatcccccgcttattccccatcggagatggagcggggaatctcctaatggggtggagacggggcgaggagtctcctaataacaaaatatattttataataaaaatttaaatatataaaaatattaaattacataaaaattaaaatattacacattaattattattcaataaactaattattatccacaaaacaacttaaaattcatagaaatgatactattatactaaaaaattacaaacataaattataaattattattagaaatgtaaaataaaatactacaacattagtagagttagtagcaacacatggagaaatattctcattaaaaattacatccccaccatttataattttcatactaggtttttcccttactcaaagtctataccctttagtaccttcaagatatcccaagaaaacacatttaagagctcttggctctagcttcccaatactttggtgttcatatgttgcccacttaaaaatctttaagtgggacagatctggcggtttaccagaccacctctcttcaggggtttttaactccacaacacttgatggactcctgtttatcaaataagctactgtgagtactgcctctcttcaaaatccagtagctaatctagcttgaaagagcatgcatctggctttgtttagtatagttctgttcatcctctcagctactccattctgttgtggggtatgtctaacagtcttatgcctatggatgcctacttttttgcaatatatgtcaaacccattattgtaaaactccaggacattatcgttagagtcttaacccttttgttagtcaagttttctatcaaaattttccattcttaaaatttaccaaaagcatcattgttacattttaaaagaatagcccaaattttcctagaatagtcatataatatagatagaaataactactccccccatgagttggtatcttttcaagactatccataaattagcatgtatgtattcaagaatttctgtagacttttgtgttccatctttaaatttaagcctatgatgcttacccaatatgcaatgctcacaaattttaactttacttactttatctttacataaaagattctgttcactcataatttacaaacatttctcactaatgtgcccaagccttctatgtcataaggctgccttagaatctttaggagtttctactgctgtgttgtagcaatttgaaactggttctccttttaggtagtatagacctctttctttgtagccttttattagggtcataaaacttttgcttagtttcatggtacatgtttcaatcttactcacaacaccaaggtcatctagcatacttatagaaattaattttttggctaaaggtcgcattactagagcctttaatatggcatgtttggttgtttcctaggaggaccatctctcttttggatttcctgaaattagtaaggatttattattagtcatgtaaaaagtacatcttgaatctaaaatccattcatctttgaatttagttacagtgatgtaactccactctcatagccatcacttagattggcttcatgcttcttttccttttgctttgagaaataattttctccctgatttgagtcactatcactaccatctattattcttttgttattttttttccaaaaataacactcccttatgaaatgccatggcttcccacagtgatagcagacattacgatctttgtgtcctctaaatagaaattttccatttccatgtcttccactatttgaagaacatctactgttactccttctcctattgttccaaggcttcttttgatgaggccttcctctactcagattcaactcaccattagagctcccaaccttgtcattcttcatctctaagttaatagactttagggcagagatgacatcatctagggtaatagaagttcttccattattgtcttcacttccttgttaaattctggtaatgagttgaaaatgatgattgtttggttttcatgactcaatgcttcaccttctccgaaattatccaactctatatgcattctcaaaaattcatctaaattgtgttcaagactctaagatctgttcatcttgtagccaaagatcttttctttgagaaagatcttgtttgttagtgacttctattggaatcgatcttctaacttcctccatatctttgttggagtttcttacttatcaaccaacctaatgattgcatcacttaggttgaatatggtaactcttgtagctgtttcaagatactcttcttgttgtatctttgaagttccttcaggccattcaatggattcttcaaggacccttaatgtgtcagtagggatcttatcttccttctccatattctatagtcacctaatctgtcaaatttatcaatgttagttttaagaccactcatattgtatttgctaggaattaaatcaaattgagggttagaaatttctataggatcattcaataaatatcctccaaatctctaacatctaattcctcctcttgattaccattttcatgtttttgaagatcgaattcttcatgttcttgatttttgaattcttccaaacttgcttattgaatgtattaatttatatctttatttgcggaatgatttgctctaatactaatgttaagaatcttaacacaatttaaagacacaattaacacaaatgctaaaaagtgatattcttacaattaatttatgttagacatccataacaagaaattgatattttataactcaccatattagaatcttctttacagatccaaaaacacgagcctaacaacactctctttaactaaaaactaaagaggttcgacccaactagcttcagcccaagaagacaacaaaccctaaatgcaaaaccctgatataaaagggtcacaatcatgtatgtcttctaaccctaacttctacacacttttcaatcgcacctctcttcttctctttcaaagaaaaaaatgcaactagggtacttagggtttcactccttcttcttctaacagtcgcacacacaaggtttcaaagttctagggttagggttctatattcttcttttctacactctcaactataccagaaaaacgaacccaaaataatactcagcctgagcgaagaacactcaaaaaatctcaaagatgttagactttttatttgggcttacattaaattttgttggctttattaaaacttaggttgattggatagttctttgctgtgttagcccatattgttagtgatcaatagttaatgggcttcacatctgtgtgtgtaaagtctaggtgaagcagaagtgtgg

SEQ ID NO: 378246 - DNA, 1094 bp, Cannabis indica
ttcttcatctatagaagattttttttcactacaacattttccccattttcccacaaactcattttccctaataggtttataaatgctcccacagacccaattctcccattttctctattttttttcttaggcattaaactttcttcagtcctctctctcaacccttctccaccactaccaccgagtaccaccacgcaccagcaaggacaccatgcagagtaccaccatgcaccaaactccatttcatgtaagtaatttttttaaaattttagatttctggttttttattttttaaagattttagagatatatatcatttctagattttaaatatatttatatataatgtgtatttatatatattttaattttgtgtatatatacatgtatattagtttgtgtatatttaagtatatttaaattattttttgtgtggtatacatatattttatttttcatagtttcttactttttgttttaacttcaaatatttttttagggttactaagaattttagagatatatataatatttttaaaatttgtagatttatttatatatgtaaataatgtgtatttatatatgttatctgtatttttgcgagattgacatgtggatactaattaaagaaggcctaaaaatcattaagctactaaacgccccgcttcgcgctacggtaggataagggcaataatctcgagagaagggcctccgcgagggagttctatagtgctgaccacgagagaactatccgggtgatacacctttggcctgcagaagctcagccagcacatgataggctacaaacctcctgaccgagtttttccatgaacgatattagaggttgtctcccacgccactctaccatgcagagcatgcgcattcttgtgtactgtgctaagcaatccaacgactaagaatgagggaaatttaaatgaggatggccatggagtgacacgcgtccaaagccccgctagtacaaccagtacattctaaaattcataaagaccacatggaatatacgccacctactaatccgatggtggaggttcatgttgggaatattttacaatgatctagatttactaagaagt

SEQ ID NO: 378247 - DNA, 3908 bp, Cannabis indica
agttatgtccgtaggagacttcccatctaaacgtgtctctagtttaatccttgatatgataactttccctttcctataaataaataaaaaaatcactaaaatcttaagtgactcaaattttgaatttacaaaatttgctaaaattaacccccacttaaattggtcaaatatttccttttttatttttttgttggcaacaatgaaacttcataataataatgaaaaaaataccataaataaaatgtaacagggtcaacgtgttttttttttagttattacaagtattattaaagttttaatgaatttgttacacctttctatttcttgaaactatgactaaaataattataaataaatgaagaaatattaaacaatgtaaagtgtctagggtgttttcttttaaatctcaagacactagactttgtttaatattttttatttttagttttcaaaaaagttataaaatggactttctgaaagaaggaaaaaatgaaccaaaatgaaaacagaaagttatcattagaagcctttaaaacaagtgcttcacttaggaatttagctaaaactcatatgaaagaaattgtattctctttaaaaaagaaaaagggaaacatctgcgtactgcattactttttacagtaccgggtcacacactccagtttacacacttgcagaagttattaacccagttttctacatgatggtttcattcaagttataacaaacatcttgatgtttcgggaaaattctaattagtttaaagtgtcaaacaaatagtccgcccaaacttccatttccatcaaaagcacaatattctgtctggactgtattggaccttgttttcagcaccctatgctattatgaatttcctaaaatcatacaaaatgcttgctctaacttcaatgaactccgtcatacaaaaaatctgggggttataacttctgtaattgtgtaaatagaagcatgcggtacagtactgcataataaatgtgtggtattgtagccgctcccagaaaacagtaacaaaagaagaatagaattggcccagtttactaatgcctaaacgaattcataaaaaggttgcacaatgtaatcaatctatatcttagacttgcatataaacatttatggtgcatgaccaatactaatactaatgatatagtattaatattaaaacaagagtttttaaattaaggatattgggtggttggcagttaatttctgaacccccctaaaaaacagacaaggtgggtgacagaatgtacactttaaatccttttgtatggtttcagacacaggcgtgtatgcacacacacacatacatatatgaaccagaactacaaaaaatgagaaaatatacattatcacccttaaaacaaacaaacatataatagaagtttaaagagagtttattgaacaaaaaaagaagaaatgtacaacctgacagtttgatctgtgtgtatcccaacaaaaagaaaatcaccatgctctttagcgagtctcaaaatctgtaaaatcactgtttattagtaaatataaatattattagtgaatagtaccaattttgtcaagagttgaacacataagtcactcaccaagcacttttatctataataataatgatgaagtggcattacagtatcgcaaagatgtctaagaaacctttgcaacacaggcacatcaaagagaacatgtcaatattatcctctaaaacaattatctgttttcttatatgtttaatttaaaaataaatatcaaacaccatcgggtagaaaaagtattggggattacacttttagaaaataaaaatatatctatgaaaacaacactagttgtatgtattagtatagagaaaataatacatggagtagatagtttattgagcacgtttaaaatagttttggggctagaaaccttccgcaaatggatcacacagtgtgtctccactaccactctaaaagtttgtctcaatagaggtcgggtagggaaaaccactcccacttgtagcatttgcctgggtgatcctctcttcccttatcttcttatctaggctttggaaattttgtcgagactcttagaggaggcccttggtaaaggggaaatcacaggcattagacttagccggggtagtccgactctctctcatatctttttgcggatgaccttaccatggtagccagagccgatttggcgaaagccaaagactactggcattgtttggagaaattctgctcctggtcgggacagcaagtaaacaagctcaaaacctccattttttttattaagagatctctagaaggtatgaaaagtgggataagagaggttcttggaaaatgcgccatatgggaatattaaatacttggggcttccattatttagatccaggcagaaagatgttgatttcaattttatcctcaaaaatcttactgctaagcttcaagggtgaaaagtgaaaactccttcaaaggtcgggcgtactaactgaatcaaatcagtgggtctttccatgcctatgtattccatgcaagataccaagctttcgaatagactggtgtcaagaattgatggcatggtgcgagatttctgatggggtttaaaaaaatggaatcatgggttgcatcttaaggtaggggacaaactgtcccttcctaaatctcgtgacgaactgggcttccacaaaatcagagaaatgaatcaagcatttctggcaaaatggggatggaatttgttgactggtagctaatctctttcctgcaagattttgaaagctaagtatcttcggggtaaaaatttccttaattgcaagtataaagactcggacttctggttctagaaaaatgtggtgaaagctaatgacactctcaggaaaggaacctgtaaagtggactaatggaaaagatagcaatatttgagaaaattctttagtgactcgtcgacaagatttctatccgaaatctaatggtaagccttctcttgggttgagtaaagtggctgaccttctgacagacaatggtgattaggatatacagaagctgaattacctatttgaccaaggaaccattgctaatattttgacagggaggagaccttccagccaaggcagtgattattgggtttggaccaacgagcggagtggtcgcttctctagcaaattttcctgcttaatctaagcccttcgaagggctccactttgcgaggtttctccctccatctagaataggctttggaatagcaaaattcttgagtgtcacaagatcctttggtggagtatcctctccaacgtgcttaaaattcactctattttggccaagagattccacattgattaccccttgtgccccatctatgggattgaggaggaatcaatggagcacctattcatccgatgcaagttggcttatcacctgtggcggtcatccctgtgggtatattccccgttacaaaaacagaaattcgagtgttcgactgggccaaattcatctggagcttaaagacaaaggaataagtgttgatgagatttttctttatgcctccattgttgtagacacaatttggtgggctcaatacgataaggtacataataaaaatttgaataacatgaaacactatattaactctatttcttactattatacatattacagagcttctctcactcctactcctactccgattcctttgaatgaatggcctcctcctcatgactagattaagttgaactctgatgttaaagtgggcatggataacaggtgtattgcagttgttgctcgagatcatcatggtgctgtggtctaggtgactatagcgaaattagactttttagatgctctttgtggcgaggccgcagcttgtggtttggctttggagaaagcgacagaaaagggttgcaagtttgtaattgtggaaag

SEQ ID NO: 378248 - DNA, 1705 bp, Cannabis indica
tccgcccctaaaaacgttaattgctgtagtgtatgtgtcaatattgctattggtccaactaactctcgagtcccatatactttaatataatagtttttagggaatatcgctagctaatcgcaacgcgatatgtcgagaaggtgctaggcactattggtgcctaatagcaatgctcattatatgatacccaatatttaatttcactaataacagtataatattgactattaaacaaatgctctcaaatatatagtagtcttcttatcttgtatatatataaatatatatatatatattgagcattgctattggataccaatagtgtctagtacttatagacatgtcgtcttatgattgactagcgatactccctaaaagttattacattaaactatatgaaattcgatacttaattagactaatagcaataagaaaaaaaaaaaaaatgctaggcatcactaataccttttaacatttctcatataaattaaactaattaaataagaattactaaaagacactagtggtgcttactgcttagcaccctcttatgtgtcattatcgttattagttcaattaagtattaggtcccatatagtttaatataataatttttaaagagtatcgctagctaatcgaaagacgacatatctagaggtgctaaacaccactagtgtccaatagcaatactcctaattaaaatatatgtttgagagcatattccttagcgatattccctaaaagctattatattaaattgtgggactcgatacttaattgaaccaatagcgatattgacatataagagggtgctagacaccactgtgccctttagcatttctgttaaaatatagtactagactaacaattgggaccacagcttaagcggcagttaatttctcgagagttatgattacattgattaattcgtattattaacattaattaatgttttagtgggatcaatattttgatgacaattattagagattcatgatcactttgtccggagataataatcatgagtaattttaattttaatatcttttcattaataaacagaatatataatttgtagaagtaagttttttttttttttttttttttttttttttgaaagtagcatctttcttttgttaattttaggaagtttttcaacagttgagataagattactttaaaccactttctatttgattttttgggtagaaattcttttagcccttaattttagggattaattaattgttttccaataaggtggctactaagctaatcaacccattaatatggtcaaaaagacattttctaatcatattttattactaagttgaattaagatggcatctttcaaagaatgtcaacgtatgatatgagctccttcaggtttataaatttttttatacagtggaaaatttattagtgtaagtgggaaaggttgtgtaaaaaggaagagaatctggaattgattaacaaggcaatattggcaaaacaggtgtggttgtttttgcagaatggtaattttttagtagctgaagctttgaaacattcttattttcagaatgatgtgttgagtaccaagttgggtattgtccgtcgatggtttggagaagtttactttgggggtgagagattatactcatggccggccctgaaacaaagtgggcgacaatagaaaaagggataatttcacaaatgcacaaaa

SEQ ID NO: 378249 - DNA, 4003 bp, Cannabis indica
tgtttaccttcttcatgtttatccgtttgccagtcttgtaatcaccttggagcttactagccagtgttggctccataacaagtcgcaactgctcagctagctcctgagacaaccttgttgtgagcaactcatatcttctccatagagcagtagagttagctacagaatcaatagaagtatcctcaggatcttgggcttttcccaactcctcatcatttattgagagcttattgagctgatctaccccgtcattgaagaaagcctttctgacagacaccaaaccatcagataagcctgctaaggcattatcatcataagcttgaacttcatcagattctaccataggagtcacctccatttctgagggagtcattttatcctcaatcttacttttagaaaaagaagaaccattctttacagggtgaggttcagaattctcctcctcaatttccatttctgttgtgtcatctttatttgcggttggttcattttcattggttttgttgctattgacattagtgtctatctgctctgttgttgcaagacctaatgcttgggatgttcccatttcagactcagggacatatccaaactcatctgcattatcatcgtggatttcatccagagcttcagtttcatctgccacgagatcaataaatactttcactctttctttccactccttgtatggatcaccacgactgcgattaggatttggttggcttttctgcactgaggacgtctcattggaaggtaattgggtctgtggttgatctccagtctctcgcttactgtttgataactcagaatccattttatccagctcagaggtattgctggatggtaaacctctggaaggagcaagtccgctatgagtgtcattgctgtttgaccagtttgattctggtaccatattatttgaatctgactcttgcaaatccccattgggttgagattgtgattctgagttggggacattgttaccaagattgtccgaaatccccagtccagacatttcactcttggatccagatgtattcgtctcagcattctgttcctgatccttatctagttcctccatttcagaactcatatccaggtctcccgtttctgcatattccattgcttcatcatctggacaaggattctcttcctcacagtttccagtatcagtaagttcctcctgctcttcaggacctgcatcttctacagaatctacaacatcctctttatccaggtccatttcttcttccaaactctgctccaagtcatcaggcttcaaacctgtagaatctgcaaatgcttcttctttgtccaagttggcatcatctatgtcatccccatcatcatcacaaagatcgtcctcttttccagtctcaccatctagtttatcagcatcttcaggattgagctccccatcttcgtccgctgtcggagaagaatcatccttggctctaagctcacgggagcttttatcagcatctttaactgaaggccctgattcatatttctcagttgaattatttggattttcatcctcctccttattccacagtttctcatcaactacttcactatcaactccagtttctcccattgtagattctagttgctcctcctctccatcgtcatccatatcttcttcagaatcctcactgacatcagataatttaccatcaaaatcttgctccatttcaatacctttatcattcttattggggacttcaccagaagcatcttgttcttcattttgctacaaaaacacaaaaggaaagttgaaaaacattttagcaccatgttagataaataattagaacataaaaaatttagagcatatatattttccaacttgattataccttatcagatgccccaagaagctgatcttcatcagttatctgatcactgacatcattcttcccttcaccctctcccattcctgttccacttgcatcttgaaatgaatcacatgaagcatcatcgacttgatcttcattgcagatgccaaagccttttgaatacaaagaagccagaacatctgcaagcacacaaatcacagcagaaacctaccacacaagtacaagatgatgttaaaaacatgcatcgaagtacaaatttcaatggtcacataaataatgttcaagagtgggaggtaggaatagacttactgttttatgcatgtctagctgttcttgcaacagaccatcaccgaaatttgacataagatccaaaaacaagtgcaggtgctcaagttgagcataaacattgtaacacttatccccgaactgattcagcagttttttctgagcaaagaagatcagatccattatcaggtatttagaaagataattagtgtatatatatatatttattgcagaggacaagccagttaaacttacagcacaagatatgacccgtagaagctggctacataaatgttcgaagctcaaattcatagctaatgactcaaatagaaatctccaagaggtgatactcccaagtgactcatctgctacgctataattttccattgcctccttaatatgctcaaatgcacttttaatagcaagaagaaattcagcttcaagttcagaaaagattctgtcggatgtgtactcttcgtgtatctcacttgaagcattttcaattttctcttttgttgccaatttgaattcctcttccactatttttccctacaaaatttcataattcaaaagtaaatttaatctcaatggaccccaaatcaaatctgcaagttattgtcaactttacactgaagcactcaacaaaatccaagcgtaagaaacatgcaaaataccttctttagcacttcctgaaaatgcccgagcaaagttgttttaacagagcttctatttgcatcctccctatgcatggcgagatgattttcaaaatccataagtaaacgaaagttatttgctaccacttcttccgtatcttttgaaataactaaaagatcaggagaagcaggcagtttagtaatatctctatcttggccaagaagagtattatccagcaattcctgtccaaaaaataaaatgaaatcaataaagagcaaggactatgtgtataaagtgatctgaaatgatggatgagaaaagtacacctttgaattcttaaaacaaggaaagaatttctcaaccaaagcaagcactccttgtgacgcagctttcaccgtgtcacatgtttccaaatgtgtgttgtcaaatgttctcagcaacaacaactcatcatatgatatagaacacaaacaatcaaatattttctgcaatattaagaaagtattattatcttacaaaagaaaaaaagaaccaaaacataaatcaattggatcaaggtaggaacatactttctgctgccacatgcacctgaagatgacatcttggttttggacaatacaaaacatggtgcgagttccaccatcagtagtggtgcagttcgaaaacaagtttttcagaatagaaatgcaatctttaaaacgcttcaaattcttagcgaaaacaacagcagcattatgctgctttgttgtatttcaataagctggtggagaaaagagcctgacctatcaacctataataaaaattaaaaccttaatacaacttagctaatttttccttgaacgaaatatatacagtatttgcaattacaatggggaacacacctggtcacgagtgatatctttgtggcagttgaggcaaatctgctgtaggagcagcacagatgctacactcttaaagtaattttcagtagttgcagcccattcagaaacaaacttattattagcagaagcagcattagaggcttcatgcgtcagtccattttgtcccggcaacaaatgcaaaaattcatgcaaaggctcgaggaaccaccaagatttagcttgatcctacatagatgcaagcatgagagagagagagagagagagagagagagagagagagaaggagagagcagtatcatgaacaagaaataagactaacttaat

SEQ ID NO: 378250 - DNA, 5562 bp, Cannabis indica
accatagttaaatcttgaaatagagccacctttcaatccatcagggaaataagaaataaaagggaatgaaagattgtacctggaatcttgaagtccaaggagagtgctggaacacgccgcatggggaagctggttgtgataaactagtactcacgatggtttgggcaatgagaagaagtggtcattggacaccgagcatgtttgtatttaaacccaatctttgaaggatatccatgcatgggttgtagttttaactttaaaaatataatatttcttccggggttggagcagtttgtccctgggacttgcaaaacacaaaccaccccgcaagtagcatgtatgcaactgacaagagctggaagggagctattccactttgacacaaaatttggaaaagtaggtccgtcctaagcgagaggtgggctccgcaagatatatggacccaactctaggttccaaagccatccattctttgggatgctgattcaccaagaatggacattcagtgccacatgagtctcgaaatgtcttttactcgtccatcagtagagtgtgctttaaggagaccgtagttctttagctgatttggcctttggtctatctcccagatataatcattcagaattagaggagtcagggacacaacgtaggctttgcctttgcccatactacatcgcttggattgagtggatttgaaaggtccctcatctagaatggggtcttcgagatccccttccgcaggaagcacttccatgggagatgtcttgggaatgtcctcaagattcactaaagctagttggaaatcgttaccttcaccaaacactaaaaaagtgataggaaagtccatgcagtcaataccctacatccaaatgacaaatatggttcttagggaagcctaccccaagactgctaagagaagtccccaccggactcgtgaccaccaaggtcactaccttgaagtagcctaccatggtaacgaatcgggaacccaacatagaacaacaataaaaaggcccaaattttctatttcatagacaaagcaaaatgagtacacataacgaataaaagaggaagtactcaaagagattactgataactcaaaaacatttagcctaatcctcggaactagaaaatcctaaataacaagcaagcttcttaacccaagcaaaaaggatgatacctctttacagctttagctctaaaggtgtccctcagtgaattaagcaagctaattcctaacataaataaccctaaactcctaaaattaaaccctacgcatgaaaggtggcagattccctcaaagacaaaaactatattttccattaagccttgaagaaaacaatttaaaagctgaggaatacttacttgagatacaggttaagaaatggagatgacggttgtgctacttgaattctgcttcttgcttggcgacggtggctctcctagctccgtcagcagaatggcttaagatgacaatggatgttaaggaaatgaaacaaagaagttggggaagaatgggttacggttggttcagagaggcatgggagggctaaaatttttgggcaaaaggttgtggataaagtaaggaaagaaaatagtttcaattgccaaaaaccccatttatatggcagtggttgtaatgattttgaaatgcacggtctagatcaaatagattgggggctaagtcatacaacggttgggaatacaaaaaagttggcatttaatgcgtctgaaggaagagaataatgtatatatcactcatcattttgtggtagcttccccaatgtacctgaggataggtgtcttttctaaactcaccatcattcgttttccccgagaaacgcgcctaaaatatagagcgtgggtctcacgactccactaccaagcatcatgcttcgacgagtcatcaatgatatcaacaagcatgacaacccttcaggtacctgaggtgctatggaaggtcccttccacctcctgatggttggttcgtaagttagagacatgaaacaaacattcgggagaaggctgcaagctcttgatactctcaagtcttgggagcttgggggtgattgttatccctatttcaagatgagttcagcgtgaaagtcacagcagagtgctacgtcagattaaacactgatatcatgaccttcccctaaacgaggttacgaaagatactacaatacccaaaagaatgcttctccactaaagaccgagatgattcttgagattctcaccttatgcttccgtaatcatgagtaaataagagtcgtgtacgtcccaggatggttgcaaattggtttgtcttggaagaccttagccaaacctccttgaaacttcttaaggccaaatttggagcaaaccctgacggttgcatgtcatataacatcaaatcagatcttgttccctgtgttagaccatggttgtgcgcgtacgtgccactgtagttcttattgtccaatgacttgtgtaggcaattattttaaaggagaaacttttgagcgatacacgtcaagacctttacaagatatcttgcattgatcaagaaccacatgatgagaaagctacataccaaaccagtggtcagatggtattgttgtgtttttggcctttttgcgtgttgagtaagaaagcttagttgggtaaagggtatgcccttaccctcatgtgtgcctataaatacatctattttaatgtatagaggaggaacattttttacttaaacctctactaaaattcttagagagctatcatctttgagagaaacaagaagaatacagagttaccattgtaaacacttgtaatactcaaatacttgccaaaaaggctaatatagctgactcgtggactaggaattattaatgcccgaaccatataaaaaattcatttgtccattatttattattttgaattttcttaagttctcattagtcgatttttcgaaaaatctcggtaaacaattatagtttaaattaatgttaaaagatatataaattgaattaacattaaagtattaaacaacaatttttaaaaaatagaataaaaaatatattcatatgtaaattttaaatttcaacttcaatatttaaatacaatcaaaattatcaactattaattctaaatttcaaattaaattctataaaatacaaatattaaatgtaaactagttttattatcaaacgtaatttatatattatattatagataactttagtaaaaaaaaatatgtaaatcagtttattcgatttattcgggttatttgagccggttagaataatattcaacccgcccaatatatatttattggacggcttgaattttttgtaaagttattcgggttgtattttttgtcggtttatttgatttagtttagagagtttattcagaattggacggtttgtaaatttttttgaacaactctttatatccactagatcagcgttaccacaaactccaaaagtgagtaatcttattgaaaggcccttatgaaaatagagggcaagataggagatcccgtggaaggagaaaaacaccagaacccaataattaagagaaccgaactagaatcctagcaaagcttctttttagaaaacatgttatgttgttattgattactagaggttttgttgtgatgcttaatagtatagttttaataattataacataataatcaaattatggagagtaacattttctttttcatttcttatatatcaatgtatctttttttcaaaaaaaaagtgtacgatagagaacaataaacgaaatattattcaaaatttgacaaactaaatcatgtttggtgtttgaaaaacatgagcttataaaaatttagtgagataacacttgctaaattttatcaaagactactttttactgatgtagtaaggtttaatttgaggctgagatttaaagagtagagaaaattcattatatccacatcatctacaaaacaatctcaagtgtcactcatttggataaagcaacacgtggcaaaaacccatttgttgtaacatccttggcgataaggaaaaggattatgttacaacacattctacactttaatacttaaagaaattgactcatattcactagtgcaaaaaaattgagagacaaattaagcataacaagataagagagtctgagttgagacatggcatctatggttatgacagcctcctcattcccatgcggctcagccatgaccatggccaagcaaaccacaacaacaggccgccgtggtgtcatggtggctgccaaggcctcagcagcagcctcagagggtgagaaggtgagcttgcaaatgaagcagaacaaggaagagagcacaagtgggaggagagacttgatgatggctgtggcagcagcagccgcctgctcggttgcaaaggttgccatggcggatgagccacctaggggaacccccgaagccaagaagaagtatgctcctgtttgtgtcacaatgccaacagctcgtatctgccgcaagtgagcaagtattagttttacttgatcaacttataattcaaatgttttgaatattggtggtggacctggttgttgtggtgctgtataatttgtaaaatttgtattgctctcatcatcctttttctttttcttttttttttttttttaaaaaaaaaaaatttgaacaatcaagctctttttctatcgctgcttcatcctctccctttattttttaatctaatcatagctttaattggcgacataaagttgtgtttttttattaaaatacagatgattgttaatcccatatgggggtgttagatgtcgaactgtttgttactgagtgaatagtactttgattctgtagttggactcggctatgatcccgtcccctgacctctgattttatagtgggacggctcacgtcacgtgatcacaactatagatgaggatggttacgaagatctccctaggctctagatagatagtcacttgtttgaagagggtaaccaactaaccaagttcgaatttggccttaggaataaaccatcccataataacaattaggagtaatatgtggtaattcctatatttaacgacctcaattaggggtggacaaaataagatccaaaccattcaactccgctaacccattttttgtagtaaatagttatgttaagaataggtcatgcccattggactgaaaagtgataggccatataattatgggttgattatgagttggacatattttaactctatgtaactcaaaccaactcattttttgaaagatgttctaaattggagacaactttcatacataaagtatattttacattcacaaaatataacaaatatataattatacattttcatacataaataaattatattgtaataacattagaaagtgaattaactagaacacatcactaacacgtagtctatagttaccctactatttatattattaactttactactcacacaatgataccactaccaccttagttatttttaaagtactatattacacacacacatatatatatatgtatcatttttttttatgtatgcactaggttaaataatttt

SEQ ID NO: 378251 - DNA, 3940 bp, Cannabis indica
aggaattgctcgatgctttactttcggtggcagcaggaacagagttctacatgatcctaacatcaagccgcgatcagacttatccaaagaacagtatatgaaaaaagatgagcagaccactataaaccactttcatgagaagcttcttaagcttaaggatatgatgaaaaccaaggtacaatggttgaaaatgttgaaactagactaccaatttattttaatatttatgctttttttaaaacccctgaaaatctcgaaataaatggtttaggctggacggagcagggccgagaagaggcacaaattcatggaagagtatcttaaagagttctatgaagaatgggatggaaaagcttgaaggaaggagagagagattgtgtataactacaattccccatgtaatgtctaatctcttctctagctctaaagttgtttattatgtctcatcttgaaattgtgatgtattatgtaattctacaaatagtgtttagatgaaaagtgaagatgggatgactgtaacttctaatgtccaaaaatgagatacccctttggattgttgtttaccaacttgattataacttctatattttaaaattgcccaaaacaagataccctttgattgtcgtttaccaacttacaccaactacacacgtacaaattacaatgactcagtgactagtttttgaaaattgttttttcttcattgagaaaacatgtcagttacttgtcaaaccaacaacaacctaccaaacagacaagatttgctcttttggataattttcttttcaatgccatcattctcagactactgttttagtataattgtctgtaactgataagaaagaaaccttaaactttacttacaatgacatataaacaaataatcattgcaaatcagataaaagattattttttcaaatcacaaactcaaacaacatatgactaaaactaaatataaacaatccagtatccccacttaaccactcccttatttgaaatccaacttcatctagtggtcatatcactccacactttcctataatatatatattttatatatataaaactctaagaaaaagggcactaagttctgtattattattacatgatatgatgtattagtacttaattaattaacctttgaagtagtaattttttggtcacgcctatagagatgaactttcaaaccatgtttcatgtacatagtcaaggccaatttgggcacaacagggtgattctccacaaccttgacatggtaacggtagatgattgacgcggccacgaatttcatttggtagtaggcaaagtctttgcctaagcacagtcttggtccgccattgaatgctgtgaatttgtaagctgattcactcatgtaccgcccatctcggcctagccatctctcgggtttgtattcaagacagtccttaccccatatggcttctgctcttcccatggcgtatattgcatacaccactttggttccctttttcaactctgtcccatctgggaatttttcatcttcaactacctacaaatttaataatccttaaaaaaaagttatacaaaacacacatttcatagctaatcataatggaatgaacacaacatttctttcttaagacccttaagaaatagagaatccctaaataacacccgtaatgcctaatactatcagtaaagttttatatcaaattgccaacatcataagtacctaatatatatatatatatactctaacagttaaattttaaaaaaactatattttatatttagtattaagtagcgagtttcatataatttaaattaaatgtgaagaatcaataggatgttgtaataataatatgtagatttgaagttagttaattacctccttatgatccacaggaaccgaaggatacaatctaagagcctcagaaatagcagcctgcaaataatccattttcttaatctcctctgctttaaacaccataaccatctcatcatcatcatcaaccacttctctttccttcacaattttagaaatctcttcaagaattttctgctcaactatcggatttcgatcaagaagccagaaaaaccaactcaaagccactgaagaagtatctctcccagcaagaataaaattaacacaaatatctctcaaaaacttgtgggaaaagggctcacccttctcatctttcaaccccataaacacagtcaacaaatcagacttcatcttcttctcatcgcaacgcgaagaaagctctttcttccttgtctgaatcacatcctccgcgaactcatccactccttccaatgattccttcagtttcttctccgttccaatgttcaaatacctcattaatttccacaaacaggtgggggtcacaaacctatcatcaaattaattattataattaacacattcgaaagaaatcaattttcttaatgtataattaatttcaaatatatatgaatttattctgaacttgatatcaaatatatatatttggagttttttcatttgtaaactttgattttttttcttattttaatagagctacacaaagtaaaataacttaaatcgtaatcgaaattcatatagaaacccacctaaaaaataccaaaacaactacggaagcaacataaatcataaaaataaaaaaaaaaattcaaaataatacattaagtataattccccaatatattaattataagaaaattcaaggttccacgtaaaatattatatatttttatttattatttattgttaattttaacatttttttatgaaataaatttcttcaacaatttaaagaatgtcacgtcaaaataaaaaaaatgaaattatattataaaataattgaaaatacatagggtgtacaaaaatatttatttttcttgaaaaaaaatatgtaattaaattcattggctaaacatgattattaattacttaaattttaattattaatcacatacctgaaaatggtggcttcagtggcgtcctcgaaggctttagcgaagggtatttccggtaaccccttttgcaagcaaccgggatcgactccaaaagctatcatacaaacgttatcaaacgttaaccttaacaaaacctcttgaagatctaacgccgttaacttttggacggagtcatctaacaccgttaaaagtctttggtgaactaactcacgaagagactcagtcgttagatttctaaacttagctgaatgaaactcaatacttgctgtttttctctgtctttgccaaatttcattatcagcactgaaaattccatcacctaggagatcacgaactgtgtcacgaaaataaggtccttttgggaaattaacaaactttgttttgagaagatactccaagtttcttggatcagatgttactacacagttgaggttgctaaaccatggtcctttgaaatgaaacgtaccgttttgtgttttgagaacgttagagatccactcgtacatgttgtttgattgtaaagctgaggccaaagacggtaacatgccaagaactggccacactggtaacccttgttttctcttttgtctcagtgaatgtatggctatgaacacgaaaattgctgcgaaaatctccaagagttgaaggtggcggaaaaagacaaagttctcgcccgtggtggtggcgggggcggcggtgagattattggtgttggttgtgatattattcatggttttgggatgagaagtttgcatgggaaagaaatagttgatatgtgaaaaaagttgtgtagacatgagatttattatatgggtgtgtggtaataataatttcttggggtgaattatttgctttagtattgagtagttttgatttggtgagctgaaatagtttgtgtagtcttcctagttatattgaaattagaataattgggcttttttttttctttctaaatgtgaatggtttattatggatacatgta

SEQ ID NO: 378252 - DNA, 1240 bp, Cannabis indica
gcagtggtggttgtggcgtttacctcattgattacatgcatcatctgatggtgcaacgtctcctggttgatgtcatggataggaacatgaagatattttcagaatggtggtgtgtagatcttttctactacaatctcagttgatacattaatagctatgtgtatttattcttctgatgtatataaatttcttgaaacatttggtgtatttgatgggtaatattttgacaatgcttgatgtaattgaatttataatagttcttgcaaaatagagtaaaatatcaattttaacaaattgaataccataaagttaatagtcatgataaaatccaataggtagaccagtgtagaaacctaaaaaaaaataattaaaaattgagaaaatgtcgacataacatcgatatattatggataatacaaacagtgctataaaatatcaataacatgtaaatactttttaccaacttaaaataccacatcttagtgtattatcaagaatctattgatataaagtcaatatattatcaataaaaaagctaattaaaaaatattgagttaatattatccatagtatatcaatatattatctattgtttattgatactcttgcttgtgattaatttttaaaatattttgagtatttattgatagtataccgacatataattgacaattaatcaataataaggcttaggaaccaggtttcttcagagtttggagtttattgacaggatagcgacagattgtcaatattttgtcgataattacactgattatttaatatttcaagcagattggaaaaccatcggcaaactatcgagagaatgtcaatatactatcaataaaatctaaggatgcaagaaccacaaacacaagtgttttgtatcaaaaaaatatctttaaaccattgataacacgtcgataaggcaaaaattaccatttttttaacatataaaaaacccacttgctactactcacttttaatgcaaaaaccagaacaaataagtagttttgaagaagaaatatagttcacaatacatattattacaattaatagtagaaaaaaccttaaatacgagctttgcatgttactcagttgtggtctgaacttccacagttgccgcagtttcagggtagcatcactcttttatcaccagaagggaaatatttctcccgtcttcttctagcattgctcttcctttgatgtaacaacctaactaacataggcgtattacgtgatt

SEQ ID NO: 378253 - DNA, 6644 bp, Cannabis indica
gtttccccaaaccccttccttgatgcttttactataaaaagtcattaaattccaataatccctcttttaacttcaagtttggattttgagttaatccattaatctaagggattgtttagttccaatcgtagaactgatgccatgattttcccatcaaactctaactttacttccagttttaatacaacatgattttcccattaaactctagctttactttcagttttaatatattaaaatagagtttttcctccctattatatttatgtttggggtatgattcctcacaagacctagacagtaattttcttaagtactttcctccctaagattatagagttcagaagtagagaaagaacttaacattagacatcatattctttagagattacaatgaaaccttacctttgactcaaggtactccaaagcttgttcttttgtataaattccttccttcacacattcctgaaatcaaagcaatatcctaaaggtaagaataacaaagaagttgggaaacaaagaaatgctcaacagtagaaacagtctagaaattctctcatcataatctgtcatacataacgtagttattaacttggcgcaagcaaaatagtatacttattaaaatttataaattctaactagttacaactttttaatgtaaaagaaaacaaaagcccaagatatttcaaaatgtatatgacaaagaggtattagaaaaaaaaagatagggcatgatcatgatttacgacctagaatgccagtataataagagattgatccacatgggttcttgttgagaaaatataagctacctattgtaaggtggtttgacgctttgaatgttagttgttaagcataaattgaggtttataaatatatttttagagcaaaggatcatttcttttaggtaagaggagctcattgctgtataaatagagaaatttcattcacctttctatgcatttatggggttgggatatttaatatccttttacaaaccaaattatccaggtagtatattattggttggatattggtcttaccatgtacctattgaccaaaaaagtttcaattttatgcttgatgaaaatacaaatccttaaatagattgctacctcaatagatggcataaggaggccactatatcgaggatctcttccaagcatttgaactacttcttgatcactctgcattcccatggctttcatgaccaccataataggaatctatacaaaattatcataaagaaaattgattcagtcacataatgagattggggtgcaaataataattattattatgtttacaggattaaaccttttttgttgaaaattgattgagcatcaaatacaacttcccgttttccatttgtataatagttttgctccttactgcctcagagctgcttgtaacagatgcatttacgctgaacaagaaaagatccatgtgccaatgtgacaaagcataaaggaactaaaactgagagtcacaagtaataagaagaaataagctacaaaatttcaatggatgaattgtatacgggtttgggagaaaaataactttcaaatgctaacttgactggcaaaatcaaatcaataattgtacatcatcatggatttctttttcaaagaaatttagacagattgctttctgtaattgattatgggaagcagtctaaaatattcttttatctaaacaatgaaaaggtctgcaattcttgtaaccatggttctcctctgccacaagtgaggactttcaatgtataacgggcagggacctgtctaagacaaggggttccttgctcttttcaaaaaaaaaatgaaaaggtcttaacagaacctactatgcatggattcaaaattttaaatcatatatatgacataagttgtgagatggaaaaataactagcaaaagaaatgaaaccatattaaattgatgatagacttatattagtaatccattaaaagcctgaacactaaatggaaccaaactatactaaaaacaggtataaaaaatcaaaatcaaatacttacttccccttcttgtctgtatcaattattatcctatttttagatagttgctcttgtataagaagcacctggaagaagtggcttagtcacaacatggtagtatagaatgatcaacaaagaaacaaatcaataaccaagcatccccatgtaaaacaaaaacaaaaactctccaagtttagtatatttttcgagaaaagaaatgacatgcaactttctttttcatatgaaacaacactcatacacaaactagaagatgcttgtgcaaaaagaaaattacaaaatcatttctgaaaaagattgagaatcaaattcaattctatgatgatcctacatattggcaattctactgtagctagaacttcaccttttcagttcctttgattacaaaatatcctccaggatcaagtggacattcccctttagtcagcaggaaacacatgcagaagatatttaagaagcgtcaatgtgaagtatttcaaattcaacaaataagaatttttcatatcaagcacacaaaccaagttttgcaagttcagcttcatcttttccatataagacacagcagcaactacgcaacatgataggcattcttccaataatgacgtcattctgcaaaacaaataagatagtagaatgcagagatatgtgttctgaaacaaccccatgttaccatgtatgaaatgtttgtgcttaccttttctactttagattttaagtggtgacttccttcaatatattcaacatcgactttaattggagcagcatacctaaatttataactcaatatataatcaaaataccccaaaaaaatgcaaatctgaagaaaataataattgaacattagcaaatccacaactcaaacagatagggagtgaccatgtgaagtaataatttaaataagaaattagaagaaattgcataaaactccatgtcaaatagggaaatagaaaccaatttccaaacaaaaacacatttgatagcaaagtgaaattcagaattgagtattcaaataaatataataaagataaagatagctcacgtcatgtcagataatcgacatgtttggggttctagtttttcactaacaccatccaatgtaacagatggctcgccaattcgaatatctttaaacctacaccaaacaaagacaaaaagttataaacttcagcacccttgaggtgatattcgaacaatcaaataaaccaaagtttcaaaactgaatgagcattaacgaacatcagaaagagtatatgattatattgaatacttgaatgtaacagtaaacataacctgagataaatacttgggtcgacacttgacacaatacgatcattggcacgcacaatcttttttatttcagtattgatgaagtaattaaaggaatccaagtgttgtttaaccaaaccccttatctgcaaagccattaaacagcaaagatgaaaaggcaataacaactttaaaagttgttccaagtaaataaaattacttccagttagcataccttcaaaaattcaggaagtaattgaaacttgtccacagcagatttaattggagcagctagaaactgcttatcaatgggggaacttttgataggagaatcaggaattttaccaccattattagacctacatatcaattcaaactcataattttaataagtctaatcaaagcacatgtaaattaacctcaaaatctcaatgatatttacattaacaaaaaaaactactaaacatacatttcggtgaaagaggcttctacagttttattcaaaaacaaggtgaacttaaaagccctattccggaagtgagagaccactcggcaatcgcaggtggtgtgcggctaagggcagaatgcagagagttgtgaaactgaggtttttagagaggtttaacgaatgttcactgagaagtgaggccaaggttgcaatggccgggtcgggtagagttgctaagcatggggagaaaggctattgtggtttgtggaacacaatttaaatttatatggggatgtggacaaagtgtgttgatgaggagagtcggccgtgggggtaaaggagggtgacccgttaactctctcgttaaatttagaggaatttacatgaatgtggattttgaaaagttttttactatggtaggtttaagtttgactattttttattgtattttgttatttttggatttttgtatgacttagatccgctgtaaatgatctttcaaatcccatatttaaggtacacccaagcaatcgtctgagcaatgtacaccacgattgttggagctcaaaatctgccattgcaagcagtcgtcgacgccagccataccctaccaaccgtccaacaaacgaagatgattgagatggttcacactttgaattttgaaatgaagaaagttgaaagtaggtaggttttttcttcacacaattcagagttgtatcgatcatacattctctcctctaacaagtgtattaggtcgtttattttgttactgatatgagattttggtagttatgagattatttaggtcttgaaaaagtttggaatttttgagttggtttgatttgatttgtgattttgggatctttcattcatatgttctttcaaactctttgaatagttaggagtttaattagatttttatttacatagtaatacatataacttgaatgtttttagttaaaaacatgatattcactatttgattaattctcagctcattttcaatatgacccagagtaaattcatttatagaaaatttggtacaagaccagtacaaaggaaatacaaccaacgtctctttacagctgtaaacaatacaagaaaaatattctaacagaaatgattttctaatgattgcaatgataaggacaggtaacaaaaggtgaaacctcagcaatccagaaataacacgcaagtgataattcaacagtaaagagaaaaagaattggctgcaatcatgtgaagcagtagtagctacaatttggtgatggcataatgttgatacagcacattggcaaaagatgttattccttaacatctccccttaaacgaaagggtgagattctcacaccgagtttgtccataaggaaagcaaattgagaatatgatagacttttagtgaggcagtcaacatcttggtcatgcgaggggatgtatctaacttccaattgtttctgtagaactttatctcggtcaaagtgtatgtcaattttagtgtgttttgttctggcatggaagattggatttgaagccagcgcacttgcactcatgttatcgcaccatgtaattgagtgtgatacaagtggaaattcaagctctttaagtaatgattctatccaggagatttcgactgcaagctaaggcacaatactcctactcgatacttgaccttgatacaactggctgcttcttggaagaccacgagaccaaagtatccccaaaatagacacagtatcctgctactgaacgtctatcatcagggcaacatgcccaatcaacatcgaaaaatccattgatggttagtttgtcactgcagcttatatgcagccctttgtgttttgttccttgcaggtatgttaaaattcttttggctccactctaatgcacagtggtaggtgattgaaggaattgacttagtttattggtggcatacggaatatcaggtcttgtatgacttagatattgcaatgcaccaatgatgctcatgtacaaagttgcattttgcattggacatcagcttttgacattggttttcagcagtcattggagtaggacaaggcttcatgtttcccatgttaactctcttcagtacatcctcaatatacttagtttgagttaggtagaatcctgagacatctttaaagacttcaatatcgagaaagtaatgtaatggacccaagtctttaagtgtgaactgtttgttcaattcagcaatgaaggtcttcattttgtcactgtcattactagtaacaattatgtcatcgacataaatcaatgctagtattatggtttttccagacctgtagaaaaatagagaagtgtccaatttggaatttttaaaaccccattgttgtagccttgctcttagtttttcaaaccaggctctaggtgcttgtctcaatccatagagatatttgttgaatttgcacacaaaatgttcttttcctttctcttcaaagccttgtggttgcatcatgtatacattctcttcaagaactccatttaagaaggcattgtttatgtctagctgcctcacttcccatcatcttgaagctgctatagttaacacaattcgaactgtggcagccttgattactggactaaaggttttaccatagtctatgtctggcctttggtgaaaacctttggccacaaggtaacacccatttgttactaaccagattgtagtgctttgaaggtgcatggtactagaacccatgttttgtttcttttttaaggcctggacttcgttgtccattgcatttgaccagccatggtgttgaagagcatcctccacactgttgggttgtggaattatattttaccaggaacttagatctactcacaagtatgttgatttaacaacctaaatatgaacttctaaaacgataaacaaaaca

SEQ ID NO: 378254 - DNA, 2213 bp, Cannabis indica
ttattcaacatataatagataatttattgatgtggtcagattaatatacacaatcataaatttattcttaaaatattatctatgcaattatttttcacctacactatcgaattagaaaattatttgcaaataacaaatttgttattattttcatagttcaaggacattttttttatttaaaatcaagtgtcataatttaggagataaaaatcctatttattttattaaaaaacatcatataaaatactaccatcttaatttgagtattttggtacaccactttctatgttggccgagatttttgacaattaatttttatatgattaaagatgataaaatgcatttagagagagaaatttttacgtgattcaagcattaataattcttaatccacgagtcactatgttgggaattacaacaatggtggattgtttagagaatttggcagcacttttacttaataccaaaatcaaataatgcccttatttgtagggaaataggaatgggccttgttagtagaaggccttttgtcgaaggttaccctaacagtgactcctttttagtatttttgtctagctaagaagtgttttccttatgttacaccttcggtttaggcccaaatcaagtggtaggtatgtgtggataagacttgtccactgatgatgtgacaggcgagggcatgagctgcctatggatgcaaggggaaggtacatgctaggaaaggtaatgagagaatcccaattcttattcgctttataaaaaattcattttgtcattggtataaaaaggacatactaaaatgtttttcccaatttaggcgctgataaaaaataggagaccacccttattgagagatagactcgttgtctctatagaacctaataggaccctccaagatcatgaggggttcccatcccaaaaggagttgtttgttggtttttatggtccaaatcaaagcaaaaagcagaagcgctatatatttatatagtaaaatttgtttttcataacctgaaccataagccccaggaacacaatgtatttaaaaatattaaatctacactacgagttaaagaacattatacctttttatgaactatcaatgtatcattgattcttttcgtataccaatcaaacattcaatcctcatgacaataatgatggtgacagatctcacaccaagatcttctaaaccagtctcaacactctaggatgagtgtggggacataggaaaattaggattgagtattttttatcattgtgtgtactcaactcatgagacattgtgataatgtgagagaaaggaagtgaaactagagtgagagatatgagaggggagactatattagggtttttctctagtgaaaaataatgattaatcattttaggttaaacttataatgatatatttataaccttattgtctctgcatcctaaaacaacaacaacaatttaaaagagacctaccaaagttcacgcctgggcgttgcctaaccgagtggaagagcctgctccaaacatccgttctaaggtctctctgtaaagatcatggatacctctcacactcagtttaacgcagattttcgttaacgattatgagcctattttcgtaatagatttggcacagaaactataagagatctaagaaaaaaataatagaaatagaaataacactaggtttttatgtggttttgctgttaactctacatagtccacgagtcaatcttattcatatttttctgatacaaaactagggttctttcacaaacattgtatttttttttctgtcacggattttccgtcccctttttttgtataatctgcccctatttatagtaatataggttggtagttaattacatttaatttcaaatcccataacaatattccccgaaattgtgggcttgaattatgctccacgtaaataaataaagttattatttgaaaatcacacaactgtgatttaaaccgtgttgaaggaagtcaacgctgacgtggattaggacacgttataaagtatattcgtaactcgatgttgataggctgcattagtaatttgcgactcagcacgtttctcttccattagatccaaggacaatttcaagagttcttgcttttcttcttgattataaaagtcttgtctgtgggtcgcaatattgacttctactggcagcattgcttccgagccaaattctagcaagaatggagtatgccct

SEQ ID NO: 378255 - DNA, 2550 bp, Cannabis indica
aaaaaaccgaccaaaccgagcgatgctcagccctagcccactctcctgagctagtcaggaggtctgccaccttcctcaggccacactcagggtgaccattagatttagggtataaggatttaccatgggtgaccctcaaatcctcccaaatattggtatcccttccatcagagatcactttacaagctccttctcttaggaggtcactagctttgaccacatttttttaaaaccaagaatctgagttcttgtatttacaattaagaaactcctttctttagaggtacttggctctcaaaatattacagcaaagagacttactttcacataaaagattccactcccacttagctaggaaggtaagattcatctccttagttttacataaaccaagaccacctctggacttaggaagacaaatcttatcccaagctttcaattagatttctcggttccctttcttaaatccccaccaaaaatcacgaaccaagccatcaatccttggaacaaatctattagagggcttggtggtttgcatcacatacataggcatggacaatgccacaaacttaatcagagtagcacaccccactttagagagggttttagccttccaatcctgcaattttgaggtaagtttctcaacaacaaagttaaaatcaacatccttctgtctagagcgaaataaaaaaagccctagatatttaacatttccttccgaccctccaattcccaaggcatctcgaatccttgttttacatacatatgggtatttctattgaaaaatataaaagatttaagtttattaacttgttgccctggccaagaacaaaacttttcaatgcaatcccagtagccttttgcttcaaccagagaggttttacccaccaagattaggtcatcagcaaagaatatgtgggagagagtggggccgccccgacagagtttaatactccttatattcccattgcccatggctctatcaaaaagtctccgcataatctcaaccgcccaaataaaaaggtaaggtgaaaaaagatctcactgatgtagaccacaagtcagagtaatgttcccaacttgaccaccattaaaacacacattcaaagacgtaattgtaatacgttagaaaacccatttacagaacacctctaacaccccatagcgacagtgaacatggtcaataaacttgacatcatagttatagtgattcacctcctcaattttccaagctatctttatttaataacttcctattcccttcattttaattcttcccgcagcaaaattgctcactctcaatctcatttcatccatgtgctttcaggtcagtattaactaatttaatttgaccattaagatctccattcttttttttttccgaatgaataacacttcaaaaaatacaatatagaatatgacatgcaacaagttaaagattgttctaaaatagagttagagatgaatgagaatgggtgtaatttgttcaattcagtgttgaaatgataagagcattgtttttaggtgccactaatgtactttagcatttattcaaaatagcttcactttcacattcactaagtatcacaacattactatacaatgcaatgtttcactaaaactccatatttattcatgatccttaacaatattaccaccatggagcaacaacctaggaagatgtaaaacaatattaaatttgaccttaaaattcaaagacaatgacaaggtttggaattggatgagtaagaaagagttgtatgtacttctttcatattttggattttgggctgtaaccaggtacttaaaggaagtgccaagaagataacccttgatctcatcattaaaattttgcttggcattaacatatactaatacattcattaaatattattggtaacatgaatacctaatcataaacaagaatgtaggtttcaatacttcatttttcgactaccatcaatcaaccaacatttgagtgcctcaacaaagaaaagtaactgaaactttacagcaacataattgaattcactgcctcccgagccgccacgcgactaggaagtttattaaaatagggatggaaaacaattttccaataattttagatgatttttcaccttaacataattcaaccatagcatcaaagacattcagttgaaaaaggttttacttattcatatagattcacacaaatatcactacatttttctaagttatatctcacaagtaaaaaactgaacttgaaatagcttataataaacaaacacacccacacacaagctttccatacaattaaacacaaaactgatgaagtttaccaatttctctatatgaatatttgcctaaatttctctatatgatagtcagttaggttattaacgatttgaataatcaattgcatataaggactcaataagcataattcaaatgatataaaaaaccaatcttcaaaaacagtaaacataagcatttagcaaaattaagtagtcatcaaacaataagaactctcaaaataaaatccatttttttaattaaattcaaaaaaaaaaa

SEQ ID NO: 378256 - DNA, 1146 bp, Cannabis indica
gagagagagagagagagaatacataagaaagaaactagggaaagctaacgtcagtatcactctaccaaacttatttacatttactacccaataagattaaaaatgttagcaactatctacagtcttataagtaccagttgcaaaagcatcagttgggcagtacatacatgccatgcccatcaatcttaaatcaaactgacacagcactttatccagtatatatctactttattttttttcaaatgagaaacaaaaaatggtaatgaagatcccaaaagcgacacctaatagggataagatatccccaagagagaaacattgagaacataattactgaataaactccactccataattaaatccaaacacaaaatattatcctttattgtcggacctgatttttactgtgcctgtgccatatgctatgtgctaagatatttagattcgaaaatgcttggctaaaggacccaatgtgctttcaaattgagacagttggatgtttgtaaagattttgatgtgcagagcagctgacttaccttagcaatcctttggaaatttgggggaaataaatcacaggcaatttcaaacagacaataaatctttgtaaacaagttattaaacatttgagaggtagaagtgatgaagaggcttgccaaagaataagaagctgttactgaaccaaagagagacatttcggggactgatatcacaacaacagctgtggcttaaagaaggaaatcagaatagcaaatattttcatcgttcggctagttgtagaaggcagaatgattagattcaaaaattaagaaataatgatgggagtttgttgattcagagggatgctatgtcccgagtattttcgagacaagcagctggtggcaagttgcttgagctgcttggactttatttcccgggatgttgcacttgcttgtagcacgctgattgcgagcgatcgaggaagcgtcggggcacaagcaatatgaatatggagcaggttagcaagctgctggttttggtcatggtgatgtcactccaagtgggcaagatgcaaaccccaaattgatgggacactccccatacgcccaaaggagctgcattaatgccttggaggatgtaaagaatagtgaatcgaattgtgtattgtat

SEQ ID NO: 378257 - DNA, 1572 bp, Cannabis indica
gagaatggaccccactaggacaataattatatcaatacatatacatctgatgatctgctgaggctgccatgattggttgattaagaggaagagagttccaagggttgatcatcatcatcatcatcatctgagaatcttgatcatcaaatatctgattattatgatgatgatgatgatgatcaaaagggtatggtgatgtagtagtttcagttgttgttgttgttgatgagtttatacagtcgattatttcgttgagtgactgtaatctgtgagtgagttcacccatttgagctctgagaacagagttctctgcctcaagatttaggtacatctggttggtgatgttaaggctgtttatgatttgactgttgtctttctttagctcacccacctgtgacactaactcatccatgtgttgctgtttacgcatccttgacctacgtgccgattctctattggacagcattctcttcctctttctctgatccactactttcacatccacccgacccgcttcttgatccgaataacccgatgaagacccggttgcagtactcgatgaacccgccataataaaataaaattaaaaagctagtttttttttttgggaaaataaaaattaaaaaaagagcaattaataataattaataacaataattataatttaaaaaagggttgaattagttcatgagaaaacgtagaaccagtaaaggaaaacaacagagaaagattgaacaagatgggttctacggcggagactggagcttatcatatacccagaaaggagaacttcactgagtaccggagacatcttcagaggtacttcttttggttattattaacatcgatctatatgtattattattaatagatctcttcaatttgatctcgatctccggctctgggattaagagggagatttttgtgaagagaaagtagaagaagaagaattaagagggtgaataagggttatagggagggagataaggtgggaaagagaagggtttttggaatggtgtagaagttggattatatagaacaaggaatacccacttgctcccaataaagtcaataaaaataataatgaaactaaaattaaataattataataataataatgttgtagtgtcgcttccttagctagagtagccatgcattttatttaatattttttttaagggagagtactaattataatttttttattaatttttatgctcaacattatatgtggaaatattatttaattttttttgcagctgtattcttaatagtaatatcattttctttataaatatttgaaaattttaaaaagtttacaatatattccgcatgtattttttagtacggagatttactaataaattataatggaaatgttatattattttataatataataagtgtagattaaaatgtagtaatatatattattatgtgaataatatgtattaggtgtttggtaaataaattgtgtaacatataatttatttatcctaaaattgtaacttaaactttataacatggagaagagttacaaagttaattgcttttgtaacttcttttggttga

SEQ ID NO: 378258 - DNA, 4203 bp, Cannabis indica
ctaatatttcaaaaggcccaaaagtcctaccaaactaacttattggccttttatttttttcaaaggcatttactttgctctgaatttagaacccttgttgacccttcagtacacaaatcaaaacaggacttcttgtaagtcttgttctgttcatagaaacaggttcatggaatgctatgctagtattattacatccgaaaatagtccatatacagcttatcctactaaaaaagaaacagcataaaaggcaaacgactatgatatctattatttaagcagttgttgcataatgatacatatactaaactctaatgagaagagaacaaaatccaaagctggctagtagtttggcttctctaacatcatcttagtaacattattattcaattggccgtggctattttcaccttctttaacaacacttatggaagtgagttggcaaggctcggcctcttccaacatatgaacaaccgttctcatggagggccttagagctggcacctgtgatgtacaatgcactgcaattttcaacactttaagggcatcttctttcagagactctgatatggttgaatccaccaagtcaatcacattctcttggctcttgaatttgctataaacccaataaactatgtccttattctccccaaactctgactccactggcctttttccagtcactaactccattaacaccactccaaaactatacacatcactcttctcattaattttgtatgtgtatgcatactctgaaaaccaccaaaacaaaaagaagaaaccaacttatcaatgacatagcatatttccacaactatatagaataattagtaaaaaagaaaaatcaccaattcaatgaaaaaataaccttaatatttacctggagctatgtagccaagtgtgccagcaatgacatgagtccaatctccaccagcctgaacaatcttagccaatccaaaatcagcaattctaggcttccaattctgatccaacagaatattactgctcttaacatctctatgaattactggcctctgacaaccatggtggagatactccaaccctttggctgctccgaccgccacctcgtaccgaacctcccaacccatctccatcttctgacatctgtgcagtcggtcccacaagctcccatttggtaaatactcgtacaccagcaagttgctgtcctcgctgctgatgctacagtacagcttcacaacgttcacgtgcctcactgagctcaacgccgccacctcggcgtcgtactccggtgaacgggacttactcttcttcaacatcgcagccgtgctccggtaactcctccgttcgttgggatccgacgtggcagcccatatgtgtttcactgcgagttctttcccatcgcttaaagaaactttgtacaccgtccctgaccctccttttccgatcagattctccggctttactgaatcgatgatttctttctctgtgaagctcaaaacttggtacgacttcatgttccatgagttctgctttaatgggtgcgaaagagttttttgattctttcttagcttgaggattaagaaacaagctagcgacatgagcagaattagtactacggcgattaaacatgtcattaatgtacggaaatgaccggaattcgtgtgtttcgacgaacaatgatcgaaacacaaacctgggtttccgttgaaactatctttaaaggctccgtgggagagggaatctggtatttgaccggtcaacttgttgtttgacaggtcaagaaggctgagcttaagcgaagacagagtatttgggatttcgccggagagttgattctccgagaggtttaaggagtttagattaggtaaaaagccaatactatctgggattttcccggaaagtgaattctcggcaaggtttatttgagagatgaaacgacaggaccctaatgattcgggaattgaaccagaaaaattgttgttgtctaaataaagattgctcaacttactcaattttccaattgatactgggattttcccggagaactgattccaactcagctgaatcgctaccaaggaagaaagttgagagatttcatcgggtaattcacctgaaaatcgattattcgccaaaactaactgccccaaagactttgcctgagctatactcgatcccacagagccttcaaactgattcatggaaaggtcaactctgacaaggttgggcaaactccatataccatccggaataattcccgaaagtgagttgttattcacgagcaatcgattcaaagacttgcaattcccgtagctttcaggaatcccacctgtgagtttgttctgcaaaacaagaagatcgaacataaacccatttttgcacatgtcaggtggaatcggacccgtcagaaaattctccgagacgtcgatgaagtccattcctgaccaagacccaatcttttgaggaatcattcccgtcaacttgtttctgtataagtgacagtccataaagcttcctcaactccccaaactcttccggaatagttccctcgaattggttttcgaagagttgaagtgactgaagctttgtcaaagatcttagctcagaaagatcaccttcgagcatgttcgttgaagcatcaaaattcacaagattagtaaggtttccaaaacctttcggtagcttcccactcaatgagttgttgtaaagctcgagttgatataaattttgaagctttgaaatactagctggaatttcaccactgattctattatcagaaagctcgagattttggagcagagtaaggttgccaatatcttcaggaaacttaccataaaggcttgaatttgagagatataaaaagtagagtttttcaagctttagaatctctgaagggaaaggagttgaatcaaatgggttatcaccaatgctcaaaaaacttagattggtaagattttcaagtgacttccatggaaatagccccgaaaacccactaagattcaaattcaagtaggttaggtcttttaaacttgacaagtcaggaactttaccagaaaacgaattcacacccaagtccaagtacttcaaacgagtacagttcttcaaatcatcgctgacgattccgtgcagagagttcgagccaagagaaatcctttccaaagattgaagcgaacatattgagtcgaatggaagaaccccagaaatgtttgtagcagagagattaatttcagagacgagtccgttcgagttgcaccgaattccagtgaagctgcaggttgaattcgcatcttcaatccaagaactgaaaagggtagtgtttgatttttcgaatacggatttgaatttcaagagtggctgaagctcgttatagtcagctccttgagttggagaaactaatagcgaaagatagaacagagtcatcatcaccatcaaaggtgacctctggagccatggctggcaacccagttgggctaaagacatgtctaagactgagctcttgagcccaagttttggaagaagaagaagaaggagaagagtagtggttttgatatggcggctataaatttgagttcacattttggttttgaattttctcgagttgaggagaaacaggggaagaaaattgagccacgcaaggttgttgagctcaatacaattattatgcaaatatgcatggtcgtggtgcctatattttgctttgctttttcttttttcctctataataattgtaaaataatggcaattatttaaataataagattcttttgattaaaaaaaaaccatttctgtcaagtgtttgggatgaattatatgaattattattgcctatatcgttttcattgatgttatttttacagcagttttcaatggtattatttaatacatattatactatgaagaaagccagttaagctaattcctaaaatataatactagttagtaaaaacaaacttatacaaaatgttcaagtacaaacaaccggtacaacaatatttgaccacctcaacaagattgcgtatgtagtgaactagctaaatattagacacatatctagctaatttatgattagtgacgggagtaagttatgattatgcaattatattaatgtttccataattatgctaataaatatttgaatttttcacaaataatatatacaacactttttaatagatattattgattattaaataaatttaactatagattaaatcattaaatttt

SEQ ID NO: 378259 - DNA, 1628 bp, Cannabis indica
tttttttttttaataaaaaatccacttctcatctatgaatttgtccactgacatttcaaaattgtcaattatacagtctagactcattctttctgagaaactgcatccttttagtcttgatctttcctagttatgtcttcatcagtagtattatgttagagcatgtttaaaaagatggtatattgctatatttagcacacttttaaaaaattactattccaatattgttccaaaaactatgttaaaatttagaaatttttataacacttattgaattttctaattttgtattgtggggtgaatttttttttaaaaaatactgtgagttttatattatgtattgtgttaaatttttattattgttctacgattattttttagttgttctactgttgtttttaattgttctattttgttgttttacagttattttaagttattttataggaagataatatttttgtaaaacggtattaaaattgtaaatttttacctaaaatttagtatttttataaaaattcctaaattttactcatgctaaaagttgtattaaatttgacacaaaatttactattgtaacaaatttagcccacaatccatattaattttttatttattataatatcactaaatattataatttattaacttttaaaaaactttacatttttattttcaatattaccattagttaaacaataaaaaaatataaaaatatatttttatacattctcaattaaatattaaatgaccaatataattaatttttttttttattttaggccttgtgcattaaagtataattgtagataatgagttaaatataacataaatttatttttttttgctaaatataatacaatttttatatctcttataggagatagttttgtgtatctttgcctattttctttctttaaatttttgaattattaaattatgataaaaatttctcagaccaataaagattggagaaatatggtgaaatgagataagtagatgtaggttcctctaacttccctcaacctcaacaaatgcgagtgcttgaatggaatgagttggcatgaggagaagaaggtgaatcatctttattgtgaccactgaccaggcccaactcccacaactgtcttcattcaattcaattccaccaagttattgaaaacataatcaattaaattgtacccataatctcaactaacctttagtggagatgctttaaaggatatttgatgatataaatatctttttaatatttttcaattaataaaatatttattattagagtaaaaaaaatgctacaaaacacgtattatagtattttttatatcttttcttttattataattaaagaaaaattattcgtttaatatatatataaaataataataataatataatattatttttgtacttttagagatatttgctattgaaatactttagaataaaaagtattaaaaataagaaataaaataaaataatatattattaagtgatctgaaattttttgacattcttaaagaaagacaccattagagatgctttcataagggaaatttgatttttttatgcttacatttggttaaattttttttttaaacaaaataataactaatatttgtaggata

SEQ ID NO: 378260 - DNA, 2603 bp, Cannabis indica
aaatcagatatgaatagtcataaaaatattggatgtagttcaataaacactcctaccagaaagtttcaaaagctatcaccctagaaaaatcacttttagctccaagatccaagagagatagtgagaaaataaagctctcatggtgaggagagagtacatgtaaaagagagaaacaaagagttagattgtgagaaagaaaaatgtaaaacatttattttgaaagaaatagaggaaagagagtcaactttgtgtaatcgcgattgttgattagtggaaactcaagtttaatctttgagacagtttgatgaagatgtagttctggatttagggtgaacttcgaaattattttaggtgttttgtcttaatttcttactttgttttttgaatttgtgctttgctctttcatgtatgcttgattgtgtgtgtatttgtatagtttcgagcaagttctacttgacaagaatattttctgtgaatgtggatacgacacaagttatgtggtcgttttgtgtctaaacttgacttagaacaaggaaaggtcaataatgaccttggtaatacactataataatgagatttttgttggtgtagggataaggctgtaaattcctacacaataatgttatatttttaacatgttagacggtagtatagtgataaaacattgcatttaattttaagatatattctaaagaaaaaaactaaatatataattgtaacattttgagaagtacgtaaattgtataaaaaaaattgggtattgtataaacatataatatttaaaaatatgaatacatgtatctactaaaaaattagaagtattaaagttgattattatgatcaaatttcattttgcattgtttagtaaaatgatgaaatagagtacttgtcgaccaaggtaataaaattatttgtaaccctttagacactttaactaaagttttaatataataagaaaagattataatatgttataaggctccatataatggaggctgattctttgaactaagttttaaagaaataaaaacttatgagagtgttacatataattattgtaaattaatctttttgacactcgtggagagaaaaatttaaggacactaaacctaataatattgttaattttaattagtcatatgattagtcaaaaaatcattatagtgttttgtgaatagacaacattgatggaggttttggggtccatatgtttgtagaaatgcttcaaagaacacaaaaaagcatcccacctcacttctttcaatctttttgttatgagattctctctttatatataatcttattctttgtcattgcttacacatatctcccaatttcacacacttatttctctctatttaaagttttcaaatggggtagggttgttttatatttatggtacttaaataaattattgggcgattttataacaaacctttcaaaaagagttggtatactgatgtatcacttatttgttttggtatttaagaaaaaaaaattagtttaatttttttataatcgtgtaaaatttttaaaaaaaaaaattagaaaaatttactatataaaaaatagtgtttaaacatattattttacatgcatataaaataaaagagtcacacgtgtaacagactgtttgaaccatgtttttgacatgttaaattttttttcaaatttctcaaaattttgcagagtgtcttaaataactacaaagtacacaaccataaaaaaaaatggactaaaaaattcttgcggatgccgaaacaaatatgcgtgcaccgatgcaccccttttaagagggtgcattgtagaattatcctaaattataactcaattgttcatatggtggcgtgtattatagttataacaattatcgaacctaacctatgttgggaaatcctaaattaacatagagtgttaaaaacagaattcaaaataattaattgcacgttataaaagagaggaagatgtgagtaactaattgttttgaatcttattttttgtactgtagattatttaaaattttttaaaataaatataatacatattataactacaatatacatcatcatataccaatattaagttttaaattattatttctctaaatgcactaaataaaaaatgaccccacataattttattttggctcccacttgaaaatttacacatatataaaactattttgtgtatgagggcaagcaacatccaattctttacttttggggccttgccattagagggagctaatgggttgttggcaacattcatacaaaagtatagttttgctttcttaacatgtgtttaattttctaattatattcttattaccaaaaataaaaatgttaattatatgtaaagtaagcaattttccttggttattaaatattaagttcaaagttaattattttgaaatcttattagattgatattataagttcaaagtgtttttcccaagtggatgagaataaaaattgggtgagtgtatcaacaaatttatgggttaatttcataaatgcacaaaaacaacaaaaaaaacaacaaaaatacggtttcacggaattttaaacatttttacgatttttttgattttatttacataaaat

SEQ ID NO: 378261 - DNA, 2633 bp, Cannabis indica
aatatataaagtaattccccaaatatttatttgctcaccatttgataaattaactttcatacttttatactgttctttactcaccagtagcttatttgaaacaaagtctaagcttaacaaaaaaaaaaaaaactgtaaattaaacagagaaccaaaagcagacacccaacttcaattgttgaataaagtcaatctctttaattcttcaaagaatgggatgagtttgttttaccagtttgatcacatgatcttgaattcaatcattttggtcatttatgtatttctttcatcccaaatagattgaaatcaaactactcaccccaattattgagcttagatatacagcagcaggcattggatgttgccgatttcaaagctttcatttcggttggcgaaacaagctcttgtcaccctccaatctccatattgagaaaagtcccttctttgacatacttacttagcctccattaatgtctcccaccctgaaaatactaatctccaaaccccatttcaaatcatatctgcaatgcaattaattcaatttatatatatatggagtctattttcttaaaagccaaacaacatcattttatgaaactacttagtgctacacacacattttgatatatgtaagaacatataaatacctacatatacatcataacaccagattttttcaaatttgatttgattatctgataaattatgtacttgttatatgtaatagtattggagcccattttctgagaagccaaacagatattcttatgcatgtaacataacactgtatatatttacatctgtatttttttaaaagaaccctatgtatgatgaaaagacaagagagagattagaacatatcgaagagcatgtccttaacaacaatcaaatagtgaaatgaatatcaatccaaatccaactaaattaagttttattgaactgaatgaatatgaaaaaacaatactaggaaatttactactgtgttattcttatatgagttatctacaaactaattagaagtaaatgatgcaaatcttttaagaatttagaggttaagcttgtagtgtatgaatttcacaccataattgactagttgtttctcttttgctctttgtttggaattttttaacaattcatggattttacaagaaaatataatagaccaaatatcgactagttcacaagaaaatgtgatatgaaaagaaatatctcattctaatacaaagtagtcaaattcgtcattagtaataaagtaaacacaatctcaaagaaagaactacaaacccttttgcgaaaaaaactaatagaagagtcgtacctatggaaaaaaatcgtcctcatcatcattagtaatcgataatatttctaaagaaggtgaaatccacatcaaggagtccttcaattccgacactctttcaggcttatcaatataagtaataactctgagatgcttccaattaagcaaaggagaacgacataatctcttaaacttctctggcaagatgagagccttcatgcaaaacgtataaacatatcaactaatataatgtaattacatactaaacaagtacaaagttgaaacaaagtcactaaatcaaatgaaaataatgaaagtatgtacctttgctgtgtaaacaattaggcttagagtattccaagaacaatctagattcaaaaggaagttcaacatattggtataccagtcggtgttatagctcattgtgtcatagttaatcggcggatcagaaagtgttattttcccatccaatgaattagatgactttatcgatatgttgcgattggcatttcctttataataaaagtaagctaattctggagccgattcaattgtaacagcattgaccatgtcataaaagtatttaaatttgaaacttttcaagtgttgaccagaaactttaagatggtccaaacatgaatcgtagtctctcacagtcaaatgttcgagaagaggaagattatgaataagagtttgtaatgttggctgatattctgcacagtgaaacacagtcaaatttctaattttcttgcaagaagagagattcacatcgtccatgttaagcccttgaagctttaaagattcaagatttatggcatcaacttgaatctttaattcatattcatcttctacaagtctaagtttcaagaacttaaggcttgaactctgtaatcgaaactgaacatcatgattagttttaaagaaaacataatcgcataaattcaattcctcaagagaagggctacccaacaaaaacttaactaccccatcttccttagaagtttttgaatgttgaacattttccatattaagagttttcaaagatggaaaactaaatgaataagaagtatccaactctactccaaacaaagtcaaagaagttaaatgaatcgccttgtcgaatagtattttaggtatgtagtagtagtgagaatccacatcaatccaaagacttatttccttaaccttattctcaactctcaactacaaaagctaaccattcatctagtagataagcatgaattcctcgaaagtaattatgcattgaaaacctaaagctcgttatgactgaatcgattgtaaaattcacacttttctaaggtgttccaaacaattg

SEQ ID NO: 378262 - DNA, 7020 bp, Cannabis indica
tataaaaaaaaaaaagtatagaaatctaatttaaaaaatatagtaaaagtgtacagagttgagcagcccatatttagaaaagcaggcccagccgggcctgtgtcatgcttcaatgggccggaccatttttgctaaatgggttagctctttttttaatgggccctataacaaacttcatatagttgttgaacaagctaaaattgtatcagagtaagctttcgacattgatcttgcttacatacccatacttactcagaatctttcgaatttatcactgatagtatagtaaaatactaaatatccaaaatggtgcaagaacattacaataatgtactctacaacctaaatataaaaattattattacatacatttacacattaatatttaacatttttgtaccattttaggattattttcttttatttggtgccagcagaaattgtttcttattttatattcataatgattcatgtagcaatggcaaatatagtgtaatgcaatataggaattaagatatggagaagagactttgtcaatggagataagaagggccacgcatggtcaatctagctgtagctgtatgagaagggagcaagtattcctagttaaggaggcattacttgatcaaaataaaaagttttgaccaaaataaaatcatatcatagattcaagaactttcgaacatcataaaagcatgatcagcactagttggagtttttgttgctccaagctgctgctgcgtacacaaaattcgtaatattttctttaaactatatttgatttaagcacaaattctacaagaatgtttgaataacaacaaaccatccaaccaagacaaattaataagttgtcagagccatcataataaactacaagaaactggcctgacctggcctgtcaatgttaagatttacctcatctggaaattacactattgttacatttgaagcaaaatctatgaaatttcaagtcattctaattcagaatattttaaaactattcacagccctctaaacatgtaaagatgtaagtagaaataactcttaattataaattaagaactccaaaaatttccgcataaattatgttagaacaaagataccacaactatcacaaagacactagccaacgttcttaaaaaattaaagatagatagatgatctatgaaaccataccagagataagcttttcagtcatctgcataatagaaccctcacaaaaacctaactagagtttaatttatgaatcaaagtccaagtatgagctcccgtaatccgcaaacttatatcaaggtataaagctgtataagctttgtgctgtcgagggactttcgatgacatgcaaatttatgtagtaatcatattgaattggaatcttgaaagctgctgtggaatggtggatataactggtccatatctctggcaagaaataacgttcattgttatcaaaaggttttcaaagaaaaatgatgtgcctagtaagtggaagggggagaaaaaaaataactcattcccactattttaacataataagactaatacctttaataataactaagacaagtggacaaataacaatcgtagaacggcacagtttgatatactatgacactatcatatagaggcacctaaagaaggctaaccatctaatggatgcctaacaattcataaaagctataaataaattttaattaataaacataactccaacaaattttgtcagctgaaaacctcctgtgagtgcctaacaatttactaaaaactattaagaagtttaaaattaataaacgtaatttccagcaattttctcagctgaaaagctcccgtaattctaagttacatgaatgcaggcagatgataataaattgcaagagtagattttcataaaaaaccatacctgaacattatcatacagttcaaataatggaacagcaagaagttttaagttctttggaactgcaaagtattctctctcagataagtgaacaagaaaaagcttcttacactcctacataatgaaaaattaaggacaataaatatcaattaaatcacaagagaaaaaatagggacaggggagacaaagaatgagacaacaacatggaatgtgtaaagtatcccataggtgatctttcaacagaacttaccttaggtttcgttatatgcggagggcagtatggatacattatggtctcgaagtttggcctccaccagatagccacacactcacctatctgcaacaagatgccaaagaaaaacaagtattgattaaattaatagcaaaacaaaacttcaggaccggacactcctaagatagagtgaatattctgtgtagatgagatgctgatttccaatagacaagcttatatgttgacagaaataacctcaaaaaaatcatcaggtaatgaattcaatttctacagcaaatgtacaatgcaaattgcaataccatttcctgttattgttcactgcttacctaaaacaagaattatcacctctcccactatccatatcactttgccatattttcagctactaagaacaaaacagacctaagagtaggaaattcagacggtgaattacctgccagtccggcacaagggtaggtgaatttgcaccgagcttactggtcagcttccttttcaagccctctatttctgcagaataaagaagccccaaaaacaaatagaagataagtaagagaatgaacctgcttccatctttgtttgaaaagtaaaaaatgccaaacattgtaataacaaaaagtaaggccaaccattctcgccaggcttcagtcgtccacccggaagtttgcaaaatgtgtttcctatttgcagcaaaagaatgtggggatgattgtgttcctgaacctgaaaggttgcagaacatggaacatgttgaaactgctgtaaacataactagtgtatcttaaaacaaaagtatcagtggtaaatagaggataatatggagaaaatggcatccaacattccggcattaagtattaccaaacatagttaaaaacgagaacccactgtgccatttttcctctatttattctttaatccaagttttgcatgtcttccacgacgaccacatagtgagcatagataagtatttccctataaaataattctatggccaaattccatattatgatttatacatttgtaaagcagaatgggcctctcccattaaataacagatgaaaagtgatacataattaagttcattatcaaagcatcgttgacaccctaacttgtagaagctaagttatagagtcttaacatcaatcaccacagtcaagcccctgcagtttagggctggattattggttctaacaacccacgcctaatcaataacataataagaccacacacgagatcatgaagaacaaagtaaatggcagaagagagaacaaattaaacacataccagtaaaatcgcttccacgctcgtcctcatcccttccttcatatagctacaaaaagagaaacgacgaaaaattagtatcgactttttcgcaatccccttcctacttcatcttctagggcttcaaataaaaacaagtccaattttcgtgaaacagaaacaaaggggaaagaaaaaagaaaaaaaaaatctagggtttagaaaattttcctggaaaataaaatgaaagagaataaagaaatatacttgactttcatgcgagcaaggcgatcagctacagaagtgtccttctccatttttggctctttggtcccgaaggtgtagctcgaaagtggataggtgttcactacgggagacgtcaccatcttagcgtctctctctttctggacttggatttgcgtttttaccagttcgaaggaactggggttgggactgggactgggagggaaggaggccaaaggaaaccgagtatgaaagattcaaaaccccccaaaggcaaaaaaaagagttcgagaatggggacagtttgcaatttaaataaatatgaggattttattgttaatgctattaaaaagaaagagcaagctttttagcaattaaattattaaacgctcactcttatttcacttgtacttgaactaagtttaaattttagtggtaaattcagatggctttattgatgattcatcttgagttggaacgcgcggggattgggaaacccgtctgcatttaggcatcttcgattgcttgtcaaacaacaatcgccccaaattttgtttcttatggaaacaaaacttgctccgaattctatttctcattttcagcaatctttaaactttgctcatggcttggaatcaccaagatcgggttttagtggtagtttgatgcttctttggcaacaagatatcgatgttactcttctgaattttggtaaaactttttttgattgctatgcttctgctgcaaatgaagtttcttttcactttacagccttctacggtgctccagaggctcaaaataaagctgcctcttggctctgtttgcaaagatttgctgatgtttctccttctgtaccttggttgattattggcgattttaatgagatattatccaataatgataagttggggggctgcctcagaaatgatagacagatggaagcttttcgaaagacccttgatcattgtaagcttcatgaaacttctttcgaaggtgaccattttacttggatcaaaaatcgctctggagttaacacgatcaaagagcgcttagattggtgttttgtgaaccatctctgggacaatttttactctgctccttcagttcaacatctggattttttttgctcagaccaccgagcaatttctgctgtctttgctctagtatcttcacgacttcagcaagaaaaaagacgcagtcgttttcgctttgagaagttatggctctctgatactcaaagcaaggaaattatttcagcttgctggaacaactcctcaactaatgatccaattgcggctgtgcttaataacttggacgactgtgccactaagttacaaaaatggcacattgacaagtatggaaacatgaagcacaaaatctcagatgctcaggcacgggtggagaggctaaataatgtaacccaacgtactactgctgccatgacagatttgaaaaattgtgaagctttgcttgatgatctattggaacaagaggagatctattggcaacaacgttctcgggtagattggttaaactcaggagaccgtaacaccaagttttttcatgctaaagcctcggctagaaagaccaacaatacaataaaatttctgcaaaatgatgctggttgtcgtgtctcttctaaggctgaaatgtcctcggtaattcaagattattttgcctccattttcactgcttcagttattgatgaggatgctcttgctgatactttaaatgcaactcccacaaccataaccacggacatgaataatgaacttctcaagccttttgaagctgctgaaatacattcagctgtgcattctatggcaccagacacaagtcccgatatagatggtatgtctccgatgttttatcagcaaaattgggatattgttgggccgcttgttataagggttgtcttgagtgttttaaatgaaggggctgattctacatgtttcaataagacgctcatcactctcattcccaagattaaaaacagcggcttcaagactttcgcccaatcagcctttgtaatgttatatccaagattatcacgaaagtgcttgttaatcgcttaaagaatgtccttccttacgttatctccgatactcaaagtgctttcttgccaacccgattaatcactgatacatacttgttgcctttgagttggtccatgttatcaagaacaaaactatggggtggaatggaattgcaactttaaaattggacatgagcaaagtatttgatcgtgttgagtggagattcatagaggaagtcatgaataagatgggttttgcccgtgaatggatcttactcattatgaattgcttgcgtacgaatagcttctcttttctcttgaatggagaggtcacgggttctctacttccaacaagagggcttcggcaaggttgtccactttctccatatttgttcttaatttgttctgaaggcttatccagactgctccaacatgaggagataagtggtcacctaaatggtttcaagttgacacgccatgctccttctatctcccatttgtttttcgccgacgacagcctccttttttgtcaagcgaatgaatcctcttgccttgcacttaaaaggtccttggacacttatcacagagcttcggggcaagttctcaatccagataaatcagttatgtccttctcacccaacaccacgttagctgctcaagtttttttccatcgccaactgtccatgccaatttgtgagtgccatgaacgatacttgggttttccatcttactctgggcgggataaaaagcaaattttcagtgacattaaggaaaaaatctggcgactgatgcatacttggagcgaaaagattttttcagctggaggtcgtgaatttcttctcaaagcggttgtccaatccatccctacttatgctatgagctgctttcggcttcctgtttatttttgcaatcagcttgagtctgtgatggccaacttttggtggggtctaaatgaaaatggcagcaagattcattggcgctcttggaaacttttgtgtaaaaggaaggatagtggtggtatagggtttcggtccttcgttcattttaacgaagcaatgcttgctaagcaagcttggaggattctaaagcaaccggagtccttgtttgcaaaggttttgaagagtcgatatttcctaaacaactcctttcttgatgctagtcttggacactctccttccctcacttggcaaggcatccattagagtagagatttacttacagctggcctaagatggaaaataggagaaggatgcagaatcaattgtgcctcagatccttggattccagtgttggaatttattttaccaggatcttagatctactcacaagtatgttgtttaa

SEQ ID NO: 378263 - DNA, 2493 bp, Cannabis indica
ctgaggaacacaatgagaaactaggggaaactgatcttaaaggagcagatgaatctacctgatagttctcgcattgctggtcaagacaatttgtacccctcacaaaagaaggcctcttcaattttctattcttcgaaggaacttagcttttttagtttcaaaaatgtgtttcctcattgagggatagcgagagtcttttgcttctggaggaattacaaaagaagttggaactaaaggcaaagagattgtagtaatagaagaagaaacatcagtcattgaaggcattgtactcagcatattaataagattaggttgggcagaactgggtggaaagctaactgaaccttcttatttaacaaattagataacatcaccagaaatcaaaacaccttctttagtcaaaagttatgttgaactaataatagcacgaccttaagctttagaaagattttgctcgtgctcatcaatcttttcccaaaggagcacaatttgagcatcaagaatctttgcaaaaacataagggtaattttgaatttcgacacagtttacgtattctctgtagttcaaggacagctttataagggagctctgtcttttattggccatgattttaagagttaagatatctataacagaagtggaacaaagagtgtgtaagcatgcaaaaacttcttcagtcaaaatggcatcagtatggtatgatgaatcttttaggtgttgaaaaattcccagtattgtgagggtgcgcttacgatcttcagaaaactttccaataggccaatgaatcttgttggataagcggttcatgaaagtaaataaatcaaggtcaataaatcttagaagccagttgccaccaattacaaagataaaggcatcccatcctttatttgaggatggtaaacttataactatgtaattagggatttttaaagatatatactaggctacaaatcgagacgtacatgtagttctactaaaacaggtaaggaatttagaattaagaaatttcgtacccttaaaagcacatagagctgatatgcccaaaacagtctaaacaaaattggggagaaactagatcatagaaaccctagtaagaaaaagaatgtaagccaacaaagggggaatgggaaacataggagctccatatgttttcgactgaccaaaattttatcgtttgatatctcgagatcatccagactcttgggtagctcagtctgtattagcatgcaaaaagtgactctgtcatgaactagatacttagagtggatttcattgtaagttgattcctatttaggaagaaattttgggtcgattaagggagaagctttctcagtggttgatttggatttacacttagtacttcttgagcccatgattgcagaataaaaggaaggaagactagaggtaaaaaagtaaacagaggaagaagatgcgatcgtagaaaggagtaaagaaaggagaaaagggccaaagaaaaagaaacattatggaggttcctaaaaatagtaaaattattttggctaaatatctatggtttaaatttaaatttgaaaaattagggtaaattgaaaaggcatggaaaattttccaaaatttgaaatgaatatttcattaaattagttatggctcataatgacacgtgaaaataattttggataaccggttttacaatatctgagctaagacttcatagttgcaagcttaaaaattgtagagccaagggaaaatttaaaaaaatacaaataatcctgagggtgtaaacttaatttcaattttataataatagtataactaataaagtgacgtggcatgaataatataaaacactccgcttcattaaaaagaaaggtagaagagcggatcagagttcgagatagctaggaaagaagaacttactaagttgagcagaaaggaaagcgcacgaggagataagaaggacgaggccacgtgaatcaattagaaaagatgatgggaatagctcgacatccattcccgcatgtaaataggggaccccattatccaaaaaagagaacggattcttaaccacaccacacaagtcgacactctgccaaaatacatctctgaaacattcaccagctcaggaataggaatcaccgttaacttaggagaaatcatgtaaactagcaaaattgcaattttaagactagattgatcctgatgtaaggaattcaaagttaaaataaaaatttattgttgagctaatttttagatcaataaggccaacataatattggcatatcatactagtcaaatttaaaaaataacttaaaagtaagaaatgaagtacaaaaaattcttaagagtaatttacggcaataatacctaatgttaacgcagattttcgttaacgataataagcctatttttattataggatcaacacagaaattagtagaaatctaagaaagaataataaagtaaaaacgacaccaagtttttacgttgttttgcagttaactctgcatagtccac

SEQ ID NO: 378264 - DNA, 8960 bp, Cannabis indica
gaaatgttctaatgctgttaatgctgatttatctggtgatgcttcagaaaggtttagcatccgtgaagctaagaagttgcacttcctcggggagtaagtttgtttaacaatatctcagcgtctccctttgtacatatgcttgcatttctgtgtcttcttgctttccctcttgatgcctgatcctgatggttctctcaataaattcactattcacctttctatatctattcttgtgcatgtcagttttaccttgtacattagtaactcaggtttatgagcaagttgagagaagtatatgatagataggatgaattatgtttaatggtgtggcatgttccattaatcttgttttgggttacttgtggaaacagcgaacgtagggatgcaaataggaggcgacctggagatccaaactatgaccctaaaactctttttttacctcccatatttgtaaagagcttgtcagatggccaggtttgactttcctcctatgattgtaaaattttgaagtactttttcattttcttgccattcatctgtggcatgtgcttttcagagacaatggtgggaattcaagtcaaagcacatggacaaagttctgtttttcaaggtaagcattacatttcagttactagtgctagtagtgctggacaatatcttaaaactgattttccttgtttgcttaagcagatgggcaagttttatgaacttttcgaaatggatgctcacgtaggagcaaaagagctcggtttgcaatatatgaaggtaacctgtttgggtgcagtagtttgctgactacagtatgcataagaatctttttcttgctctgcgtatgcatgagaatcttaagtgtttagtttttcttttaaaagagaggggaagtaagccttgtttcaaacaccaagacaaagtgctggcatcattctggatcttttatttacttttttggttatttttttagctaatattgatttctacttttagggagaacaacctcactgtggatttccagagaagaacttttcagtgaatgttgagaaactggctacgaaggtgggcgctagatttcataatttactttaatgttttttgtgtttgggttcatgcactttgatgtttttgagagatctattttctattctgtggaagaaatttaaagtaaacatctgttacaaagcagggttatcgagttcttgtggtggagcaaacagaaacacctgatcagttggagcttcgtcgcagggagaaaggatctaaagataaggtttgtgaaaattatctttttacgcatcgtgacacatcctcctttttcctgtacttgttatttggaaggcctaacttgagcaaatcttcttttttatttatcatgtctcttattttttctgtaaaattttgccttttttcttaaaccttcaacatttgtagtaatagccatgtactctcccgtttctcatgtgtccattctgcaattatgttaaggttatgactattatttcctttgttttaggttgtgagacgtgaaatatgtggagtggttacaaaaggaacactaactgagggggagatgttgtcaaccaatcctgatgcttcttacataatggcattgactgaatctcagaatgtgggaacccaaaatgtggagcggaattttggggtttgtgtagttgatgttgctaccagtagggttattcttggacaggtgtgaatctgtttgtacaacttcaggatcaacaattctctacagtttttttcactgacatgatacatgtgtgtgtgtgtgtgtgcaagtgtgtcttggcatgtttttattaaaaaacttcattaattgctcatcatatcacatatgttatgctcgtgagtttctttgacttaagagtgcttacttttgtacagtttcacgacgattcagagtgcagtgcattgtcttgtctcttgtctgagctgaggcctgttgaaattgtacaacctgctaaacaacttagtctggaaactgagaaagtgctgctgagacatacaagatctcctctagtgaacaaactagttccgggcttggagttctgggatactgagaaaactattcatgaagtgaaaggcatctatgaacgagcttctgaccaatcagtttccagttcttcaagcagaaaagatttaaaggttaagaattcttctactgaggaagaattgtctcacctaccagatgttttagtagagctaataagagcgggtgagaatggaagctatgcactttcagctcttggtggaactcttttctatctgaaacaggcttttctggatgagacattgcttagatatgcgaaatttgagctgcttccctcgtctggtttttgtgatcttatatcaaaaccattcttggttcttgatgcagctgcactagagaaccttgagatttttgaaaacagtagaaatggagactcctttgggtaatcttgctctgtaccttttgttttataatttcatttaactttagtttcagctttactgagatgatgtgtactttctcaaggacactttatgcacaactgaaccattgtgtgactgcatttgggaagaggctactcaaaacatggcttgcaagacctctatataatgttgagtccataaaggagcgccagaaggctgtggcaagtttaagggtaaaagtagttattttttaaaagtcgtcactcctcatatttttgtctgcgattcctattttctttaaagcttttattttacattgctgttcatggctttggaaatatgctgacatgtagtttgctttccagggtgttaatctacctttatcatttgaatatcgaaaagcattatcaaggttgccggacatggagagactgctaccacgtgtgttctctattaggtaagctgggaagaaccagtgctgaaattcatatatttaatgtttattcttaaatagaattttaatgactaatgaatgatttaactgtttttaccaaatgcagtgaagctaatgggagaaatgctaataaagttaccctgtacgaggatgcagccaagaaacagcttcaagaatttatttcagctctatgtggttgtgaattaatggtccaggcttgttcttcgtttggcgccattttggaaaatgttgaatctaggcaacttcatcatttgctaagttctggtgtgtatttgatgtgtataaaatattgttctaaattatgatctagttaaccattttatcttttatgggttaataagtccattttctaaggagtccagttcattttctcctgaaattttctttttcatttatgttcaggaattcctcacattgatccagttcttactcatttcaaggatgcctttgattggatggaggctaatgattcaggtcgtatcattcctcatgaaggagttgatatagagtatgattctgcatgtaaaaaggttaaggagattgagtctagcttagccaaatacctcaaagaacagtgcaaattacttggagatacatcagtaagaaaattttgagcttggttttgatttcttagtagttagtagtgcacatacaaatgtaagggcatagcttatcaaatctgacctctggtgttctattacagattgcttatgtcacagttggaaaagatacatacctattagaagtgccagaaagtttgcgtggccgcgtaccccgagactatgagttgcgctcgtccaaaaaggttagtagagaaaagcctagtgatttgagtagattgtttgtcatacatggccaaccatacagcaatatgaaattataaaaacatttggccgtgttcattttgtaatttgttgtcctgtggagattgtaaatttacttaatttatcaggttgcttagatttgactttgaccatattttctcctgtactggcacatccagggattcttcaggtactggacaccaaacattaagaagtttcttggagagctagctcaagcagaaagcgagaaggagtcgtcactgaaaagcattttacaaagattaattggacgtttctgtgagcatcatactaagtggagacaactggtgtcaacaactgcaggttacatgctttctcctttcaccagaattttgctcttttatgtttaatatctgttaagagatgtcatagaggatcatctattttacttattgtattattacaagttcaaaagcattatctagtacttcaataaactcagatgaatttgacagtaacctctctcgtgaacaaccacttactcaaagtgactcctaatttgtttgaataatgttatgatgaaatttttgttcttttgcaagtaatggaatattagctttgtattttcacttttcatccgtttgcatgcctgaatgtgaatctcaaatgttgtagagctggatgttttgataagtcttgctattgcaagtgacttttatgaaggacctacttgtcagcctacaatactgagttcaagtacagatgaggtgccctgtttgtctgcaaaaagtttgggacatcctgtcctgagaagtgattccttaggcaagggttcgtttgtacccaatgatgttactattggaggttctggcaaccctagctttattcttctaactggcccaaatatgggtggaaagtcaactcttcttcgtcaagtttgcttaactgtaattttggcccaggcaagtaaatgttaagaaacacttgtgtgcccttttttgcagatgtttttccccagttgatgctttcttcttattatgaaaattgttaattctaaagaattattgttattttcctgatttcactttcttctacagttaggagctgatgtgcctgcagaaagatttgagctttctcctgtagatagaatctttgttcggatgggtgccaaagaccatattatggcagggcaaagtactttcttaacagagctctccgaaactgcaatgatgctggtgagaattattttcatttaggccgtgattagaacatgaatttttaagtaaatgtttgtgcttgagagattccaattctcttgttttaacaaaatgttagtgaaaagaattttaagggaagagggaggaatttaatgctattttagagggtctggaatcattaagataaaaatgttaaataaaagtttgtaaaaattagcattagaattttattcctccagcctttctctctaactttttcctcataaaaaacaaggttccaaacagaaagctgtgtcagaggaagatatattttttttttaattcactagctattccaacaccagtacttattctattatttgtatttaatgtattgagcagtcatcagcaactcataattcattggtggcactggatgaacttggaagagggacctcaacttcagatggacaagccattgcgtaggtgtcataatctgctgtatactatgttttagagcttgattaaatgtttaatttttttaattattacttctatgcagtggatcagttcttgaacattttgttcacaaggtgcagtgtagagggatgttttctactcactaccatcgattagccatagattatcagaaagatcccaaggttcttattcttttctaggattgcttgttacttttcgattggacttattattctcacatccttgatgtaatgttttttgaccttggtatttttaattcaatgcatgataatgattgtatgatcatagctgatgctgcaaaatgacagggactgatcaatattttctctgattctctttatattttcaataggttcagctctgccatatggcatgccaagttggaagcagtgttggagctatagaagaagtaacatttctctataggctgactcatggtgcttgtcctaaaagctatggagtcaatgttgcacgattagctggtaaggttttctcatttgttggttttgttattaacgatttagttggccaatccaatccacattgagtgccatcagttatcaactagtcagaagtaggggctccttgcccaatagtttccgtctttttctttagataatatgcgaagaagctagcattataggtaggagagtgaatttgttaaagatgcagtcttccatactaaaatcaaattcgtatatttaatctatttaatccattttatcaattttggagagtaacggtttgaattggatttgtcttttcctattattttgctacaggacttcccaactctgttcttcaaaatgcagcagttaggtctaccaactttgaggctgtatatggtaaacacagaaaaccagccaacaacttgtccgagcttagttcagccgagaaaatggtacaattggtccaaaagctgaacagtttcatctcaaatctaaagtttgaggagtctatggagaacattggagtcagcagcttcattgaacttcagagggaagcaagagtactctgtgagataaattcgatatagatatatatatcaaaagcttttgaccatttaatgaaaactcttagagcatcttaaagtttttacagttgcgggttagccaattttgctcttggattttagtgaggctcaattctagcttagaatgacactgcatgagagaatgttccattagagtgaggtaagtttcatttcattgtacataaaatataagaatggtcgttttatggccctgtatatttttctcctaagaaagaccctctattttttgtatatattattgaatgttaatgaagagatgtcgtgataaatttctattatgtggttgggtagatgtagaaataaataaaattatcgactaggtgaatatattaaaaacaaaaatagaaataaaagattaatcttatgtttttttttttttgtaaattgaaaaatgtaaagtaacttccaatagataaacaatgagaattcaagttacaattaggggtgtttaccacattgcaaaaaaggatttcatctgggaattgatcttagttagatcgaattgagttaatttgtgcctaatttataagaagatcggcgcatgaatattctaagccaggtcatagtttggttgagctgtgttgttcggctcatgttttttcaggttgtgttgaggggttgtacacagtgcagttagtagaaactaaataggtattagaaaaagaaagtgagattgtgagaggcaactataatatgtgtgcacgatcggtctgagactcaagtgtcatcaataatttaaccaacccttgaattttctcgcctctttacattacctcagcaacggtactaggaaaagaatgcaatcgttatttaggtgacaatatctttatacttattctctgtaaatttcctgtaaaatctcttatgaggtttaagtgtttcaaaaagatggcttgctctcataattacaggtcatcatctaatagctactcaccttaaacaccctaccaccaccaaactctgtactgttctttatggtgtgacaaatatagaaggcaccctcaaatttgtcttgatcatcataattctatggatcagaacttagatttatatgattatgatctcaaaagtcaatctaatgtcatttggattggaccaatcacaacaaggattatgatatagttttattccaactgaacgacgttatggaattagaaggaaccatgtttggtgtccatgctagattatgtgattgtcaatggagtcttgtacttaataggccatgaaaatagtagcagtagtagtaagattttatctttcaatttatgctgtgaaaaatctgatgatgagaatatgaacttgccaatactaccaattaagggtaacaattcatttcatctttctaaatgggaagactcatctcatcacttgctttaatttttgggtgaaaggagagagttattgtgatgattggaatatggtttccaaacaaaaactccatcttagaccttagaccttctcttattttagtcacatcacttaaatgtgacattggttgttgtttggaagaagggggtttcttttctcaagaaggctatcaaacaacattagagtgttatttgagagtttgttgagccgttgacctcatcctcaatcatcaaacactactttataaaaattgtaatcatcttcaatacactgcagagactttggttttagttctttttgtttttgggtccattacttttttatttaactattttagtttgatttcagtatatatatttctttattgaaataaaacatataaataagaccaacattttagtattgtagtctccatcccaataaaataaaacttatggtgaaaaaaaatataaaaatctgtctttgtttcaaagtgactcttaactttggttgttcttgttcatcttacacaccagaattgttgaatttatacacatttttcttttaaacaaataaaataaaaataataagtggttgggttgggtggtggtggatttggatgtttaccatttttccattagccaaataaagatttactacaatgcttgaaatcttctgaaagaattttgatttttgatttttgatttttaatctttaatctttacaccaagaataaaataaggcactgaaatgatgcccggattcacaaaataataatgattagaaaatctagtaaaaagctttgttttaaactaagtgttggtacaattcatcttcttcgtctccatcaaaggttgaggagtcaacattatcaaaatcctgcagattacagtgttgtaatgtcaaaatttgaagttaaaattaaattaaaacgttggataaaagtaattaaagaaataaagttgaacctgataatgtcttttgatgctattttgaactgctgtgattgttcgaactaatacaaacattggtagtacaatgccactagtccttaaaataattatctgccaaaaattcacaatagctagattaaacaacactattttatatattcatttaaatatttataaagaaaaatgcatttttttagggtaaataccatt

SEQ ID NO: 378265 - DNA, 5360 bp, Cannabis indica
taattcgccccaaaattctcaatgggattttttctggaatcccttttcatcgttagactactatggctatccaaatagagctagtctagatcagcagcatacaattgtggatgatgacataagaggactaaggcagctccgagaagaagaaggtattcccgacttagaagacgatgatattgaacaaaaagaacctgaacaaaatgcaaatgtgatagatgaaagaaccaaatctaatatgaatcgaaacatagaagatgaagtcattgttgaagatgttgatgagaatgaagaagatgatgatgatgaagaggaagaatctgagtgtgagtgtgattgtgattgtgagagtgaaattagagcacagaacccacaacatgggagaacaactaccatagaggtttcaaggtctcaaactgcaagacaagtagttgaaaccagtaatcaagaagtggctggtggtggtagagaacgtaaagatgagacaccgggttttactgtttatgtaaaccggaggcctacaagcatggcagaggtaatcaaggagctagaagatcagttcatggttgtttgcagtgcagctaatgaggtatcatcaatgttagaggctaacaaagctcagtactcatcatcctccaacgaactcacaggtttttgtttttcttttagctcactcaaacatggcataatatggtttttaagacatgattgagtttcaaataaccatagaatatatatcattaagtcttcttgtatgtatgttgtttatttatgaaagtgtttcccctttcagtgaagaaaattttaaacccagtagcactgattcggtcagcttcatctcggtcatcttcctcaagattcatagcgaattcttcaagctcctctagagaggaaactgaagagagcagtagcagtgatttctcagaggaatgcatgttttcagggagtcaccaatcaacattggacagactatatgcttgggaaaagaaactgttcgatgaagtcaaggtacaaacacttctaataaactaaacaaaatttagttgtgttcccaaaaccagtcaacagtgcattccttttaatcatttatttttatatttgttttagtctggagaaaaggttcgaatagcatatgagaagaaatgtaatcaattgagaaaccaagatgtgaaaggagatgatccttcttcagtggataaaacaagagcaattattagagatcttcatactcagattaaggtttcaatacactcggttgaagctatttccaaaaggattgaaactttgagagatgaagaattgcagcctcaacttctagaattggtaaaagggtatgtatgtttaaattttaataaataactttgaccaatatggtttttaaaatatatcatattaattccctctaggttatcaagaatgtggaaagtaatggctgagtgtcatcagtcacaaaagcggacattagacgaagccaaactcttgctagcaggaacaccatcaaaacttgattcgaggaagcactctttcatgtcggtttctgaccctcaaagggtagctcgttcagctgccaaccttgaatcagaacttaggaactggcaaggatgctttgagtcatggatcgcttctcagcgatcctacgtgcatgctctctcaggctggctccttaggtgtgtacgatcagaccctgacacctcgaagatccccttctcgccacgccgctcagctggagcccttcccatatttggactatgcatacaatggtcgaggtccatggacgcttccagggaagctcctgtactggatggccttgatttctttgctgctgggatgggatcactttacgctcagcagcaacaaagagaagattcctcacgacgtgtacatcttggctccaagagattttctgaggaaattatcacagggaacaatatggaggttgtggagatcggaggtggggaggtggaagatgtcatgactgcagagaaaatggctgaggttgccataagggtgctttgtgctgggatgtcagttgccatgagctcactaagtgagttttctaatggttctgccaaggcctatgctgagctcatcaaccaatgggagaccgcccagtggccacctcaaaatctacaaggcagggttggagtgtagtagtattttttggggggtgtaaaaaaatttaacttatttacagaaggtagtaggtgatgagtttttagccagcagcaccttttttatttaactaaagagggggtagtagcttagaatttttttcttctttttcttttcagggggtgggggcgttgttttttggctgatgataatgataatcggcaaatagaataggggattagaagacattgaaagtacaactgtatgatgttggaaaatgttgtaaacagaaaaagagaacaaattttcgtaattgtttcaatatgcaacttaactaacgagaacagagcaaaaatttaacctcgtttgttcagtcaaattgatcaaaatcagagaaagcaataggaatgaacattcaaacattctcgttgcctccctctaaaagtttcatattcctactcagcccaaagtacaatccgcaaagaagttctctgtatatcgtttttgcaataaatatctcttctaaaccaccaaaaaaaaagtaacttttatctattgtgcaaaaatttttgctccatgaggatttattctccaaaatcttcatttgggttacaaaaaattgaaagcacagacacaaataacattcatcaggtggtaaccttggatgaattaaagatatgaaggtattttaaatgttaaatgagctggtcagattgtagattgtctcagtcgtagccttcatcatcgtcatcaagatcaacttcaacatcatccggtcttcccataagtgtaaggaaaagtaaaactgcaaccagttgtgttgccaggaagtacttggctcttcttttaaaagtcttcttcctttgttttttccttttcggtttgcttttgggcttggaacctaaaatgaattagaacattatgaataaagataacaatcaccaccttacaaaaaaaaataatataaaaaaatgacaatcaccaaaatgaattatcaataggaaattattaggaacagctcctttccaacaaagtcactagctaaggcgttaaacatttaacaaattacaataaaacatggcaataaaggctataaaaattatcaattttcacatgcaacttgaaaaatactaacttcgatataaaacaaatgaacagtgccaaaggagataaaggaaataattaagtctcaaaaaatgttctagtaaataaaacagtctcatgaaatgtttttcctgaggaagtattctgatccagaagaatgtcatagttaatttttcacccaactacaccaattttgctaacttgaccaagaaaccaataactcagtctgattaagaaactcagtccatgagggaaaaagattaaggatgcccaaaaaattgtatcaatacagcaatttcagtaaattcccaaaatataagcaagatccagtttaaattagcatggaaatgtaaaattgtacaacacttaattaaagtaattgaaaaaagtacgtacaaatatggcaaggcagtcagccacatataaaagaataacggaactttgtaagcatatacagaatgttaaagcatcttactcttactaggaccttttttgggaattgatgatgatgagtcagctctaaaatgtgggacagaatatgaaggaccagtctcgacaaactcagtcttaaccctctcaacataccttacaagattaccatgttctaagagttttctccgcagtattgacatctcctgaaaaaacatagtattatagcacataagatttatgtagttaaaatcaatctatagcatactttcagtaaagaaactttgaaactttccaccaaacatgcttagataacgccaaagaaataacattacacatgattttggaatacttgtctatatgcaatagttaagctctacctatacgtgctaacaaaataatgcaaggataaaccttccaccacaagtataaaaaaaatagaaggggtcaattgcctcaatcagcaaacatgttagcctcatccccacaatatcactgtacattttaatttagtcaacacagacacaacagtgtttctcagagggtatctgaaacaagtctaacgatggaaacatttttgacaataaaccaatattaaactttatatagttaactaaattggctcacaggtaatgcttgaagaacaataagtgcctgtcccagaaagatggcatctaaacttgacggcctgcaaggaaagcatcaaaggtgagacagcattcttccccttttcttatctcattacattaaaagtaaaataaccaaatttattattaggaaaaaaaaacatatttctgaaatttccttttacattaaaggatacaagttggagcatattcagaacagacctgttttcaaagagaaagtcctgagctcccaacctagtcgacaaagcttcataagcaatgcctgctcttctgtagatctgttcatcaacaaaacatttatcacaacagaaattggcacacttgcttttgcaacaaaacacacacaaaaaaaaggggaaggaaaatatgagggtgtggtagattagcaaccaactaaaaaatataaacctcttctcctttttgctcggcattttcctttgtaatccccagttgctgcttaacgctatgtacttgtttcaaaaacaaaacatttccaattggccatggaagatcagaacaatatatcgtttcagcagaactactatcactccctacccacagttcatacgtgatagcatcggcaagccaggagctaagcattgctttagtagatatccattcaggaacagagtagagttcagtgtcgaggtcaataatgccgtctctttttaatctctcaatgactccacccttctcattattgtaggccacataatcaccagactcaatgtaaggaatttgatctgacaaaaggaattcaaacaatagtgattgttattagttatttttatttaaataacttccgttaggaaaaacttcatacttcgtacaaaaaaaaacactgaaaggcccagaaaaaccataaattaagtgtgaaatatccaccagtcccctccaattgagaactttgtctagagcataatgtgtacaaattaactcgggtttctctctttcgttttcattgtgataattcattgtattcttacaatttatgtaccatggttttcctccgccacaagtgaggttttaatattatagggggaccagccatatggcctcctctttttt

SEQ ID NO: 378266 - DNA, 2421 bp, Cannabis indica
ttttttttgttaatttttgcatatgtgtaaagaccactggagtctacaacccagatgctctaacaatgctcttccatacacccttgacccaaggcctttctaacacagaaaaccttttcagtacatcatcaagcaccgcttatgctagttgttgtgccggttcgacaaggcgagcataatagagattgatgttgttatggaacaaatagatgagtaccgaattgaaagatcacaacagctagtaaaattaaaatgcctcttcttttttaaaatgaataaaaaatattaaatctacaaaactcagcagataacacaagcattgggatcttcgtctacacttctgacataataatgctgaagtggaaccatttgagcattctgatgagcaatccataacttctgaaactcagccaaatcatctttctttggttcttgttttttaggctcttcttttttgggttcttctttctttttctctggtgctttaggtggtcccactgatagaatatcagcattacaatgctttctcaatttgcttaccaaacttactggatccacctcccctgttactgtcaatttcatgtctttagaatccatggagatagaatcaacccctgcaaaacaaatagttgaattctattagatcatcatcattttctatcacatgggtttcttttattttatcaaaaaaattgggataataacatacctgaattgccagaaactgtcttcataatcttcttcctggttctctcatcatgaaagttcactttcaacacaacttgctataacaaaacagtcccatattagtttgatggcaaaatataaatcataaaccaaataaaaaaaaaaataggaactgatgataatattagctaaccttcattatgagactatgtaagctttggtgagatctgagctcttgaagcttttaattttagaaacactcaacaaatttagctagtataatacttaaagagaggaatatatgatatatgggaagttatgaagggatattgatgctttggtaaatggaaagagaagtagacttgtttgtatttatagttagtgagtcaacgttgaggtcaatgagtatggtatagttttggtcaagaaagtcctctcaataagaccactagtttgtaacattcgcagaaagaaagagtaacactttctggaacaaacaagttttttcttgaaaaataaaaaagaaaatgtactttattttctaatttctgggaagccgccagaaactattatttgtgtggttttgccaatagaaaaaaaaaaagttgtaacacgagtttttacatggcaacatgaatacgacacaaattttacgtttaaaaactaagcataggttgaaaatgagttgttacgattgatacaagtaaaaatttatcgaacccaatatgactcgcttaacacgaacttgacatgtttagcatgattttttaaaataaaataaaaaattattaataataatataattatgtaaaaataatttaataattcagttaaaaagaaataaaaattattttgaaaattcaacttttattctataaaaaaattatctattctatataaagtgtgtctatataactcaattcttggtttatgagaaattcatgagtgtttttttatttttatttaataaaataataaaatatatataataaaataataataaaacaaatctcattaatatttgaactgatattttctttttataaaacacgagagcaaaaataaagtaataataaaacaaatcttattaatatttgaactgatattttctttttataaaacaggagggcaaaaataaagtaataataaaacaaattccattaatactgatattttctttttataaaacacgagggcaaagcttttcgtgctagagcgtcgaacttggagcgtgttcttgacttgagttgctgctcttaattcgacacttgcttcaatttggacatgggagatatttgcatctaaagtttttaattttaagttttaataaattttttatataaagtttagatttaataatttttgttagtaaaaaattttatctttttggatttttaatggaaggagtttgggtctaatattaggaggaaggagtcgactgaaaaggtcgactgaaaaaaagtaactggagaagaaagaaataaaaaaattatattatttgttttatttttaatattttttaaaataattaataatttataaccattcagaattgacacctacttacaaagtcaaatataacagacttaattattaaactttccattattttttcaattaattaattagttttaataaatcttaaactttccattattaattttagagaaaaaagacctactataattcattcatatatatatatatatatacatgggtgactattcaatggtt

SEQ ID NO: 378267 - DNA, 2387 bp, Cannabis indica
tcggtgtgagatgtaattttctcaaaatagaaaaaatggtaatttagcttgaaagtttgtaagggtcaaaagtgagctcttaaagggccaggatttaaaataagaccaaaacacaagatgatcgacaacaggcccataaatggttcgtgccaggcctgaccaaacccaactgataccgggaatcgtggcaactttcagatttacattacacatcaacatataattggtaaacaaaattgagtaaacgcactcaaattgataagatttaagttgagaggttgatgttgaaccgatctgactaagaatttatgatcgaaattggtcaaaaaagccatggaagatgtcttgtagtaaaacaaagcttgtaattaaatcccaacccaatcataaacacacacacaccagctcctccaagaaagtgatattttcagtcaataataatgtttattgggatttagttagtttagtattttagtccttcctaattatatacagagtagagtgttgtcattgggtaccactgacaccatttagaatgtcttactattggtaaataatattttttaaaaattattatttaagttatataaaacccatattcactccaatctaaacactaaaatttacatgcacacgtcaggaagaagaaggaagttgtgatttgtgaacaaacaaatatcaaccaatccaatcccattcctccctcttcaacttttcaacatatcctcatttctccacttactcatattatgtaaatatataatttaagttttttttttgcttatggttgagcggggagaccccacaatgattgtgttctcacagccaccacaagataccaactctctcatgcacacacaccctatatttatatgacacatattatgtaatataaatgtgtataaaacataattagttgaatatagttttaggctgcaattgaccatgaaaactttcgacctatatatatgatgttttataatgacaaattgccatattctaagacgttttaatttgacaaagcacataaagaacgtatcacttttgagtgtgtctggttttgtgtttgtctaagatgattagtctttaaaaacttttttataataaagtgatgataaatataagaaagactctcaattagtcaattcaaagaagattccaatagtgaatagaagttcccaaaataatattttttttttaactaaaaaagagcagatggatagtcaaaacaaattaatgtaggaagaaaccaagtccaaaatgaaaagtaaaggtgaatgaaacggtacggcaaattgggaaaatgtggtcctatctctcctttgtttaaaggcctcattggtcccatttttttaaccttcatatggacaaagtacacaaatttataatatgtaaggaaagttgagtttagctaggtgtttagaagacttagaattagaaaggaaaaaaggctataaggtagcatgccttgcttatttagtgcccacttgagttaagttgttggaaggtgggcttctcatagtttctcatgagtaactctatacatggttgcagttgcacctgcctatgaaccccttagccatttcttttgaaatttggaaataaaaatgactttaacagtctatttgtggtggtagtgctcatttttttaatgaaccctacaaccccttgactttggattttgtggaaactcaatcattgccttttgaggttttcaagtactctagcaacatgtaagaaaaaattaaaagaatccttatattctatccatctatatgtattaggaaggggagctatattttcaaaaggatttttttttgggtatatactaaaaaggtaaaaatattacacaattatattgggtcggtcctataagtttttatagagctcaacaacaaaaaaaaaattacaaaaatacctcttgctctaaccattcagctgcccgaaccaccttcttcaacaacaagagcttcgagtgatcaaactagcacaccaactgaaaagaaatctagttagacgtagaattaccataaattctggtaatttcacttgagaagaagaccgtaatcaatctaaccacatataatttcaaatttatgcaaaatcatgtagaaaaactagtttgaaacttaaattcaactatgaattacgatttaaatcgtagaaaactaattctcctttattttttagattcataaaatacagatatgtctgaaatagatttggagttcctcatcaatccaaatcaggtataaactgaaaaaaaaatgtatcaatatactagctgatgtttctctcgttgcattaacgttatttttcatgttttcaatggtggatttattcatatcaaatcacgaataacaaaaaaaaattgaatttatctagag

SEQ ID NO: 378268 - DNA, 2607 bp, Cannabis indica
aattttttttaaattttaagtatataaaatcaaatttctctatataaattatcatcatgattagttaaaatttgagcctgaaagtcaagtacaagttaaatgagacaatttgactgtagaaaatattttgatatgaaacaaatttgaaacttactacaaaatgaaaaaaaaaaaaaaaaagaaataataataattttctattatacacatatatattttgaaaaagaaacagtttcaattaagagtactattttgtctaatttggcatcattctttctcagtcgagggttagcttttaaacctctcttccactctactctctcactctctctgccattatacatatatatgtatatgtataatagaaaaatggcggctcttaacaaagtagttggctcaagacttggtttatcccactcttcccttcttcctcctgctcttctaatctgttgcagaggaattacttctaagctctttgttggaggtatcatttctctctaatctctatatattatatatctttatggacacatacataatatatcattaattttattttttaaataaacattttttgttattgtgatcagaaaatcgcgttgataaccttttatgttaagaattatcttcctgcaaatactaggaacaaaaccaacgactagttttggtgttcactcttattgataggttcagaaagagcacaaagtgtttgacgaaatgcctaatagcttattttagctcctagctgtgtgaatttcaaacctaaaattaaattaattgctgcagaatttgacgataactgatcatgggaactacttggttactttcgtctactgtagtctgtatccatgaatgctaatgttatatacaaaaaaattgaagtgattattggaccatttagaaagaaagcgagtctccacatggggttttgactaagttgtaaagcaatggtggacttgagattgggcataagttggagtgtgttttgcttggtaggcagggattaatggaaatattttggcagggtagttgtttagaaagaaagattttaggaggaataagcctataatcattttttctggttgagtatgaatacgatatgaggtggtttttctgatttctcacattcagttcttgtgtctgtcatttcttcccctgccaaattttaatcctctcacagttggatggtttctctcctgctcctcatgttgaacacaaaagcgaagaatcttcgcctcccactttcttttattaggttttgtaatgttggtgtcgttcataccaaacagccttagagtttgagcaatcaataagatagatcatctatcttttatgatacgtgttcatgtgatctaacaacttataagcttttcacaatatgttctgaagaatgcatttgtaaatatgttttcagggcttccgttttacactaatgagaagggattatcagaggcattctcccaacatggtcaagttattgaaggtgattagtatgctaaactgatgagccactctctacgtttatcatctgcctaacaattagtcttgtgttttcagctaaaattgtaatggacagggtatcggacaaatcaaaagggttcgggtttgtaactttcgcttcagaagatgaagcacaaaaagctctaacagagatgaatggaaaggtaattctctacggttttcagtgctccatatttttccccccccccccccctcttttgttagattataacaaccaaaaatgacaaaactgtaatttgcaggagctaaatggacgagttatctttgtggattatgcaaagcccaaagctgattttggtggagggatgccaatagcaaggggacctcctagacctgcaccttcaattggcaaagacgatatagagataatgtaagtttgaatattctcttccatcaaaaagattcaacaaaatctattaagtatgcacagaatctctcactaattttttgagacgaaatacgtccaacttttttatgtcattcatacatacctttcttttactggaagaataattttgttgactttgaattatgtttggtaaagtttatgtcagtggacgaaaacattgtgtgtagatagaactctataataactcctttatttgattcagtatctacttagtgtgacatgttttattgtgacataaatgtttataacgagcttgaaaaaccaatgaggcagcacttgagcaccattacaatttatttttgtagctttctctttaatgaccaccaatgagctggtgaagcagtctttgttgtaatatctataatatatattggaaaaatttctttggtgtaatatctatctataatatatattgggaaattttactgcagggatgtaatttttgtccctagacatttttatttttagcgactagagatattataattaaaattttaaaattttcttatatgactatgagacttgggttgatatctaacactcatagaatcactacaatttggaacattgcttttgaagttttagatttagctagtagttttctcagctgtaagtttatctataaataattgaaattcttatgagaaatttatgggtgactttttatttttatttaa

SEQ ID NO: 378269 - DNA, 3512 bp, Cannabis indica
aaaaaaaaaaaaaagtgaagaactgtgtaataagatttagaagtagaacacaacgaagctgacggcacaactttaatggcttctttgagattaccattgctctcctcacctctctctcatctttcaccatcaatcccattgctacacgtgtcatttgcccacctctccgttcacattccggcgcaccgtactcgtcgggtgcgacaaaacaagtctgagaaacgaagacctttgggtagagcagggaaggtgaggtcgcagcttaagtatccaattatagctccggatgaccattggggtacgtggaccgctctctttgcaactggtgcttttggtctctggtaagtgataatataataatggagtttttagtttatgtttggaaaatattggattaataaattaatttactgaaagaggaagattattgtttgacttattgggtgactctatttatgtttgttttgacttttcattacaaagcatattttatttcttcttaacatatcatagggtaatgatattgtatgtgtggaagcaaggtctgagaagactaagattggtagcatggtcagtgctgctcttgtgagcaccttggttggacttggagcaagtaatttaggcataattccttatgaggcacctgcatattcagttgtcatggagttccttttaccattaactattccattgctcttgtttagagcagatttgcgtaatgtcattcgctcaactgggacattgctcttagcttttttgcttgcatcaggtacttttacttcttttcttacacaaatcttcagagaatacgagttttacaatatttctcttcataaatttgaactttgacgttatgttatgcataagaaatttcttcaagagagtcatctgggaaactaacctcttaagttgaagcagcaaattataggccaacctcaattagatattgctgtttgattgtctgaaatgttgaagatggtgatataaattaatgtgctgatgtgtcatcactttgtgaggaggtctacatgtctttctttcagatttagtgaccaggtgctggtgttagtgtgtactggagcccaacctgattggctgcttttgtaataacaaattggatatcccatttgtcctataatcatgaaataaggattggtaaagctggtgctgaatagggtgtgcatgattatttactgagtgaggtaaaaaagaatgataaggtgtagctgtgttagaatttggggataagatgaatgatgttccatctcaaaaccaattggcaatgagagcggagtagcccattcatcttatatatcacaatttatttctacacattagccatgtggggacaaactctaataagctgagagagtagagagtgagagagaggactgccattgttttgctctttaactttctgtattgcctctgaccattgtaaggtctgtgttgtaattttctgtattcttttactgttttcttactggattgtatttggatattgttgctgctacactgatgattttattacttgtttgaatctggtttggtaagcataacagctaggctatagcagtgcgattctaaattaactttattctatttctatgacagttgcaactatagttggaaccttggtggcctttgcattggtccctatgcgatcacttggtgcagataattggaaaatagctgctgccctgatgggtagctatattggaggatgtgagtatcaacatttatcaatgcttctcataatctgtactacaattcttagctataatattaatgattgataaaaaacttcatttcttttccaattggttcatcctggtagctgttaattatgttgcaatttcggaggcccttggtgtcactccatcagttttgactgcaggagtagcagcagataatgttatttgtgcagtttattttatagtgttatttgcacttgcctctaaaatacctcccgaggcttcaaaaaccacaaatggtatgtcttccattcaatttcatctcttacattgtcttactttggatgctaaatggtgttttcatttctgctgtaacctttactggtcataatgcttttttttttcttcttcttctaatattggtagattctacaatgaaattggaatctgataatggtgataagattccagtgttacaaactggtatagctgttgccacttcttttctcatatgcaaggctggaacatatctcacaaagttaacaggaattcaaggaggtagccttccaggaataactgctattgctgtcattttagccactgttctaccaaaatattttggtcacattgcacctgctggtgatgttattgctatcattttaatgcaggtaaacttttccccccaaatttattttgcattaaatagtttatatatatatttcgaagtgagttatcctctttacagtttatgactttcccagctcagaaattcagagctaagttgagtgttgtttattatgaaagacttaagaataaggctattaagctaagcagtacaagtaccttatcattcagtgcaatatgttgttgctattgacactttgaataatctctcaagtcaacttttcatatattatggctcccccaccaaaaaaagaaaagtaaaactttggtcaactgaattaaatttagtattttaaagagaaaatcctgaaatacaatacattatacttcctaatatttaaaaccctgatatagaataaagtaaaagaaaaagggtatgctaatttttcattggtgattacattacaaaagataaggtttgattatatgcatatatataattgcaactacaggtattttttgctgctattggtgcaagtgggagcatatggaatgtgatcaacactgcccctggtattttcatgtttgctttggttcaagtaacagtccatttggtggttgtgttgggcctgggaaagctttttggtttggaccttaaactattacttttggcatcgaatgccaacattggtggcccgaccactgcatgtggaatggccacagctaaaggatggtggtctttggttgtcccttcaatcctcgcaggcatttttggtatttccattgcaacgtttcttggcattggttttggaatgatggttctaaaacacatgtagaaattaatcatcagcttgtaatccttagttaattgattttctaagtcttaattagtatatgctatatatggtatataaattttcttctttgtaataggttataacgtttgctagtactagaagaatatatttagattagaaaatggtttagttcatatgttgttgtactactatctacaatgtcagaagttttatgtactgtatgtactacacacacggattaattatgcatatatagtcaaatgcacttgcattatccctgaaagtcaaatcatttatatattaatttcagatatatatttatagggatatgattttgtcctgttattgtacttttgcaatccgtgatgtacggcag

SEQ ID NO: 378270 - DNA, 2597 bp, Cannabis indica
ttgcccatcagcctggtcatgatgaaatgaaactcatcaaaagtaaagaaaaaaacagtagaaaaatttcaccaaaaatgtatttatgtttatgttttggtaggaggaattagattttagattgtgagaggcgcagagagattattaaattgaaacaaccacaaaaacacctacccagtacccacccttctccataattatacaactgtatggacatcttgctgaaggctttcctcaccagatcctctccttcaatctcttccaaacttcctcggcaaaatccatcttcccacatcaacatccttcattaaaaccattcatattaatatccaaaactaagaatttcaaacagtactcagttatactggaaattatttccacaccctttagtcataatcatttaccacattcaaatagtatttgagaaaagagaaataatgagaaaatatataatggacctatttagtagtaattaagctgatttacttaatatatacacacactaatatttacttaataattatatatattacgtaacaatacttacaagctgccgttgtcgtctccaaccttgcacccattgccacctctgactctcctgaaaatcaaaaaggaagaaaaagaaacccatttaaggaaacagctaattaagcttagtaaaaagtagagagagaaagggagacatagaaagagataaggagggaaagagacatacgggcgaggacggatggtccagaagacagagtaagtccactctgtgttgagacagacggttctaagggcctcatgaagggccatcatcccaacagcttctttgcttctatctgatgctcctgagcccaccatttctctttctctctcaagacaattaaagcttttatagttaatctctctcacttattctatcaactttctttataaaatttaaagactttttcttattatcccagaaagaaacactacaattccgaactcagagtctcgacttggtttagcaacactacaacactgcttaaccaccacaagaagaggaagacctattctttctacttctctctctctctttgttggtttctcttttaagcatatatatttaattaattaaggtttttgggttttgcaacctctctgttgtctactattgtttttgtatttgctggtcccaagtaataagctttggtaatgttgagagagaaagatgaagatgaaggagtaggaaggaggggttgtagtaaaagtaagaaaagaaaggatgatgatacatggtttttggacgtatctttaagctttttacaacatggaaacaactttcttaaaacaaataaaagaaagggggccatggaaagactcaaacaaaacacacagaaattaaatcagcggtggggacagcttaagtcctttgctaaaaccacattaattaatatattattattatagtaatactaataccaatgtatattgtgtagactttactatccatgatcaaaatcaccattttacccttttactagtgttgcgttgttacctgccttaattcgtagtacccacacttttacaatctgcattgactccataaggctctgcttagcaggagactttcgaagtcattttcaagactgttgtagtatatttttaaagtactttatttgtttgttgtgtagtaaagacttttgtggaaaatttgcttgcatctataaagaagttttgattaataaagaaaaaggaggagaaaactcagaaaagttaattagagcttttaatcaaatgcttgtattttacactgtatactacttttatgcaatttctaatagtgccctttctattctaataccataaataaatggcaaaaaatgagaagatctcttctttggttttattattattatttgttgatggataggatccaaactactgtaaccatgtggaattgtttgtgtttttattatagtatttagatgacttgattgataaaaaaacaacatcacaataagttaaccaatgaattgatctaacaacccaagacctaatctaaccacgtaacacattgacatatatccacaaaataaagctttattaacttttgtactcttcataaatataatttgtgaaaaataatattttgtaaggagtccggaacaacaaacaaacatggcacaaaattaagtagaaaaatgtgattctgtttctgttgttggcttgaaacttgtgggaaatgttttgatttcagtacaaaatggatttttaaatgtagtgtaccaatgaagaaagctggctgatctgatcactatcacaggtaccaaagtgagtgcatgttttttttaatattatcaaacaattcggaaggcatagaatctttaccaaaaaaaaaaaatgctaaggtaaactcaatattattagatctgaattctactttgaaaaatcctatttatatgatattattattttgttgtcagttttatcttttattataaaaaggcgtaacttatagaaaaatatttaaagtatgtacggatgaaagtatatttttcatatttaggtcacttatatcttgttcttatttggttaaactatctagctatttgaaatggtttatcttc

SEQ ID NO: 378271 - DNA, 1469 bp, Cannabis indica
ttctcttctcaaaacccaaaagtgattctcagccacgtcatcgccgcagaagtctccggaagaagagccccgaaagcacgaacccgatccgaaatccgtacggttatccaaacaagaacaacccgacccggatttgcaaaacccgtaggacccgcacggactcggaagctcgcacggttcggtaatcgcttgatagttcaagacccagttagaaccgtcccaatagtaccctttcagattcccgtccggttctaaccggacccggaggagtccattcacgtgtctttggaagctggtgaaaggtagtacgtcaaccgggggtccggtcccgagttggtacatgcccaggtacccgtccgagttgactcgggtgtaaatcgggccttttccttgaacaatctccgctttggcttccatggctttatgcttataatagatttgctccgacccatgtctaaacgcagcgtataagccccaaaagtcttctcctaatctcatggagtatagcccattggacgaaactaaccccattttagctgtgaggttttggttttccacaagcgtatttgttggaaagtcaaaactttgccacataacagactgagtcgccgactcgccctgtactatttgaagattggacgagttgagtaacacaactcgatctccttccattcctaatgaccaaaatacccttgaccgatgagaatccaaaagcacgagactaccattgaagctgagctgagtgaagtcggaccacggggccattcgggtcgggttagccgcccatagaggctccgaagatggtaaatgaatcacagccacagttagtaaggtctcgttgattcggaggaaacccaaagcgaagttgttagacgagtcttgaaggagagcttgaaacgacgtcgttgatgatgggtccggtgtcgctttgaaccctttgagcagctctagctgggtagtggtaacggcggctgcgctacaccgccatgttggcgcgtatagaagaatcgttatgattattatggttaagataaactgagtcacacgtaaacgagtcaccgagttgatgaaagtttccattgagaaaagagataattgatttttacaggctttgaaagatccaggaatatatttgatttatatatttgatttaaagggccagaactcagaagcagtaaccgaaaatattgttattatataatatatacatatatttaatataatattataaaaattacatatatcgaagactgaaattttacatgaaattaattataatctaaatattaattagctatttatattgcaataattaaaatatatatagtaattgattaaaaaaaatgtagcatgtgacatgtattgatcgagtataggtagtacattatagtatatattattggctaattaggatttttgcccctgaattttgacatataccaaattatgccccctgaatttttaaggtc

SEQ ID NO: 378272 - DNA, 4481 bp, Cannabis indica
tctctctctctctctctcaggtttgaattcaaatgctcgaatgtgtaaaagtggtaaagtgtccttctttgcccttatttatacataaaggtggtgatatgagtgctccacaatcaatggcccatatttcatctcagaaaacacacatatgatctaacggtcggggagctggaaggcccgcatttaatacacttcattagaactgaggtattttcatcaaagatatttgcctcaatatttgcgctgacatcaattagtcgtcatcatcatatcctaagcatcacgcattttcctaatgcacatggaaattatggaccaaaaggacaaggacacgtaggtggcgctagctataatctaaaggtccccaaccatccacattctgaagcatagaagacaaaaatgtctcttccttttaaagctaatccacatgtccatggaaatctgaaaggaagactataagcctccgccactctcaagttccagaagcctgggtgtaaatactatttgtattttttaaagatgacacgtggcatttacaaagtgtaattagtctagaacggcctggagtaaagcccttccgagttcagacgaaagatgggcccaaacccatcgaaaacccatgaagcttgtctacgaagacgaagctcatctagatctggaaggcttccagccttcctgaagatagaataaatgaagccctcttgatgaacattaggatgcatccgaaaaatgaatgccaagaagcgccttcagaagcccttgtagggtgacgcgaatacgctctgacgccaggtcccacaaaatcagatattgtctcccatgtcagagtgtggtaaggtgcacaccaccaaaaagaatacctccattttatccaatggcgcctgcttgacatctttgtttataggagcaatggccacgcgacacttgtcccagactgcgttgtttccatctatatgaaaacctttgccccagaatccaaacaactgccagtggggtaaaagtcatgtatttcatgtattaaccctaatagtgggtctagtttgcacaaaatcctagtatgtcacgagtatgcccggatccatatcctagcctatgaatacccttttataccttcatgcaaaggggacgattcacttgacatcttttagggtttcttcttctctatgctagaaataccccagtgacaaaagtaagcaaagagttacggttcttgagcttataaaactctattgtaatacataaaagtcattcaacctaatacgttgactcatagactaggattaattaacactcgaatcgcgtaaaaatcctcatctccattctatatttacttatttaattttttaagctcttatttaaatcaattttcgaaaatttcagtaagcagttatatatggtacaaattactgtgataaatatttgtgttattataccaatgtcaataatatcataatcatattataatcatttaacaagatctcaagtaattaataatggtgaaaaaaaaactcgaatatgcaatttaggataaaattctaattcaactaggtggcacaacccaaaataacaaaatctctttttgggttagtgagtagctctatttacattcctaagctcaaatccttagtcaaatttagtagtcccaacctgcaaggaattatgcatattcattaaaaagtaagtatacgatgataatcattcaagggtgtcgtgttgctcagcatgctccatccataactcaaatgtttttttacggatgacagctacttattctatcaagcaacgactggcgctgctggtagtatctccactatgcttcgacaatttgaacaagcctctgaacaacaagttaatcattctaagtcttcgatatttttcagcccaaatactgatgtagcagtccgagcccaaatttgctccaatctccacatgaatgaagcccttaaaggcagtttgtaccttggtctttcaacactattggtcgcaataaaaatacagtgcttggttttatcaagaacaaaatcactacccgaatacatagttgggatggtaagtttctatcacaagcgggaaagaaattcccttaaaaacaatcattcaatcgcttcctacttatgcaatgagtgtatttcttctaccccttggtacttgcaacgaacttgagaaacttatggatagtttttggtggaagaaaaaaacaagtactagtcgtggcattatctggatgtcatgggatcgcttagcaactcccaaagatcaaggtggaatgggttttagacatcttcacgattttaatcttgccgtgcttgctaaataaggttggcgcgtgttctgtaattcagaatctcatgtgggccgtgtttataaagctaaatacttccccaatggtgattatctttcagcggaacttggtaataacccaagctttgtgtggcgtagcatttaggctgcccaagaccttgttcgtttaggtgcttcgcgtgttattggagatgggaaaactaccaacataattggtactccgtggctgccaaatcctgacaataaatttgtcaccagcactcatccttcattatataatcaaaaggtcagctccctcctgaaaactgatagtcgtgcttgggattctgaggtgattacggacctgtttgctactcatgatgccaacttgattctcggaatccccttgggaagtaatgttgagactaatttccggtcttggacagctgaacacaatggttttttcaccgtttaaactgcttattccttgctgtagcaggaaaaaccagcaacaccagcatcaaacaactctggtttttggcgaactctttggcatttaaagattccaccaaaagttttaaatttcttgtggcgtgcaatctctggaactcttcctacttgtatcaatcttgtaccaaagcatgttcaaattcctgctcaatgtcccgtgtgtaagtctcaccccgaaaccatacatcatgctctgatttcgtgtgagtttgttaaaagttgctgggctgtttttggcctgcctatcaacctagccgctgctgcatcttttagcagctggtttgatgatttgaaaaaaaatatgatgcaacttttacttaccgtgctggtatgctttgctgggcagtgtggaaagcttgcaacaatgtcgtttggaataaaaagttgtctacggcaaatgaagtttcactttcggcctctattacttttgaccattggagaaaagctcaagataaaaacgccctattatcgctgtcatttgaaaataatggcaatggggcagagctttggactaaaccagacttaaatcaagtcaaaattaatgtagatgttgtactatttcatcatgattctgcttatggcttaggtattgttgcaaggaatagcttaggctatcttatcgaggcaaagataacctacaaagggggcatatatccggctgaggttattgaggccgttgggattaaggaagcccttagttggatcaagaatatgggatggaactgtgtagagcttgaaacagatagcttgttaactgtccaagtcgtccgaagtgatcaacatatgtcttctacttttggcttaatcattcgggattgtcaaagtttgttgtcttccttacatggtgtgtagttacgttttattaaacgatcagcaaaccgagttgctcatgcagttgctagacaatctcgttttctccctgattgtagcattttggaaaataatgtttggcctgatttataggtccttttgtattcagaatgcgtttaattgaatgaagttgatatttcatcaaaaaaaaagtatacgatgataaaaaaaatacaaataatcatttgcccacactttacgtttataccgtacatttaaatttaaaattttaatatactaaaaaagataaatgaattattttccccacgattattttcaattaatgaaatataactttcttatattaaatatgactatctaatagaaatggctagtttaactatattttttatttttccattactaacatcgttagactaattaattaattattttttattttaaaaaaataattttgaatatttaaatttaatttaaaagtatcaacaaaattaaataataatttttttatatacaaatcttaatttaaattagatgttaatttaattaattaatcatactttataggctaattaggatttttacccattaaactttaacatgtaccaaatcatgcaccctgaatttttctggctgttaaacattcctcttgaactattgagattgttagatttaagaatttttgtttaattttattcaattttactatttcagtgattgtttatgtactaaaccattcttcccaaactttgatatctaccaaattatgcccctcaaattttgacatatactaaatcatgccccctgaaattttatcaatgttagattttttttttttactaaaattagataaaagtcct

SEQ ID NO: 378273 - DNA, 2463 bp, Cannabis indica
aattaaaataaatatattttttcctataaaagaagaatgacataaataaggatgggaagggaagggtggtgtattatgttctaagcggtccaatcgtatatttggaagatattttagaaaaaagttgtagaagtatatatatatctatctaattgatagaacatgtctatggaataaagaaattaaccactaagtaagtgttaaccaacctattaatggagttaattaatatcacatggacactaaatttcattttatatgttactcattgattcttcttttccacatataataatattactcattaaattaacaatagtacatataaaaaattaataatttcacacacacccatcaacttcatatagaaagttactgagattattcctgtatatctttgtttgaaagtgtcaaaagaattttcttatctagataaggttaacaaaacattgtatatatttaacatgatcaatggtggccttgttttctttatttgtgtgtgtgtggatcatgatgtggattattaaaaattagtctatacaaatatctaaatatattaatcccattacaattttggtagattattaatgtaatgattgtcacaaccttaatcctgatataagggacaaaagatctagtacttctcttggataaattttgaaaatctagttgaaaataaaccaaatcaaattcgtatacaatgagagatttagcttgatttttctatatgattatctagtgttgaatctaagtatatatttgagaaattgtacacatatctttgtttctcaatctcacgttatcttaacttagattttatatatctaggtttgatcatagcttgatctctaaaaaccaccaatttaattatttttatttagaacatataagtttcactcaagaaagaatctcaaacttgtccccacatgatctgatccaatactaagttaatttaaagttatattagtccaatgtatgtactccatgttcatttggttgcttatatttattttaatattttttttttaaaaaaaatgaaatttagaagttattaacaaactcattataaaataataaagcacaataggaactagtcatgaaaagactaagatacatagttgtattattatagatctagaaatttatattaggtagaaaaaataaaaagaattcatatgagttttatgagagcaaaaccgtgttgttctatataatctatctatctatatagttttaaggttatattatatatattgaatcaacacgcttttatgagttgtaacatgcatttgattggatatatagaaatatatatatttatgtaaggaaaattaaatcaaacaatacatttttgtttggtggcaacctttgatggtgagaaaagaacaaaccatacaaaattgaatgagtttccatgaaagtgcatattaaaacaagtacaaagaactttgccaaagagtttttattttttggtacaaggtggaggttgggatggattggcttttgcaataaaaatatataattgattcaaatatatgactaataaagacattcttggcagttctttcaataccattttaccacaattttgtttgaatataaattaatcaatgcatgattgatttgacattgaaatgtaggtgtgtgcatatatgaatcacattatgataatgtccagctagctcctagcatttcattctagctgtttctattcttaaattattcactcaaacaaaaaaaaaaaaattcatgaccaaatttagtggtgaatacaagtttaatttgattggtatagatagagtaacatcaaatagtactattaggaaaaagttgagtactaatgataaatattatatagaattataaagattatatttcttttttaagattatgttttttttttgtttacttaaaagggtatagatggatcaaattgtgattaatataattatatattaatttataagaaaagttaaaattctgttatagttaattttcataggttgatggaggtatctggctcctgcctaaggattcgagctgaataattacttaaaagaaaaaaaaaaacaaagataatatatataaatatgtaacatgtatagtcacttcatcaactatagtagtacatggatcataatatagtaatatacagataattttctctcactctctctctcccccctaaatttttaatgcatggttgggaaagtttttaaaggagaaaaatacaaccaaatacagttgtccttcaaaatatgtgacactatatatattataggataagttaatcatcaccaaataatgatgggttctaaaatagtatgtcaccctttcctttattgctctaaatatggattgagttttttttttacatgatacgaaattggtatgaaccaaaaagacacgagtatgactagacacgaaaaaatatagatttgagcatagcacgacacgaagtta

SEQ ID NO: 378274 - DNA, 3343 bp, Cannabis indica
gtcgtaagtagtcgtagaattggaggattatttcaatggtcaacgaaggtggcaatgacttcttgttttctatttatttacctagaaggtttacaagtttttggttttagtgcttttgattcctgcggaagaattctatgtaacagttgagttgttgacttaaaggttttaggattactttgggattttgtttctttttcttcttttatgggattctgtataatatataattactctaacataactcggtgatttttctttgcgcctaggcttggttctgagtgtgtagaaatgtaaaccttttgacttgacactgatgcagttgttgaattgtagtagagtttgttttatgtagagtaaatgtaggaagttttatgttcttagtttagtgggctcagtatgaggttttatgactctttctttcgttttttttttttgactaagaagtgtgaaatcggcgattggttctcatgtgaatgtgatgctagtaagatcatacattgctgtcgatcatccattaagtgtgttagttttgagtaacagtattttcttctattcctgcctgtctcttacaaactattaatatctaatgttttacatttttccttggcattctgcacatctaaagtttataaagaatttcaacaatgtttgctagatgtatttttattttcctaaacatcaagctgtaatttttattagtatattgcccacttttgggtttttttcatcttataagtcttggcagtttctgttttgaagggattgaaattgatgatgaggagcttgcacgttttgtggagcatgttgataaggataataatggaattatcacatttgaggaatggagagattttcttctactctatccacacgaagcaactattgaaaacatttatcatcactgggaaagggtatgccttgtagacattggggaacatgctgttattcctcacggcatagctaagcatgttcatagaagcaaatattttattgcaggggggattgctggagctgcctccagaactgcaactgctccattggatcgcctgaaggtgattttgcaagttcagacaacacatgcccatattgggccagctttaaagaagatttggaaggaaggtggtatccttggtttttttaggggtaatgggataaatgttgtgaaggtagcacctgagagtgccataaagttttatgcttatgaaatgttgaagaatgtaatttgtgatattaagggtgaagacaagggggatattggtactagtggaagacttcttgctggtggtatggcaggtgcagtggctcaaactgtgatctacccgctggatcttgtgaaaacgaggttacaaacatattcttgtgaaagtggaaaggttcctaaagtgggaactcttacaaaagatatctggcttaaagagggatcaagggccttttataagggtcttctaccatcccttcttgggattatcccctatgctggcattgatcttgctgcctatgagactttgaaagatatgtcaaagacatacattcttcatcatgacagtggtacagtgatttgcttttccatcattttttctcagtttactcattaaatatatatatctttgctcagtgcattctaattcttattgttttgcagaacctggtcctcttatccaacttggttgtgggacaatatctggtgcccttggagcaacttgtgtttatccattgcaggttattagaaccaggtattaattaatttgttgttgaaactttccttaaggaaataaaatccttttggtgggttttgatctttgattccagtataagttgttgatacattatgacttcaattgagaataattaattctttttttttccagaatgcaagcacaacaagctaatactaccgatgcttataagggtatggctgatgtatttaggagaacttttcagcatgaaggtttaagaggtttttataaaggactctttcccaatcttctcaaagttgtgccagctgcaagcattacatatatggtttatgaaagcatgaagaagagtctagatcttgattagagagaaggttattcaattttgatggtggcaaagatgatcttgctgctgaaatgctaatgctattgatgatgacgataccaggtgaataaaataagtaatcatatgataattgctgtttatgatagacaattataacccccaggggtacaaggcacatgattttgtagtcagcatttttctatatgcttatctgacataaatattgacaaacaacagtttcggcatattttgaaggaaaaaaaaaaaaaagagggagagagaagtaaaaaagggaaggcaataggtttagttatatatattttcttatacatttgatacgatgtcttgaataattcagatttttctcaatttgcaaatacatttgctagttgctctgctgtcattggatcctagagtacaagcttcagagccattgtttggaagatagactgtattctttttgtattgtacacaatgaaaaataagatagactatcttctctttacattacatgcacccaatcattgttggctctgctgtcaatggatcctataagtgtacaggtttcagagcatttgtttggaagatagactatcttctcttttcaggcagtgtgaaaaatatatacacatgcactacaaaagaaaaaattgcctccacatgatccatcattatgaaattttgttctcttaaattcattctttgcgtaatgttgtgataaattcggtatgccagagttcattcttaggacttaattgcgaatggtgaggactaaagccctctttctgtacttgtttttgtgattttagtccatgggctcatttgttagttctagaagtatattagtcactcaccattattacaacttcaccagcttcaaatgaatacatacatattttgtggacccttgttaatagatatttactcgacaagagcttttgtatgtggcggtcctattagcaatggttagctcaaataaattgtattgcgtacttagtatcagatgactagtgtatcgtaaaacattttgattagctaactggacagcattgcttataatgatagtagatttctttctttgagcaaagacatcttagatggtattggtgtgcactttttttattgcattgtatgtgaatatgttgtgttttctctttccaatttatatatgtatgatattcttttttttttttttgagttaaatttaacttagtatcttgatcacactaacatttgaataattcgttatagaattcatgtttcatgagatacatgatctataaaacatatatatatatat

SEQ ID NO: 378275 - DNA, 1005 bp, Cannabis indica
gccataagaataacaaacttagttctaaagaaaatatacacacgaaattaatatatgatgaatgaaaatgtgagggagatatgtgcatggaacccaagtagggtctcttcatgcaaaatcaaatagtttgagagtttggttcagtcttggagcataatatatcaactatgatcagtaatgatcttgatatatggctccaaattctgctctccatgcctgatcatcgtctgggagtgtgctctgtggtaattcattagaatcatccctgtacagtggctgcaatgcagattcaggtaatttgctctctgccatgtattgtttcatggttaccacttccattttatgttttcttttcatcttctccaattgtttcttcaacttctcattatcattatgtgaattcacaaggttttcctgttagaatatcaacaaatgttacttatctatttttttctccctgtatagtaattccaatgaaatatggtgattaaaacaaatcacttacctctgcagctgacgctgcttgttcagcttctctaagtctaacaaggagctccccagcagcatgaacagcttcagcagtatctctgagttgaagtttgaggtttctgttttccttcttcaaaagttctctctccctctctctttccactctcattgtagagagctcagcagcaagagacttagcgaaacgagctccctgacctttgtttcctgccttggctgctgccctcttcacctctgcaatcccttccataattgctcggtgctttgcagccaattcattgtacttctcctgaagctcagcatagtgttcaaccattctagcatgaccaaggacagctctatggagtgcatcgtccaactcttcggtgcactgcttctctgatctcaactccatctccactttctcagctcgccggcggtgcatgtcaatatctattcgcagttcatcggtcaaggaaatccactcgctctccatttctgtccacctttgtctttctt

SEQ ID NO: 378276 - DNA, 2125 bp, Cannabis indica
attgctaatattgaattatttttgtaaataagacaaaaaaatttaatcaattttaatctaaatatgttacatttaagatcacgatattacaatataattgcttaattagaataaactatgaaatatcttacaagatattttttaaattcctcaccttagaaaaattctataaatataataaaagtaataatttgagtacgtggtataaattttccaaatgaaaatggtagtatttatagccaaattgttgccttaattatagctttacaatggagtatggaggacgttgaaaagggcaccaatttgacataaatatgaaaacttttgttcttagagagggaaagtattgtttatactccaataaatgagtgaattgaatcgagtcacactgtgtgagcagtgttgtttgctacaagaaatgactcacacaatcgaacgcgtatatgaccataacaccacataaattattaatatgctagtcgtagtctactctcctagttgaagacccaatactcaactgagcctaatttctgatttctgaatcttagggagtgttgtcagtgttactcagtttgtgactagtgtttttttctgtttctgactttctcccatgtgattcaccatgctctctttccttggtttttgtttgttcgttgggaagcatcctccaactactttcactctccaatcctattctctcttctttttcactgcacgtgactctttaatttttttagttaccaccttttattttattcttttaattgtgaaactgttatcttctttttgtcaatattttacaaaagcgtgttagtaaagcgagcgagggttggacaattaatgttactactgctgcactgcacttcctcttgctcctcaaatactattgataaataaaacctttactctacaggcttgaaaaacattctttcttgcatctctttccaaactgaaaaggaaaaataagaaaaaatatgcaggctcaaacagcttataagttcattctctggactctggtaactttgtcatctcttacatcccaaggtaattaaagcccctctctctctctttctcacatagtgtatttgaattataacatgctatcaaattaagtggtgaggtttaaatttttcaggatgggcggtcaagtgtgctgccggcgatcacgcacctacggtgaatcaaacacaggtgggagtgggaagccctccaaaattcttggtggaaatccgtaacaactgccccatgtgcccagtcattaatgtccatctcaagtgtgggagcttccctcaagccctcgtcaatcctaggctgctcaaagtgcttgcttctgatgattgtgtcgtcaatgctgggcttccattgcagcccctgcagaagctttctttcaactattctcacaacaaattcttactccgccccgccatttggtatttccagtgcgagtaatactagcttgcttctctggctactcataccccaccatgcttttaattatacattttccttattacccacttatctcttagtataatagtatatctggctctctctctctccctccccagtagattattattcttcactgttctatttaaaacagaaccaaagaagaaactcgatttcactgttgtgatatctactgaaaatgttaactggaaagtgtcaaatgtgctctaaatatgtttaattaaacaccatggtcttacaaataatttgtgctttcgtttggggacgtgacgtgatgttgccaaatacacttttatcctcaatttttggctataatcatttgtgaatacttaattttaggagtgttctttcatccaatccgcactatttttctcataatgcattcaatccgtactaagagcgaattttatattttggatcaaatctaatccgcataatagcttaaatctaatttaattcacaaaattgaatcaattattttaaattggttactttttaaaattatttaatatttattaaaaatatatatttttatcacataactagcaacaaaataaaacaaattattgttattttatgtctttaataaatttaaaggaaaaaaaagtacatataaataaatgtttaattttgttttaaattgtatataaaaaaa

SEQ ID NO: 378277 - DNA, 6117 bp, Cannabis indica
aaaaaaatatatatcacaaaatggaaaaaaaaattgtatattccaagtacttaccgtacaaatcattgcagatacattggaaaaaaatcccataatttcttctttggtgtagatcatttctagggctgaaataatttggataaaaacttttagtttgatagtacaaacgtgaagctacctttccatgtccaaatgaaacagcaatgtaaagagggctaacatctccaccacccggaatggtgatgaagtctctacaattcttcaattttagaaattcgtcgacgatatctaggatgccagccgcacacgctgagaaaaacgccgtgtttcccattgaatctttcaaggacacgtcgatgtagtcctcgaaatctctcaaaagctgcctcacaaagtatttggcttgttttgctccgaccgccacgtgaagaacggtttcctttcttcctttactctctaaaaaatcttttttcaaaatattagggttttcgtcgatgatttttttggctgttgtgtagtctccactaagtgttgcatggaagaggctatttcttcttgaccaatcatctggtaaataatgtacgtacacatgcatgcatgcagtaatatattaataattaacactacgtaatattgtagtaaaacatatatatggaaatgattaaaagcatatataattaaataatcatacctattgtcataataacttgttggctgcctgaagattgagtatgtgtagagatcttaggagaagaagagtttgaaggtgttgaagtattaagattatttgtagatgtattataagcctctccttggtcatgattgtccattttgtatggtaattaaaacttaattagctattgttttataaatatttatatacatatatagtattcataaatgtaatattataattgcaaatggtatatatatgggaaaaaagcaaattaaagttagaggaaaagaatgttaagtgggctataaagttaattggttcattgtaaagtgtcaatgcactaagagtgagcctgtacgatacttcccagaaagtgatcctataaccttaattaagagcatgcaaattccattatgctttcttttccactttcttgtacatatatataactccttctttaacccattgattccactggacaaggttttaaatttgtggtagtgggatttattataattaaatagaagtggagtttgaacatctaatccaatccaatgttgctaattgttaaggataatattgttagttaaaaagtggttaacactgttgttacaatagttaaatagttagttaggcttttcctctaattactctgttagttgtatatatacccagtactctgtactctattgaacatatcagattaattgctttgcctttggttttcgttatctctattctctcgttctctctgtctttcaatatatttgacatggtatcagagctttgatcgttctccaatagagtcggataccagcgacaatggtggtaatagtggagcaacaagatcgaaccctgctctccttcctcgttcacaacctgtttcgttctcacactctctgtctattaagctcgatgagcacaactacctaccctggaaacaccaggttcttgcttccataaaaggaagccgtcttcaaatgttcttggataacactcgaattcctcccaagtttctcaatgctaccgatgaagtcaacaagaacatcaatcctgcctttgaagactgggaacaacaagataacctactggtttcttggctcctttcgtcaatgtcagaaagaactacaaatcgcatgatcggatgcgaaacaactgctcagatctgggaaaccctaaatgaatactacacggccctcaacaatgccaacatagggctttacaagactcaactccgaaatactaaaatggtaggttctctcaatgattatctgttgaaaattaaaggaattatagaccttctggctactatcgggcacaaacaatcggcccaagatcacatagaagccatcttcaatggcttacccccggaatatgacgtctttgtcacttctgtcaccacaagaaaagattcttattcagttgcagagatggaggcccttttaatggcacaatctgtgcgcattgagaagaatgctaagtctctgacatcaccaaaagtgaggccaatttggctcacaccagacccttctctaggaaataaccaatggcagaccatatttttccccaaactctggtggctacaatcgtggaaaatcaatatcgtactgttgaaaattcacaccagatgcaacatatgtctcgtggtaatcccaatttcaaccgaggtcaacacaatggcatcccaacagccgaggtaacactactactggtagaggatcttctcaatcttggacacaaaaaccccaatgtaaactatgtcacaagctcgggcacacagtgaaacaatgcttctacaggtttgataagtcgtttacgggtcctgaatgttttaatcaatttcctgcttcagccaatgttgcagaaatgcaagcgtgtcttgccacacccgaaactgtccaagatgatagttggtacccagactcgggtgctacacatcacctaacaccagatggaaccaacattgcatctagcagtaattactcaggaccagaacaagtctttgtaggtaatggtactggtctagacattgaaaatattgataattcttccattctttctccctacacctctaaatctttgctcttaacaaatcttcttcatgttccctctataacaaaaaatctactcagtgtttctaaatttgctaatgataattctgtgttctttgaatttcaccccactgtttgctatgtcaaagaacaggacaccaagaagactctattggttgggaagcttgagaatggtctctacaagttttcctctactcttcagcaacctgttcttccccctttatcaaaaaattcctactgttttactaatcatgtagcttcttctgcctcaaatttttcattatggcacagtaggcttggccaccctactgctcgaattgtaaaacaggctttaaactcttgtaatatacctattgataataaaactaatcttgatttttgctctgcttgttgtctcggcaagcaccataaaatgccatttcatttttccactacaacttatcatgctcctttacaacttcttcattctaacttatgaggtcctgctcctataaactctttaaatggctatagatactatagaattacaacttggccacaaaataaagactcttcaatctgactgggggggggaggaatttagagcctttacaaatctattagaacaatgtggtgtcgtccatagacttgtttgtcctcatacacatgaacaaaatagggtagttgaacgaaaacataggcatatagttgaaaccggcttaactcttcttgcccaagcatccttacctttatctttttgggatgaagcttttcgaacaaacacttttttaataaatcgaatgcctactgctattttacaaaatatctctcccttacaaaaattattttcaactcctcctgactataatactctcaaagttttttgggtgtttgtgttatccaaacctaagaccatacaataggaataaactccattacaaatctactccttgtgtgttcttaggttatagcatgtctcacaaaggctttaagtgcatgactaaggaaaaacgtgtttacatctctagggatgttgttttcaatgaatttaactttccctatgctgaatctcaacctcaatccaaaactgttaccacaccagcacccactacaggtctgccacctattttcacctcttttcccactgattttccatcaactaatgcactaaacttagatgcatcatctcctatacagtctactggttctccacaaataaaccagcaacttaccaattctgcctgcactacagcagcacccacggctcttcaagaacatcttatagatcgttcccccatttttccacaacctaaggactccattaccaatgttcctaatgttcctgtcaatattatacctgttcctactaatcttgttgatccaggtaccacaatggatacacaaccgactccaacaacttcaactcatcctatgattacaagactcaaagcaggtgttcgaaaacccaagtccttccgttgcccactgtgaaccacgaacagtaaaggctgctactttaaaagccacaatgggaatggggcaatgacacatgagttctgagcactgattaaaaacaatacttggatccttgttcggctgccacccaacagaaaaatcgattggttgtaagtggattctaagaatcaaacacaatgcagatggttctcttgatagattcaaggcaagattagtggcaaaagggtttcaccaacaagctggctttgattttgaagaaactttcagtccgattgtcaagcctataactattagagtggttctcaccattgtccttaccaaaggatggtccattcgccaacttgatgtcaacaatgcattcttgaatggggatcttcaagaggagatatacatgcagcaaccacctggttttgtaagccaagaacatcctgactatgtatgcaaactcaacaaagaaatttatggtctcaaacaagcaactcgggcttggtttgagaaactgtccaatgctcttatttccatgggttttcactcatctcaggctcatcattccttgttcatacatgtcacccacacacattgtatctacattttaatctatgtagatgacattctcataatgggtagcaatgatgctgctgtccacaaagtagttaccgggttgagtaacaagtttgcactcaaagatactgggctttctcaactacttttagggatccaagtcaccaaaatcaggggttactgctaactcagaccaaatacctacaagatcttctctccaaggctgaaatgcaaaatgtcaacactcaaaatacccccatgaacaatggcctcaaactatccagctatggcagtgaaccaatggaagatataactctttacagatcgatcgtaggtgctttacaatatgcaaccattacaagacccgagcttgccttctcagttaataaagtatgtcagttcatgcatgcccctcttcaacaacactggatggcagtaaaatgaattctccgatatattgcaggcacccttgattatggattatacttcaaacctgcatctgacttttccattgaagccttatgcgatgccgattgggcagctgatcttgatgaccgacggtctaccaccggctactgcatctttttaggaggaaatctagtggcctggaagtctcaaaagcaagccacaatctcaaggtcctccaccgaagcagagtttcacagtttagcaagcactgccagtgaaatttcttggatacaatcccttctcactgacctccaaattcagcaaacaactgtcctttcggtgtggtgtgataatcagagtacttttcttcttgctaccaatccggtcttacacgcacgaaccaaacatattgagatcgatctctactttgtgcgtgacaaagtcatgcagcatcaactacacgtcaaacatgaaacagagaaaaaagggaagaaaataagacaagaaagctttatttatatagggaaccttacaagaattagttacataactcaataaatcagttacttaagctaactattataactaatttacagcaattataacaactaggcaaagactaactgaaaactaattctttagtggttaacatttcctaacactactacaaaatggctattgtcgtcgttttttaaatgacatataaaaaggtttacatgcattagttggagaaagtgatgtattaattgtaaataattgtattggctactaatttatttatagcagttataaacagacacatgcatcaaataattgtatgctctattgttaagtgacactacaagaaatgtcacttttaccagcacagttcgcttacttttattagcgaatttcgcaaactgcgttggcaaagaggtcaaagttttaccagcgtacatttgcagt

SEQ ID NO: 378278 - DNA, 2686 bp, Cannabis indica
aattttaatatagtattatataatagaatatgatgataccacctaccaaataggattataaatctacaaaataagaaacatgtgaaataaaggaaactaaaatcagattctatgaaatctggacaactagtaaatacagtagtgcaagattttatcaactggtatcttgattaatcatcaaccaagatgtcttaaatcttaacaaaatatactatctaatcccatttgagaactgatgaggtttacacaatttctctcccatgtcacaggaagcaagctcagctatccctttgttctcacctgtacttgtccccatggctcaaagcattggcccaattttgtcacagattgcatcatcaccaacaatacgtctcacggtgagaaggccacttttttacttttggatgtgtatgtgtgctttttagtagcactgtgaattacttgcattttgccctgtcacttgtgaattatgaatgatgtaaatcattggtagtgatagtaatgcagtcaaacacttctaatcttcttcataccagactgacatagtaatgcttttcttgcaggcagagatgactctgaagcaactggaaaaccttagccctcccattatgaagcaagttcttcctttggttgagcagcttcctccgttgtacatggatttagtgaagggaagagaagactttattccaaaacctgaagaaaccagaagactggtaagcaaaatcctcttaccatcagtaagttagctgcatcatgcattttctagaagaaattgtatattttttggttgctggtttttccccccccagaaaaaagtacacttgctttttgaaaacctctaagcgatttttgagttaatatggatatacttgagggatgtgatggcatctttgggttgtccctttctctcttttcagacattgcaatattaggactttagtttggaattctcaatttaatattattaagttcttgatttgcttctctctctctatttatgattatctatccagataaagtcatactatggcatttcgcgaaatcttttggtgaaatttaaagatgatacaatcgatgaaacttcaacactggcacagttgcttagctcagaatcagccattagttcgatgctggacatgtcaattcgcctgatgcctggtgatcacgggcttccgttgcaacaggtatttcgtattttcttgtttgacatgctttgattgaaagatcatgataaaagaaccaaaatattatggaacatttcattttgcaggcccttccagatgttccaccggcaatggctgatgcagtaaatcgtggaagcgagtttctggcaaatctgtctgcaggtacaccatgggagactgtagccaaagaagttggtaatacattaggcacagactcaaggatccttcgtacggagatatcaaaagatataaacctacttgtagaagtgattacatcttggatgacttctaatgcaggtcaaaaatctttgaagccatgataagaatgtcacagggaacctcccaattacataagaaaacatattgattccaacaatgttggagagtagtgtaaattgtttacaggtcatggatttcaatcatattgagtgtttgtacagggatatctgaaaacactaataaaagagactgttggtccgtccttgaacacgttctactcttgttgctattaaggcctaatgttaatgctgacgattaagtatagttatgtagtgcaagattctatgaacacgaatatgtccggaatgtttcgtcggtgaaaataaagcaaattgatttttgggggacataaatgtgtgttcaagtcagcttgtgcgcaactcaactagtctcaaattgaccgagtctcctttgtctatgtgcttatgggaccttttacttaatggtactcttgctgtaagtaaaactaaggttttccttccaagatgaaagtgtccgccgcttgccttgaaaacttcaattgtataaagctgctcttttgtttacaagtagctcccaatgaacaatctagggagacacttcgcctacgagggctgcctctcatctcatcttgattcaccactcttggggcttgttaaggggtatgagtcgcaaaacaatcccatactcggggtatggagtcaccatcataagacttgcacattagtactaacacctcttttagtaggaagacttatcttactcccactttaagtaaactaaggttgtttgactccatgcatctaactcacttctttggtcctttccttgcccactaggcaatcctttgaggcaagcaatttgaccacaaaacaataaatttgaatctcatgttattagtattgcaactaatctttctttctttcttttttttttttttttttttctttttttttttttatataaataaaaaattagacctcctgataatattgtcaaaatctcatactagataagttgtgagcaataatccatttagcagcattgtttgaaactttattattaatagatgtagtaactcaagcattatttattattgggaatatacttatttggtacccaatatttaacttaaatataactttggtaccctctaatatgaaaaatgtttatcaggtaccctctatttgtaaaattagtaaaaaaaaagtaccttacacactagggaaattttatttacaccc

SEQ ID NO: 378279 - DNA, 1789 bp, Cannabis indica
gggatccaggtccagagccgggtcgggatctaggtcgaggtttgagtctagggtccagagtctgaggtcgggattcacgttcaagtttgggatcaagttcgggatttgggttcggggttcaggttcaggttcaggtccaagttcggggtccaggtttgggatccttaccccagaccctttgtaatattataatacaagttaataaaaattatttattatataataaataatacaattctcattgtattgaaattttaaggttataataattaatacaatacaatgttttatccaaacatagtattatttgttatttaatataatacggtcattatacgacttaccaaacgagccatagatatattctactactccattgattatttccagcacagaaaaacaattcttgccaaaaaataataattatttctgttgtttcagatcatccacaaagttccaacaagcaattcacaatcactcttttccaacacttcaaaagcatttagtaagaagtctttaatgtctaaatgtttattttctgattttttttttcctttttcataaaaggagtatgtttcaaatttttttaactttgcaacaacttattagtgaatgagtcacactctcattgcaatggccacacataaaacaagtaggactaggaataggaatgatttttctgttaaagaaattaagaggagtagggattatatgattgtaagatcttcaaataaagtgcttaatcttagaagaatcgtagtactctaaagaaacgaccacaccatttcttcaaaaaagttcaatttgaagtggaaaggcttgagtaagaagtagaagcgaggtgatatgccaattttacaacaaaaagactagtagaatgacaagaccatatcaaagaatcatgattattcaagtcagggataaaaacttttaactgtatcatgataaaataaattagagtaatttatttaatcccagttcccccttttattcagccgtgggaatagtaggactttcaaaagctttgtaatttaggtgtataacattgttatcttaaagtttacacagctgacgtggcctttccatgtggcatgatctaaccatctttttgatctagtccgagcaaaaatatgccttgcaggtccatacaaggagtaacaaccatctgcagatgtcacatgaagcatctagttggatcatctacctttcggccagagaagatgggggcaacaccctactggggtgattctacaagccaatgtcataaaggagacaagtgtcgagagatcttatcgaatgactaacatgccgatcagatctagtactaccaggaatactggacagagatacatgttcctttatttcgtcctcaacaagctttctcaaatatctacaactgaatcctacaaactcagatccaaaaaatctatccgagaataaaggagattcaactgattgtagctggacccaaaaaatagggatatttattatttatttactcattttacggagccatatgtaacaaatctcccctataaattattcacaaggggaagggaccagaaaaccaagagctatacttgtactcacgcatctatgatcacttcactgaattatttctctgtaaacatcttgagagtcatagctagaattctctttgtcatccttagtgatctgcccgatattatcccactaaaggaccactttcttgttataattttgccactttatttcaaccagttattattctttcaataataccatattttccaattcaatcctacaaatg

SEQ ID NO: 378280 - DNA, 1785 bp, Cannabis indica
atatttaagatggagttgaaattttttggacaacgtttggaagtgcttactcgcagtggggtgatggatgagacttgagggccaacaagtgagtgagtatttgaatgtgatgcattcccatgggtcactgtcacttgtacggaaccgatatacgaaaccggcatcaatacgtgattttacaagattgaccctccaacgcgttttgcaaagccactgccgccactaccaacccaagtggcattttagtaatttcaaaccaacttgacttgacaatgagagagagaacggaaaaagtggataatttgtgttcattcctgtctcaatcttatgtgtcattctccatcttcttcttttttccaaattataataaatttccattgtttgttctcaaaatcttctcattaacaataatcctaaattagtttagtaaaaattatagggtttgttttgttctacacataattgcaattgcaatatattcaaagtcttcaatctttgcacaatatttttttggatgagtttttttcactgaggttatagttatatctaaaatattttaaaaaacttaggactataaattgaaaaaatgagatgaaaaagattgattcagattataaaataggaataacaatcactagattgtcatgaaagtccgagagagaattcttctaagaagtatgagcaaagtgaagggtgtttttttggctttacaacgatggagagattgttttgaacatggccaaactaagtgggttggatgaattttgcaagtttaaaatattgaaattttttacactacatcatatgaagaaatttcaactagatgtatttatatatgagaaaattttacagtacactttttatttaaaagatgtatattgatatatttttacagatatgatttttttccatgatgtacttttacggaatgtattttgtggtacattagatgagtcttatggtacgttaccattttttaatcctaattacctctacatcaacaccaacccctagatcaaataactccttcatctaacggctgtcgtatataacggaatacattccgtgaaagtacatcacgggacaaaatcgtatccctatatttttatctattttggtatttaataagaaaattttttaaggtatttttttattgttatgtacgttgcagttatttaagatattctacaatatttttagaaatctaaaagaatttaacatactgaaaacaatattgttcaaataatctattgaacttatgactcttttattatatacacgcgtgaaataaattatttgaacattactttttatattgtaaattattttaaaatttttaaaattttataagtagtcttaaaaaattataacataaacgactataataaaatttgactaaaaaattctcttaaaaaccaaaacattattgttagatttttgtataggaatgcattataaaatcaccaatatataaatgtatgtatataaacttattaaaagtaactattatttttatgtatgatctatatgtgcacattacttatatatataagacaagattatggtaggaactatcaaaagttccctatcgataggaatttttttttaactattgattttaaattatgtggttattatgatgtaagatgtatactcttacgataagattgcttgtatacaattagaattttatacatattataataatatttaatgatatttatttttttcaaaatatattaataattaaaaaatttatttattttatacatatattaataatat

SEQ ID NO: 378281 - DNA, 1782 bp, Cannabis indica
taataataataaataaaaagaatgagccagaatgagtcaaaagaaaaataaatattatttttctcccactattctctttaacctcccacttcccactctcgccactttttacataacgtaaaaaaaatagtctataaaaagaagaaaatcaaataaaaaaggaggggaggggagggtatcgacactttgcaaagaaaagcaaaagaaaaaaaattactattgttgttcttccaattgcttagagtctttaagggtaagtacttatggagtgcatctattcctttcttaattttactttgtactcattctcttcttttctctattcatctatggaatttcctcatttcataaaaaaagaatgccctcattccacaactctgaagatgttctcatccatggaatgcccacagtccaccgattaaaatagatgtcctcatttatggaataccctcattccgccaaatctatatttatggatatcagaccaatgaaattttttagtcaacacccgagagtaatttgtgatttcccttaggacgttgagacccctgtcgggttggtgataacatctcctcatctcagctggtgcatgaggtgtataaggatgcttggtctcaagtctggtcgccgtttggtacccttgtggaggtgggttttgtgtcccctccacaggatttatgtgaggctttgcttggaactgtagaaggttggggcatacctctacagttcgggacttgaagtccctaattagggcatgcttacctaattttgtattcttatctgagctcaaagttgatctgtcaccaatggtacgtattcttaaccaacttcaattttgcttccataattctgtgcctgctgtgggaaatgctgagggtattattctagcttggaaatatagtttgtgtttgaaagtactattgtagggcgtaaccaaatttttggcttgttaacaaggattggttgtgtttatttttgagagccattttgtcttctcttcagacgagtaactctgatcatctaccgttatgtctgtactttggaggtttggaaacaaagtttaaaagtaatttcaaatttgaagaagggtggacccgtgatgacagaagcaaacttgtggtggcctatgcttggaattctattatccaaccctgggctcctactagggtcttcaataaaattggggtgacttggatagcactaaattggaacaagatccagtttgggaagcttgatgccactatcaaggagctcgaacacgagttagatatcatgcagaaactcctgacaggtgagcgagtttagaacgaggaacttgttctttgtcaatctctaaaccaagcccttgaatggaaatccctttattggaagcaaagagcgcgggttgattggcttaaaaatggcgataaaatgttccaagttctttattctgtctgctacaatcagaggaagacgcaatgccattgaaagtattctggatagaacgatcattggattgttgggcacaatttaatcgggaaggaatgattatctaaggggtgttttctcctcatccaattctgttcgtgctaacttttgtgatgactttatccaagactgtctatcccagggggagcaggaagagcctacccagcttcctagtgttgaggaaattaagtctactttgttctctatgggtagtcataaagcccctgggcctgatggaatttctatccttttcttcaagcactattggggctgttggaaattattttaccaagatcttagatctactcacaagta

SEQ ID NO: 378282 - DNA, 2175 bp, Cannabis indica
aattaaccatctatactaacaattatgaagctagggaaattcatacccaaaagattgtaagtatgaacaattaatacaaataataatgttatctttggaatgataatactctaagcgtggatatttaaaactccaattctgcaacaattacatataaaattattaacaaaaataactgtaaaaaaaatatgccaaaacaagataataattgcaacaaaaaaaggggaaaagcattattatacctaaagaactcttttgtcatctcattaagaactttaaaatcattatcataataaaccttaaccgtagaagatttctctttaccctaaaaaacaaaataattcaaaacaatcaaacaaacacgattaaaatacattaaaaaatttgataaggaatgactaaagcaagccaaaattcatgtctgcgactaaaatgcaggcattataaaccataaaacaaatacaaacacaaccacaacccatcaaaaaaacgactgaaaacctatataacactaaaatgacggattcaaaaatagtataaagaatcatggttaaaattataaaattagaaaataaccctaattaaaacctcaaattcatgtttgtcactcgaatacagacacaatataccctaaaagaaagataaaataactctaaaccctcaaaacacacaacatcatgttggattaaaattttattgtgggtatatataatgtatatgttattataaagtgtgatattaaatgaccaattatattatgagtatcaaagcgtactaaattgtcatgaaaataatgtgttaatatcataagttgatttataatttgttaaggggccaaattataattacccaaaactcattctataatgaacctataaataaatagtagtgcccaagaaataatagtgttcatttattctcttatttcccatcatagaaaatactttagacaaataatgtatttttggaagatcataactttctgtgcaatctccaataatagatgcatgttagtgatttcactcatcttattatcatcttcttcttctttaatttaacaaaggttctataaaatatgatttaagattttctatattaaaatacttttaaaatatgtttatatctgttattatttgtatttttggagtgttttataaattcttacacaacaacttaacaaaaaattatcataaaactacataaactacattgatgattgaaaaaccaacaatcatagaatagttacctttattaatttgtttacttcaatatctttattttcaagttcaaaatattcatcatcaaaattttcaataatagacttaacaggcatataatttctcctttctatagtaactactaatttcctcttagtattgattgaaggtgttgggctaggggatactctgttaggttttttttggcaataaatttcttacccattgtcgatttgggcaaaattattgtggggtttgtttggttttttcacaacaaaagattaggaagaagaatgagtaacggccattgttactcttagatattatttataggaaaaatttactaataaagaagaggaaaaataaaagggaatttgttttttctaaaaaaaatggttccaaaacagtgttaaaccaattcaaaattgtctaatagagcgaaatggatgaacatggtgaagaaatttcaaaaacataaaaattaaaacaaatttttaattttagagacccttaaaaattaaaatttatatatttatatatatgtggatgtgaaatatgatataaaaatcttaattcaacatattacatacaaaagttacagcacaattaattagttagaatatatattgaaaaattgaatttttacaaatatcaaaaaaaaaatatatatatatattatcgaaatataatgaatatataatcgtaaacgtctgcagtagcagaatgtaattctattattgtagaaaatagttttgtagaaacaaaccagaaccagcagaatataaaaataattacaaaaaattaaattaattacttgacacaagagattcgtacgtggtatcagtattctttcgaacactcctaattcacggggccactcccaaagaaagaaatcaattaataaagtatcaacaattacaaagacaattaacttaaacaagtttagactccctctaaa

SEQ ID NO: 378283 - DNA, 2948 bp, Cannabis indica
attgtgtttcttatttatgaaaataagactatcaaaagttataaataagatacttagatgtgttgtttatttatttaaaaagtaatttacataaattcaaactgataatactatgttcaataaagaaatttctgttaaaactgataatttattaaaccaagagttgttagatagaaacttttaatatatagaaatatgcatatttagtgtccatatattggtccgtttttatgtcatttacgggtgtagttccactctttcttttttgaagttgtagttccactcttattgtggtcattcctttttattctcaagtaatttactaatttcctctaatgttaaaacaatttagaaatagcattatattaatgttacaatacaccagtccagtactacatcagcatctttttcatatacatgtattctaagtttattcggatttatgttatcgttgcttaatgtgaactattagttttttcccatggggaacgacgaataggggacctagctattaaaggcctttcaatgaatctgcaaaagttagcaggctttagtcctttgaattgtttggccgaagaccaaatgcattcaattcgatcttcttaattaagacactcaactaagttatatactgtgactccagaatccaacagataacttctctaaagcactcgatcacaaccacgtttacctaccaacaagccctcagggcccaaatacatcaccggacaaaaaaaaactaatgtttaaaccactaaattatgagttatttatatatgcatctttagtaccataaaacagtttaaagtatatgttggtaattttaagcttttatttcttgaattgatgaaaaatccagactattcgtgtttcattctaaataataatgattgatgacaccatacataaataataatacttttctcttatatttaattgttgcgaaaaaagggggatcaatatatatagagcctgatcattatcctgctatttataatctgggtaaacaaaacacgcgtaaattacattatttgtaaacaatttactgagaaaagtgaaattccattaggtagatggatagacattagagacccataaaaagaaacgagaacaaaagaaggaaaaatattaagcactcaaatatagaattaaggaaactcctactatataattagattaataatatttctacctacaactaaatataatcttttaacacataacatccttgagaagcttgtacctgcgagtggctggtcttggtgacggagcgccactggtgctccttccggcgctatcatcgcggtcgtgttgcttgattttatccccgttgtactcggacctgcttgaaactctcgattcgtttgccgctgtggccgtagccaccgtcgactttttagaagaaccaccatatcttgtgcttttcgcttcactttggcaccaatcgcacacttccgtcgcctcagcgtattcgctgtagtagttactgcagtacctatatataaataaataattcattattagttaatgaaaaaaagtattattatcctaaaaaattgtttagataatatatatgatttaattaccatgtgggtcgaagtaaaaaattagataaaatatcaattagcttgataatatgtgttgatgactcacgtatacgcttgatataatgatgccgtgtgtgttgggtatgtgccaatattatataggttggttggttgtttgcttcagagcgatttagttttcattatatgatagatcagttaaatgtaactatcgatggagatgatgatacgttttgtatatgcatacataaattatacatgtatacatatatatgtacatacttgtagtactcatacatattaaaagtgctttatgaatttgtgtgcgcatgtctacatatgatgatgatgatgaggatgaagaaatccatacgagtgttggaagcggtggcggcatttgttgcagcggaaaagcttgtcagggaaacccacatcaccgcacatgcagcataccgtctgtatatccaccattgctgaccgataaaagaatcccctaaatctccttcaaaaagttttatttaacaacttatactggtataaatatctattctactcatgaaataacacaaagaaactaagagaaagaggagagaggtgactagagttagctagggaggaggaaagggaaaatagggagaggcagacttaaatataaagagtaatggtttgagtcggtgtacaaattccaaatttatcttattttattgaaataatttattattataatttttattatattattgtatattcatttcggatatatacacaggtagacccacaggttgcttgcagtcgttttcagttagggcagagtgagagatatgaaccttaaaaaatgagggagtgtaaattacatttatatccttgcattcattttttttttttgatggaactcctaactctcttttaattaatttatttattgcatttttctttatgcctttccatgtccttttcttggcttggtctggcctctacaatcttgtataattggcaaagttaatacgttacaccacaccactacgcgatgcgaaccacgctccgaattctctagaaagaataatttgtcactctcattaattattctttttttttattatatatatatatataactcttattaatgaactcactatatactataataaggattttgatgatttaaaaaaataataataagaattttgaaatagggcgaataattataataattagttaattatcttttttatatataaaacttagtaagtatctcacgcgacggatatataaaatataaattgtgtattgtaattaataataattacttaataaaattatattaaaattttaactttactattaaaaaatttgtaagataaatacttaaaatattaaatttgt

SEQ ID NO: 378284 - DNA, 8261 bp, Cannabis indica
ttttgtggatctacattgctgctgactttaggcaatcatgagcgacgaaggagaaaggacttgtcctctttgtgctgaggagatggatttgacggatcaacagttgaagccttgcaaatgtggctatgaggtgtgtttctcatcttataatttggtttgccctcttctatatgagcaatttttaattccatttgttcaaattcatatgttcattggtggatttgtggaaatttgtttgagctgtttgtcacctcctgttttaaatcgaagatggagtctggttaattctccttcgatgtgccagaagtttatatcctcttcctctatataatcaactgcttgcgtggttccattaaatattgaagcttcagatatatgtcaatttgcttttctgcaagagaaagttgaatctctgttagacacacagagccagattatttagcttaagcttttttaacgagacaaagcactttcttttcaagcaatttgttggccagtaggtgtttggtgagactgtgaaaccaaagaaaacaaaaaccaacgtatgattgaacaatctgggctaaagccacagctgaactctgaatttaactctgcaagaatctccttttccccaaattggcccttaggtttacctcgtttctcagcccgagtgcagttctaatttttttttactgtattgcagatatgtgtttggtgttggcatcacataatggacatggctgaaaaggatgagtctgaggggcgttgccctgcatgtcgtgttccttatgacaaggaaaagatagtagggatggcttcaaaatgtgaaaggtatttatttagtgaacacgatttgtcacaatgggaaagaaactatttcttcgtactgattttgatttgagtgtgtttgtctgtttgttatttttttccctgtcctatataattttatcagcagattggtgtctgaagtccatatggagagaaagatgaagtcacagaaggcaaaggctaaatcatctgaagggcggaagcagctcagcagtgtacgagtgattcaaaggaaccttgtttacatagttggcttgccacttaatctggcagatgaagaagtattccctctaatctgtttagtgtattactctcgtctttccgtgcaatttccttaacatttttgatctttatgccgatgcttgcagcttcttcagcgtagagaatattttggtcaatatgggaaggttctcaaagtatcaatgtctcggacggctgctggggtcattcaacaatatcaaaacaatacgtgtagtgtgtaagttatacattacagtgtgtgtaatttttttcaagtacgtatatgttgagcttcatttttgcttctacattttagtgctacgtttatgtaaggtcataccttgactttcatggtttcagctacttttgaatatctttaccaattttgtattttgagctgttcatttgcttagtggtgaggctcatgaagaattggttgtaagttatcatgttcaatagccttctaaccgtattttttgtggtcagatatattacttactcaaaagaagatgaagccattcgttgtattcaaaatgtacatggttatgtcctggagggtagatctttgaggtacatttttgctgtattgtcatcagcagcagaaaaagagtataacaatgactttatatcagaatgtatgtattgatatatttctgtttaatattatgctttagggcttgctttggaaccacaaagtactgccatgcttggttgagaaatgtggtatgactttttattttcttaaatacaatattgcttaattattttctctgttgatgatgtttgattgactttttgttattttcagccatgcaccaatcctgattgtttgtatttgcacgaggttggttctcaagaggatagtttcacaaaagatgaaataatttcagcgtacacaaggtatatttggaaccatattgctcgccagatagtttgtgtcctcagtgcttctataataccatttgcttgggagcagggtatactctgaagtgacattttaggatggatatgcagttctcatacttctgaatgacccctgtagtgtattttttctttcatttataggatggatattcacttttggtcaacaattacaacccaagttagcaatctataaacatgaacttgaagtgtttatcagtttttatagttggtggaaaatgtgctattaattagcctggaggatcaatatgagtttaacaactcctatagtccatgttagcaatctttaaacctgatcttatggtgctattgtaatgcttatcatgtggaatggattatgattttaatagttggtgggaaatgtgctaagcataaaagatcatttttgaagggctaatatgtggttcctgtcctaatgtcatatctaaaaactaattgttattgaactgttgacgagcattaatcttggataaaatcttttactgcatatagatttcgagttttcattttcttttaaaaatccatccatgtagttatgtaagatttaataaatctgtgttggtattgagagtttagattcattaaatataagttcagttgtacaagagtcttttgcgagtcaataaattctttcgttttgctaatgtaagttgtatatatgatctttttgctttatacttggttaacttgctgattttaaaggagtagggtccaacaaatcactggtgcttcaaacaatgtgcaacggcgctcagggagtgttttaccaccgcctatggatgattattgtgacaacagttctgcttctactgcaaaacctatagtgaaaaatgctccaagtgtaagtcactggtgttgtctttccttttaactattctctgttggtgtgaaatgtatttaattcacttttgcaagttgctattgtaatcttgcataaagagagcaatttagactgcatgtttagggtattttattagatgtgtggctatagtaggaccagatttctagataagtgaagtgtgctatatgtgattggctctagccaactgctgaagacttgtgcctgtgcagttcttgtgccagtttttgaaccatggctttttcatggatttaaattagatgtgttaatgaaggagattggaagctcttgtttgagggttgatgttaccttaatgctgttgatgtataatgttaatgttgtttcctgatttttgttttcatttatacagaatactgtaaacattggtaaagggtctcctccaaacggaagctctggtaaatctattgcgcttccagctgcagctgcatggtatgtgatttcttggtggtttgctatgctttaatttatgattagaagatcttattatttatctaaacattgcaggggaatgcgtggttcaaattgccaaccactagctggaaatttaacatgtacaaatggaccttccaaacagaaacttgacacagtaagtaataaactgccattttcatcagcggttgcaggtggtactcagacttctgtaatgcatgttgatggagggaagagacaaccgtctgacaatatcgctgaaacagaaacattgaagcccatgaaacagcataatagtttggattatcagagcaatgtgcttgaaaaacctgatgattcttcttctgaaaacatgagcaatcagttctcttcttcaccggtatcaagagataatgatagaggcattgatatgcttgctaataattcaaataccattgaccaggatgggcagtcctctacttctggtaatgaaagtgaacatctcacctcggaaggccaagtccagaatttatgctctgatatttcttcattgtgcattgatgcaaatgtcatagatgaagattctggtaaaacatcgagtagttcatttttggatcactccctaattaaatcttctgtgaatcaagggttgtcaccgtattacagtgagcagtttagagaaacttctacattctctcaaaaagcaggaactacagataatgaggtttatgttagagatcaacctgactggttagcagtttcacaaacacaagcaatgccgagtacatcttctgagttagaagaggacataatatcttttgataatcaacgacttaaggatccggaagttgtgagtcgttcaaattatttaccaaattctaccaattcattccatacatcaaatcatgcttgctctccttttcaacatgaggcctatgctgcagctaattcaaatacagatcgtctatttgtggataacaaacttagagatagtgcatttctatctgcatctacaactccattaacatctaatgggtaccctaataacttaccaaatagctacattggatctgagaacatatcagaacattcctttttgcattcgaatgaggataatgggaagcacattggaagattccttggtgatgcagctaatactgatgttaattgtgctgtagatagaggggagagtagcataatttcaaatatattatcactggactttgatacttgggatgaatcattagcatcacctcagaatttggctaaattattgggagatgatgataaacagtctggatctcacagattatcgagttcttggaaggcaccaacacacaatcaatccagattctctttcgcaagacaagaggaatctataaatcctgtttttgatgtacagccatcacatagtttccttgggcaggtaactaaccatgcttttagtcgcgacttttctgacaacagagatacacacttcgataagcttggctttggtaatggtttctcctccggtagttttgatgaatctgagaatcatgccagcggcaatcattcagttttcttttccaataagcctggttcgtattggatggactctaaaacttttcattttactggaattttattttgaagcctaacttttacagtaatttgtttacctgttactattatgattctgaaaaatgtgcacaactagtagataatatttagtaatttatgaaaaacacacttaaaacaagttatttttctgttagaaaatatcttcccttcaatgaaactaaacttaatgtaatttggtctgacaaaacaaaagaaaatctttctgtgcgttgatgagttgcttgtttttgccacgtacgggttattttgcaatcagaagaactttatttacttggtgaaccagttttgctactagattatttgctaatctaagtcgttgctcaaatgtctgcagcagcttcaagggcccagatttcagccccacctggcttttctgttcctagcagggcacctcccccaggctttggatctcatgacaggatggagcaatcttatgataccttttctggtgcgttttaagacatgatatgttttaatatctaaaatatctttcagatcaacttattattattattttctaaattctcagggaatcgcttgcttgatacttcatcaatgttgagaaatggatatcaacaacaggcgtctggaaatattggtagcaatgctgacatcgagtttatagatcctgctatattggcagttggtaaaggaagacctcaaggtggactgaacaacccaggcatggaaatgagatcaaacttctcttcacaattaggctcttttgaaaatgatgcaagacttcagcttctgatgtcaagatccctctcccaacagcagaaccttagatttcctgacatgggagataatttttctcatcttagcgattcttatggattatcttctaggcttgttgagcaatcacaagtgaacaatgtatccccatatgcacagatgtctctccaacaatccagaaatggacttatgtcaaatggtcactgggatgggtggagtgaggttcaaggcggaaatactttgggcatggcagagcttcttcgtaatgaaagactgggatttaataagttctatgctggtggttatgaggattccaagtttcgtatgcccagttcaggtgatctatacaacagaacatttgggatgtagttctcactcatttaatatcttgacttgtgtttgagagaagcttgaaggtgtattacaaagggttgagagaagcttgaaggtgtattacaaagggttgagagaagcttgaaggtgtattacaagggttgagagagaagcttgaaggtgtattacaagggttgatagaagctgaaaggtgcaacattgcgtggtatcgtggccatcaattgacttataactggtctcagtgagcaaccgatgtaggatcgaactctcaaaaacatggggcttttaatcctgcaggtgagaacgaattcttgtttagttggtgtgttgttcaatatttaccaatttaccagtatttgtttcgggtaagtagaggaatggatcaaatcattccaatcgaggtaatggcttcaggattgcatctgactgaatccaaaatatgaagttgctgtcaaggttacgagttcatatcacatattgtgtaactgcatatttatattttgcgctcagagtaaaatttcttcctgttaattgacagttctacttctggctttggtactttggtaatgtattgaatctgaatctcagggtcctgaaagtctagtagtgacatgctcctataagtttaattgttgagagccgaaaacgaaaaccataaagcattaggagtgtacagttttggttaacttgtatgtttatgcaaatttcaggtgaagtatgctgtgatgtactacttatattttgcattgaagaccattggagattgctgtaaatgattctcgactgttcatcaactggatgtgtaagctgttagcattcttcatcatatccttgctgaaatccgcgcgcgttgctctcgtagaatgaaatctaatctgacccacccctcctttctcttcttcctagggttttcttatatataaatatacctggctccaactaccaccttcacaatttacacatactgaggcaatattcaaattgatttaaacccatctttcaatctctttttgcttcactcactgcttcctcttcaaaactcgttttggtgttgttattaagttttcacatgttctgataaattatatatattatatatatgttatacaaaaatattgctggcgtgtttaatatcctattaccttactctactatagcaagattgatgggattagtcttcagaggcctattgtgtattttttttttgttttgatcattaagcctattgtgaatttgatatatggtttgatgggcttagtggaatcgaattgattagagtggttttcaacgccatcattttgctctaatccgttcaatgtgattaaaataaaatgtgagtgtgctcagttcgattttcatagaaaactaaggtagatttttggttcaccatgacagtaactgcaatggtaatgaacaggttcaatacattgtttgcttttctcttttaaattttataatctattattgcaaaaagtattgtaattatagttatatactaaaactaatgtaatctctattataattacattctatcacaaagaaaaaaatattttaataaaaatatactaaaaaaaattaaagtctatattattattttttgtttgaatattttatactttataagataaaagtaataactaataagttaattttggtcaatacaataattctgattataatgttcattcttttcattattatttttattctattatattttaccatttcaatatactaaacaccacctacaataaaataaaatttgtgtatttgcacaagtgtgtagcggtttcaaaagtggacttagaaaaggtcaatggcttttttaggttggtaatatataatatgtaataaatttttggtcaagaaaatgtaaaatcgaaaaaaaaaaagataaataataaaaaatggctattgcagtcggtacacagttccttgcaaaattacaaaatcttcaatttttccaattttttttgtcattcttcatagataatctaggcttatttaacaaacatataacaattttgaacacgaatttaaacaaacgtaatgataaatggttattaggagtttgatttgttcaactaccttcttaattcttattacaaagaaagttatgtaagaaaaaaaatactaaaatacttttatgataaattttattttactattagcttctatattctatttttttaaagtagggtaaagattattttggaccacatgttttgcaaaagttgtcaattagatattttgtttttttgtttttttt

SEQ ID NO: 378285 - DNA, 2240 bp, Cannabis indica
tttccaaccaaacaaaagaatcatgcccattagtatttcatttcattcctttctggcctattaccatcaactaaacgggccctaagagtacagagatagggtttcctactaaatattataaacacatcaaatacaccattaaaagctaatagattgacttatgaattaaagttaattaacacctgaactacttaaaaaacttcatctctttactttttgcattttactattttcttaattcttaaatatttagtctccaaaaatcttgataaacaactatattttattctcactaatttttttctagtatcactttaacctctaatctgactaatatgtgatctcaaaactcacagtattgattttaagtgtgccttctggttcgatcgcccattttaatggaatttttccaacagtggcgtgagtttttcattggtggcttgcgttttagggaagaggaaagctattttccgcgcggctacaatttcaagagcatgaaacatttctgtaataaaagtttcttggttgtataaatgttaaaaatgcctgctcaatgtatttatgtaattttgttgtttttttggtctacatcagaaagttcccctaacattatttgctctcaattttgaatatgacacttgttatcatcaaaatagtgatgtttatataacttaacccactaaactttcacagcaaaaaacttaaacccactaaacttaacaaaaccagacctatgaaaacttcatgataataacacgaatttatttcttcctgttacttttggttattaaacaaaaagtagatgaaaaaaaaaaacaaaatcaaatttgacaggaacaaaaagaatggaaatttttatcatttctatttttataacatctaactgaaacaaaaatcggatgtacgtctcacttctcagaatccaaagaaagaatccatgaaaactcaggaaaggtgtaataattggagcacacccatcagttatgaatggagtaatccctcaaagcagatacttttcaaccacagtcctaccaaacttctcttggacatcctttggagtttcaatctggaataacacagaaatggaaacaaatttataaattcctaggttaaaccgagactcaaataactttacattatcaaaaacactcactgcattaagtgctttgaagacagccttgaccgtgttgtggggattcctcgacccaacaacctgacaagaagcaaacgtaagttatagtgaacatttacgccccatttggttggggaaatagaatagattcaattttcattccattctttggtagcagtttataggataacattacattccaatagaatgactattttaccattttgataaaatgactttttcaccattttggcagaaagatcattccatttaaaataggaggaaaagtcattctaatatctcaactaaagggaatatcccccaacaaactaaaaaaggacttcaaatttagacttgagaagaaatgctaattgaaaattggattctcagtttggcactcaaatgattacctttgatttgacatttttgaaacctgccaaatttaaaatggtttgaacagttcttccagctttcatacccgttctagtgggagcaggccaaagataaacctgcattattggcccaaaagtaagtagtataagttgtactgggggcaggaatgaaaggaattaatcaaaaaacaaagagagttaatataagttgaataacacgaattgcagatgctagttgagtattaccttggttttcttatatgcagtttgtactgcatgggcaattgtatgttcctcgtgtcgttctatgtaatgaagattctgaaaacatttctcatatgcctgtttgtgctaaattaattagacaacgaacattttgctacaagctacaaaatcggcgagaaaaaaatataataaatgccaaattaaaggtagtatccaaatcaacactttcaaagtaaagttacttatacaaggtccttgtaaggagcctacagacttggagactcttagacttctaaaatcacaaaagacacatcttgcacgaaatagctttttcatattatatattgaacaacaaaccttccaaggtcaactgaagtagttttctgttctttttagggtaaatagtagcataagtacccaaagttttaggttggtaagcggcataaacccaatgattttttttagtggcataagtatccaatgtttataaa

SEQ ID NO: 378286 - DNA, 6005 bp, Cannabis indica
ctctctctctctctcccctttctttccctccttgagaactaatttctaccatcgaatcttggtaatatggacaatcagcgcaaccctcttcttggtgttagctgggcttactactgccatggaaaggtaacaattttcttctccttaatctcggaaccaagactacttactcaaataaatgtagtctaggaaaatgtaatataggatttgcttgctcagtaatcctagtcgtaatagtagtaatactataacactagttatttctgtgttcctaatattccaaattaagataagggttgttaatatggttgtgtctatttgggtgatacagaatgttgaagatgagttgaggagttccctttgttatgcaaaactagagctcgatcagacaagggtagcattacaagatgagctaagaaagaaagacgatcaactaagtcatctcagagatctgcttaacaaaaccatcagagaaaaggatgaagtccaggaaaaatgccgaagactcatttgggagaaactcctgcttcagcaacagcaacagcaacagcaacagcaaacagctcctctttcaggaatttccagcattgatgatgagcccagaagaggaattgactctaacaatggcttctcttcttcagattgtgaagaaagcatagtctcctctccagtgatggaccaaattcaccaaacccagttgccatcaccaccagctccagctccagctccaccttccatttcagaggcagccctggacctagtctgtgacaaatcattacctgaaaagggaaagcttttgcaggctgtgatgaaagctggaccacttcttcagacccttctcttggctgggcctcttcctcagtggagacacccaccaccgccattggagtcctttgagatcccaccagtgaccattccttcaccaccaccaccaccaccaccaacaacaactacaacacaagtaatattccaccaagattccctcattaacaactttaatggctgcagcaacgccattaccaactgcggcagagtcaacaggaaaagggtcctctgtgatgggtctgattctccaacagaagccaagtaccaaagaattgtgcttcactgactcatatttctgctattacaaagtaatcatttttttacttcccaattctactataggtttgatagttacagttttaatacaacgaaaaagagaggttagtaaggctaattaaaaaaatatatatattaagttggggtattttgactgataatctagcattttgtacagaggtttgttctagtgaaccaatcccaaattaactcagtgagatgagtgaaagaaaggaaaggttgtttcatatcattcaggcccttcttgaagcggttgttgtgtggggattttgtctctccttttatttatttatttttcctttcacattttagtattttgctcctagatgtgaaacggggtcccttgatttttccaacaacatagttgtggactgtaaagaggaaaaaatgtaactttttttttttttgtattactagtttagtagtatgcaagagtttgttgtgttgtgtatctatgcaatgttgaaagaaagtgacagaatcacttctaaacattaagaaaaataggtgtggagttgttgggtttggaagattggtgtgggtgaggccatcaaacataagagcttttgttttgagggggcctttgagcttgtcgggttgagtggatcccacaaatcagaatcaggatctgattactggtgtgatgtatgattatatttatataatttctttttctctatttttgaggggaagttgtgattatatacatttaagtctctaaaccatgtttctttttctgtctatttaatgaatgtataagcaattattaactaaagcctcttttctaatttcatctgcccccactctccaacttgtttttaatactttgttctacttttgaacctttattgctctaaagttgaaacaaatagtaagagggtctccaagttagcattacgtttcagtactgaaaaaaaaaaaagagcagtactgcactgagttgatgactaaaacctttaaatttacacaaatacaatgaaggaaacaaagctaaccttcattcatgttgtgtctttttcttttcacatttcatacgctagaccttgaaaatgaaaattttaactaattcttttacaatttaggcctttcaatgcaaaagttttatgtggcttctcgaatgtggaaatgaatttgttcttattctaacttctaaccctaatcattagtgtattattaatattgtcaaattaggtcatttttcattaaacccgaaattaccccccaattttttaactcactcccgtctctctccctccattcacctcgatctcttcaagagaaccgaactgccacgaccaccgccaccatccaagactatcgccaccatccaacaccactcgacccactaaaaaaccaatcggaccaaccctctcgactccattataattcgtctgagcttacgccaatctccttcctcaaacacgaatggagagccacctgctcgaagggagaccacaaatgcagaccacgaacaaagaccacaaacgcaaaccacgagccacaccaatctgacattctgtgttaatttttttagttttttttttcatttttccgagttggtccaatggtgtccgatataggcctgatatatgttcgatagtaggttccaaaatttacttttttgaggttgatggagaaggtctgatgtaggtacggtggtggtccgatgcttagtaatagattggtaggctttttatgtccgatatagatttctggtggtctgatgcttacaaactgattcgtgggcgtatttcgtgtacactaagggtctaacagtatccaaatgggggtccaacattatccgaatcaatacatgcataccccatcagaccaacattcggacagtgtcggacccccattagacacgaaatacgttcacgaatcagttaataaacatcagactgtcatcgaatcattatcagacccctatcgaaccttcaccatgaacctcaaaaactaaaattttagaaccccctatcgaacttatattgggcctatatcggacccactcaaaaaacgaaaaaaaaagagaaaattatagagaacgtcttcgctcgtgttctctccgttcatagtctacgtttgtgatcttcgttagtggaagtggtatttccattcgtggttgaggaagggattggtgaggtcggattgaaatggagcactctcggtcgatcaaattggcgtgatctcaattggatggtggtgatggtcttggtggtcgcggtcttggatcatgtaatgggatttcggtagatatttaagtgagaactagtgaaagggaaaataacgaacctttggtcattgaagtacagattgaaaataagatggtagcacggactatggttaacaatggggcttcctcaaatattatattcaagacaacctatgagaagatggggctctagcttaaagacttgattccttgcactcaacttgtatgcagattctccagctagagtgtatcaccacttggacaaattcacctaccacttacaattggacaagttccaaagtgcataattataatggcacaattctcggtgatcgatgtcccatcaacttttaacatcatgttaggccgactagccctatatgacttaaaatttgtcacattggtattcaatctatgcgtcaagttccgaactaaaagtggagtaggccgtgtaaagcgaaattaaaggatcgcataggaatgctacaaccttgctctatctatggtcaataaggaaaatacctccgggtagagtttagacaaggggaagattgcccaataggaactcgcccaaggcggggacgaagacatggatccccgacttagggaaacaaaacaaatgtcaggccaatagcaaaattagaagaagtggaaatcgatccagctatcctgagagtaaatcttgacatttttgcctggtcacatgaggatatggtcagtagtgacctcactatcatgtctcacgccctaaacattgatccaggcttctatcctgtccagtagaagagaagactgttagacaaaaaatgtgcacatgcactaatagaagaggtagaaacgctacacgcaaacaagttcataattgaagctttctgcccagcttgtgtggctaaccttgtactagtacccaagccaaataaaaaatggcgagtatgtatcaacttcaccgacctaaataaggtgtgtccctaggactgttttccactcccaagaattgatcaacttgtggatggaacagtcgggcatgaaatcttaagctttatggacacctattcggggtacaaccaaatcagaatgcatccacctgaccaagaatagacaagtttccaaatagatatgggtctataatgctacaaagtgatgccattcaatctgaagaatgctggggctacatatcaaaggctagtaaacaaaatgttcaaaaacaagatcagacagaatatggaagtaaatgtggatgacatgcttgtcaagtccaagaaggctggggggcacatagaggatctggatgaatgctttaaaattcttagaaaatacaacatgaaactcaatccctgaaagttttccttcagggtcagctcgggtaaatttcttggatttattgttaatgctcgaggaatagaagccaacccagacaaaataaaagccctattggatatgaagtcgccaacaaaaataaaggaagtacaaagtttaactggtcagatagccgcactcaacagatttgttttaaaatcgacagataaatgcgttctcttctttaatatcctccgggataacaagaagtttgaattgatagaggaaaggaaaaatgctttctaggagctaaaaagacaactcgcaaagcctcttgtactctcaaaaccctcgaacggagaagaattagggatatacttggtagtcaccgaatacgctatgagcgtcgtcctgataagagaagaaacaatgtcttacatccaatctactatatcagcaaacgacttgttgaagcaaaaggtcggtatcctttaattgaaaagattacttactctctgatcttagccacaagaaagttaaggcccttttccaagcttatcctattcgagtttatgccgaccaaaccttgcgccaagttttgcaagagcctgatgactctggacggttactcaagtggaccatatagttgggtcagtatgaaataatctttcaaccccgcacgacagtaaaagggaatgctttggcagactttgtggtggaatgtaccggcaaagaggaagataatttaaaagatagcatagagctagtacatgagtccctactagaagagaataaagacaaacctatatggacattacatgtggacatattagccaccgatcaactttttggtgtggggatcgctctcatcacacctggggtaacctctgcatggagcaattaaatttgggttcagagcctccgacaacaaagcagaatatgaagcactcatagcttgactaaagctttctcgagaggtacacgccgaatacattgaagtctccagtgattcaaagttagcgctaaatccagtcttaggggagtacttggctcgtggaaaaaatgatggcttatcttagtaagatccaaggcctgctcacacaattcaagggttacaccctaaagaaaattctgacggaagaaaacaaaactgctgatgccttggcacagattgcgagtagcacggtgacgaataaggccaacttagtcccaatccaattcttggaggaatccagcatcacctgtgtggaaaaaatctaaataatagacacagtgccgaacttgatgatacccatagcaggttatgtcaacactaaagaacttccaaacaacagaaatgaggctcaaaagatgatgagaaaagttgcatggtaca

SEQ ID NO: 378287 - DNA, 4265 bp, Cannabis indica
aagactactttaactgtagatgatgtgtcagctgctcttttggagacagacagtatcaagcaaccaagtggtgtgtatcatactgatcaagctattgtgacaaggtcagaatcaagccatggtaagagtacatcgaaaggaagatatgatgacagaagagacaatcgcgctcatgcacgctcttcgaggaaagtggagtgctactattgtcacaaaaagggacatgttaggcagaattgtgaagagttgaccaagcatcttgaagcaatgaggaatcaagaatgcaaagacacatcagattctacaatgttgctggtgaaggctttgaaagtgactctgatgttctcattgtcatagctgatgaaaacttttctgactcttggattttggattatggttgttcgttccacatgtgcccgtataaggagtgctttggcacttataagacatatgatggatgtactattttgatgggtaatgattctaactctaaagttgttggaataaaaactattaaggtgaagatgtttgatggtattgtgagaacactaactgatgtgagacatgttccaacattaaggaggagcttaatctctttgggagctttagatactcgaggttgtgtctattttcacaatcaagaaaggtggtttggtagttgtgaagggtaagaaagagtagaatttgtataaattaatcgggaagactattttaggtggagctgagaaggtggagtcaagtcacaaaaggaatttagttagtgcgaaggaatgtgacaaagtgaagaagactccaattttagttaaaagttatttgaagaaagaagacatcagtgaaagattgaagaatgtgaagacaagtgctcaagtgaagttcaatgagagtatgaatgtagtgcatatatactcttattgatggttttagtagtgagtttagagaatttgagtcaaggtggagattgttggagtttgactcaaattatttatttatctatatttgtaaagttgtaatttcttttttggtaattattaattatgcgaaaaggaaaatcttgggttgccaacaggggcggagccagaccctaattactaggggggccaactattaatttttatttaaaaggatttatctattttgacatctaaaaaagtcttttagtccatttttcttttcataatctcatactttgtagttttctcgtactactcgtaatttttcaaaatttttgtatagtttacgataccgaaaaataaagtttaaataattactaccacacaaattagaaaaatagtcaagtgtgtaacaaaattttttaactttattttcggcactataaataattcagagttttctaagaatttacagataattctaattaaatataacctaaataatcatgaaaataatttggacttaaaaaatctcttagatacaaaaacaaattaagagtataccaaaacagtttagaagatgtaatatagaattatccaataatttgtgtaacatgtaataactaataaatataaaaatattttatttaacatatagtacacctcttaaatggtcgttttggtatatcactatctattttggtatatcaaagaaatttttttattctattttgtttttatgttagtgtacgtttgtaattatttagggacatctgaaaaaaaaaattaaaaattcaaattacaatgctataaagaagattaaaatattttgttgcactcatacttttttctcttatatgcgtggtaatcagttgtttaaactttatttttagtattgttaaaaggaaacctacctaaagttaaaagaaagtatgatgaagaaacttgacggatggaagatgaagttactctcctatgccggaagattaactctgatcaagtctgtagcagcttctatgccggtgtacatgatgtcaacaaacaaaattcctatctccacctgtagggaattggatgctattattcgcaagtactggtggctaggaaatgtgagtaaagattggtttctagcgctgaaatcttgtgacaaaatttgccaaccaaaggcttcggaggtcttggaataagaagatttgaagatatgaacaaagcactaattgcaaaattggcttggagtatagaacagggccaagataaaccgtggatcaaatactgctctcatgaaagcttttggagagtcaataagaaaggaagtgactcatatctttggaaaagcattcttgatgctcgaaatattttgctcaaggggtctatagcgatggcagaaagcggagatgcaatcgacatgtggaatcaaccatggattccttggatggattttgacgaatttggaagactcatggagagcatcagaccccggggttatactgctagaacattagcagatttatcaactgacaattcttggaacaaggaagtagttgtgtagatgtttggggaagagatgggagatgggattcttgacattccaagacttcctttgactcataaagataagctagtatggaaacagaaacaagatggagaattttcggtcaagagtgcttatgtggtggatcaaggtcatagatttgatgatactaacactgtttggaattggctgtggtattctcagttacatccgagaatctctatgatacttcggagattgctcaacagtgctctaccagttaaagagaagcttccattcttaagagagaaagattgtcatttctgtgaggctgcagtggaaaattgtctgcatcttttcaaagactgttgtgttgccaaacttttgtggttttctagtgtgttcccactaaggattgataaaatctctggtcaaaccatgattagtttcgtggaaaatcttgtagctactacaaaaaattcgggttttggaagaaaagaagtccttacttttttgggttgcatggttggtcaaatctggaaaactagcaatgagtgttcactagcgggcaagccaatcatcatggatcaggctcgaaagagaattgaagaggcttatgaagggtttgttaattttagttataccagtgaggaagaagtggttggattgaggactcaagtcacaccccatctgacccagaggagcattaggagattgaatgaagagagggcactatgcactgatgcttcttgggttaaaggggatgctggttcagcagtagtaatgctgaaggaagacacggtaggctggagttacaaattagctagagatagagcggtttcggccttggaagctgaacttaaagcaattcttttggcgttaaactgggctctcgaagaaggctggaatgagattcatgttctctcggactgcctacaagcaatccaagctctgaacaagaatcgatgtccttgagattggaagactcttagtacatctttggctatattagattgtagtagtaagtttaatttgtgtaagttttaccacgttagtcgtagtttaattgctgcagcggatggcttggctaaagaggctagagttgctagccaattagtcgtagtgtatcaaggggagggtgatccccatctattttcctattcaatgaacttttgttcttctaaaaaaaaaaaaaattctacttcaatataaattttaagaattcaaaaaatatatccaaacaaaatctttcgtttgtatcatatacaagaattacaaaatatgaattttattattataaagatattagtaaaaacaaacttataaaatggacgttttacttatattttttttttgagaaaaagcgttcatatcataaataaattcaaacgttatacctctcggtcgttacataatatattgtcaggtaaggaggacaccgggatagtcccaaacacctgatgagcaaacgctcattgggctcttgaaaactatgtctcattttggacgttttacttatatgcataactttattattatattagagatacaagaattagaacatgacattttctctttttattcgatttattgttaataaaataacaaataataataattttataattctaaattacagctaatataatttgctgacttgacaaaacatgtaatgttgcgaaaccaaattaaaaaatatttaacttcgaaatcacgcttaaaaagatgacaaactaaaattattctacattttcttaagaagctacgagattaaagtatatatagaagaaaattaaccacttagggctagctcaagtgaccataggtgggtgtgtgagtgttggagatcctgagttcgagtccca

SEQ ID NO: 378288 - DNA, 4018 bp, Cannabis indica
ctctctctctctctctcttagcctcacacaccactctctctcgtcatagagaattgatattagttccaatctccatcacagtgtctcatgagttgagaatacaatgtaatcagaaaaatttattcatctcgttaaatctataagtccactcttatcctgagtgttgagggtaatctagaaaatctggtgtggattcttcatcaatcccataaagctttagattggatgatcgaacaattatatgaaaagatacaaggtttctttgataggcatcaagaagtaaaatccttattccaagtagttagatttaatttatgttatattgtattgagatccggagtttaaggttcatatcaaatttaataattttttttaaaacctataatccaattatatgcttctgctgtgactctaatataaactctaaaaaccaacatatatcagagcagaaccaaagggcatgacaaattatttcattgacagccccacatttggtacaagccttctcaatgtccttttctcgatggttcaagtttgagttaacatgtagccaattaaagcacattctctgagagaaatttttgatcattagactaatagccagaccccaaataaacttccaccaccttttaatttcatggtatgacccacactcagctttagtgttaagcataactcaggttaggtagccactcttaattgtgtagttcccttgggggtaaagtgccagagttggtcatcggcatgttgagtttgactagacaccaacctaagaatctcgttaacatcatctgggtggaaaagtctatgtattaatggttcatttcagctcccatttccctaaagaggagtattaatcgttgagttcttagggacaatagtagaagtttgaagggagaacagatatgaataaggcatatattcatttattcgtacaatctggcttgatattattcttcattgaattccatgagccaagagattctgaccccaaataatactacgccaaatataggacttcgacttgagagttttgcttgcataatggatgagttagcaaaatagtaggctttgagcattctagctagcaaagaatggggaatggtaagcgctttccaacaaagtttagctaatagggcttgattgaagtcctctatattgtgaaaccccattctacccgtattttttggaagacaaagtttctcccatgtgccctaatagagttttttcttggtaatagaagaactccaacagaactaagcctcctttgtgtgaatcacatctgtagttcctttaggaaggaagaaaaaactcatgatataacaaggaagagcttgaaccacggatttgatcaacactttttggacagcttgagaaaatagactcgctttccaccttttgagcttatcatgcactttttgttgaatacattcaaagacttatttttttttgttgcccacaaaattcgacataccaaggtatttagtttgatagtgaactaatttaacaccaaggtgaattacaaggacagccacggtctcttccaacactttcttccccatacaaattttagatttctccatattaatttcctagcatgagagcatcatgtattcctccaaaatatgggaaatattgtaccttcctccatagaagcattgagaaatacaaggctatcatctgcaaaaattaaatgagacaaattgagagtatcttggctaaagagaatcccatgaataagaccaaccctttccgtttcctgaattagacaagagaaagctttcgaacaaatcaaaaaaagatagggagaaaggggatcaccttgtcttaagccgcgttagggaagaaactccttacacaccctcctattacggagcaccgaaaaggaaatgaaatagatgcaattgatgattttttgaatccggcgagctttgtaccccaaacactgcatcatggtcggaaggaaatcccactccacccaatcgtaggccttttacatgtccagcttgattgccatttttgttccatttcgaaaatgaccttttcttcaaacaatgaagacttttaaagccttatatggcattatcttggattagccatcccaatgaaagcactttgattttctaaaataaccttatcgaggctgactttcatatgattagcgagacatgcattttagcaatcatcttgtaactcacattgtagaggtttatgggtctatatttcgtcacctttgtaggcttgtcctccttagatataagacaaagaaggattttgtttatagtcctacagtcggtatcattatttagaatatccaaacaaatctgaataatgtcttgccccacaacatcctagtgggctcgatagaaaaggctggggtgaacatcctcaccgggggcttttaggggattcatttgatgcaaggtttgctaaatatctttagcagtaaacgactcaagaagcttctcattgtctgaaaaagacacccaacaagggacaaatcgatgaagttgattaaactccataactaccccatgatgagaagtatatagatattgaaagtacttggtaaaaaatatcttctaccatttcgagactgtcatgccacactaaattatcataacaaatgccttgaataccatttttccacttttgttttgtagcttgctgatggaagtaacaggtattacaatctccacttttacactaaagggctcgactttgctggcgccaaaagatctcttcttcggcaagttggttattaagaggtttttccccctgagtaagagctttccaatcttctggctaagaggagagggaaaggacgacaacctaatctttaaggcaggcaatgcgcacttgagactcttttcattggactttattacaactatctagacattggccacatctattaagcttattaaaaacttgactattctaggaaagaggctctccattcaaccaccagctttcgacattcctcattctaatgccaagcttttccgtaatgaaaccgagcattccatggtatctttgaggtcatacttttgttcaacgaggtaaattgcaataagagggggcaatgatctgaattccatctcgggagatgttgcatttttgctcccagaaacatattatgccatcacatattacccaagaactagtcaagcctttcaaagataaggttgctttatctgccattgtaccaagtatacttgttgcccgaaaatgggatctcctgaaagacgcagtcatcgatagcctattggaagttcctcattaaatacccaggtttttgccccctcatttcttctcatgagggcagataatgtcgttaagtccccgccacaaatctaaggatcatcatactttttatcagtcgacagaacatattccacgaacataatctctgatttagatcgggatttccacaataacctgtgaaacgcaaagaaagaccatcctcattactcaccaccaaatcaatatggcaacggttgtaagacaaaacccgcacatcgattagaccaagaaaaagtaatgccaatccaccacttttcccaactaaatccatgcagaagcaaccagtaaaaacaagatgaactcaaacccactccatatgaaaagaagaatccttcattttagagatgaaaatcacactcagaaaataatcacgcactagggaatggagggaatgaatagtccaagggttccccaactcttgggaattccaaaaaagggcaatcattgctctaacaactctgcacatcaaggtttatcgctttcatatcaccaagagagttcaaatccatgaaacaagaatcatccccctaaacatattgtccgttcacactctcctcagccttttcgttatctgccgtaaacaaacaaacaggttccccgcctgctcgttgtcttttccctcctttttgagccacaaaccgctttcgtttaggctgaccctttatctttggcacatcatatatatataataatatatatgtaaaaaaattaa

SEQ ID NO: 378289 - DNA, 3261 bp, Cannabis indica
attgtcaacatgtgtttgctgaagttttgtaaaacagtgtcatagattctgccattagacctggttaaacagtcagaatttttgaatctataagcccccaaagaaacagcacattcataacctcataatcatacattattatttataattaatacgacattagtgtaaaaggacagacctatctcggaatgatgtagctcgttccaagagagatgactggacctcatccaatttgtctttgacatatgccgtcaatatttcaggctccatagaaattccgaaaacttttccttgctttccaggaacatctcgcctggatatgaccacactccgacttgaaacatcacgtggaccaatttcaatccttaaagggactccctagaagagcaaagtctgattttgaggtgattgatgataccagtatgaaatacgtttgtacaaaacaaaagcatcacaaaaacagagcagtgtaacattttgctttttcttaatcaaaatgtgagttacaacttacaaggaaacaaaaccaacactgacttatggttattttcaaggataaggacgaccaaccttcatctcccagaaattaaatttccatcctggagttttttgttcggtgtcatcaagtttaactctaattcctgcaatttgcagaacttcttttacagatgatgcagcactgataactccttgtctatctgtgtctgacttccaaattggtacaatcaccacctaaataaaaacatccaatacacagctatgttaggttaaactgtatacgcatgccatgcttgaccttcacaaaaaatgctgtccagatatatctcattggattggcaatacatctcatgagcagcaccaagattaaattaaatgttacattgcatgggaaacagtaaatatcaattcaaaaatttacacagaataatcgatgcatcatatttcatttttctctgttgcatctaacctacaattacgtagttaaattatcaattcagaaatttacagagtaaccgatgaatcttatggttagtactacatctgataatagtcaaaaactgtattgttacaacagaatagtttatttttctctgttgcatctaacctaaaattacttagttaaattggttaggctaaaaattaagggtctcaactattattggctagcacagtaataaacataacaacagttccaatttcacctgtacaggagcaatccttggcggaagcattaaccctgtatcatctccatgggtcatgatgataccaccaacaaaacgagtacttatagcccatgacatctgccatacatgttctctttgtccattctcatcagtgaactgtataagcacaaatgtcaaaacatttcaacttaaaatgataaatatcataaatgaatatacccagagaaacaagtcaatctagagaaccagatttataatccatatacctgtgtactaaaggcacgagaaaagttctgcccaagattatggctagttccagcctgtagtgccttccgatcacccatcatagcctcaattgtatatgtcctatcagcaccagcaaatgtttcaacttttgattttcgacctgcaataacaggaattgcagtctgctcataagcaaattttatatagacctcaatcatctgaagagcctgcaatttcagcaatagaaacacattaagaaagcaagaatataactgcaactattgagctaggcaagacaataaaacacaaacctctttttctgcctcttctggtgtggcatgagcagtatgcccctcttgccagagaaattcaagagtcctcacaaagggtttcgtgcgcatctcccatcttgtgacatttgcccactaaaccaaatgaagcatacaaaaagaaaagaaaaaggttggtttaattccatacttcctcaaaactgtaagtaaaataaataggataacaaaaaaatgaacctggttaatcatcagaggaagatcacggtaactatgaatccactgagtaaacatgtgatttactattgtttcacttgtaggtcgaacctgccagagcctcaggaagtgcaacaatcaaagccaaaccttaggtcatagtttctcagttaattaaaatacatcaccttatctactcaacagcactatgaaaaaaaaaaaaaaaatctctaacagttaagcaatcaataatttaaatgacagtagctaataaggaggtttgcataccacaagcttttcttcaagttcttttcctcctccaattgtcactactgctaattctggactaaaaccttcaacatggctggcttctttctctataaacgagtatggtataaactgcacaatcaaaacatcaaacaacttaaatttaactagtgcccactaagtttccatgcttaaaattacaaattacaatacattattgtaagtataagtttaaataaaagccattatgcaacagccgcattaactatgagattaaattaacacgggataaagagaacactcacttgtgggaagtacatattactatgaccagtctctttgaacttcgcattcaaataatcctgcaaaacaaatagcccacgtgaattttggaattattaatcacaagaaaatggaaagtgtacttcattttatgttcagtaacagtaggtaaaacttcgatcacctgaattgcttcccaaatggcatacccgtacggacgaatgaccattgtccctcgaacaggaccataatcggcgagctcggcagattcaatgacgtcaagataccatgcgttgaagttcttcgatcgaggcgtgacggctcggtcctggactcggcttttttggctgtcggctctgttgcccgtctctgaggccgtgctctgggctgagaatcttgcggaagaaggaagaggccggagctggcggtgaggacggagaagagccgggtagcggacggagatggatggagagaagagcgaggtaagagacggtagtctgagagtgacaaccattttcgggtttgggtttgggttttggagttcggaaatgcagatgaagatgaggtttgactcatataggctgacgatccattggttattctaaaacgtgggcccattccttacttgtaaagagcataagggtgtgttaggtatcctatttggatacaattttgtaagaaaatgatcttaattttaaaaataaagttagtaaatgttattttttcaaaaaaaaaaattaagaaaatagctaaatataataacttaggtggcgtttggt

SEQ ID NO: 378290 - DNA, 2176 bp, Cannabis indica
atatatatatatatagaaataaagatgaaaatgaaaaggagggaattgttcagtggagagagagaaagttatagatatagatatagagagagatagaccggttctaacggagttattctagagagagaagaagaaagataattgcagaatgggctttttcatcttttctttcaataattggtaattaatatattgtgaagaagaagaaggtcattaaccactaaccagtgatgtaataaatgttactgggaaaacgatcaaatattatgaaattatattatttttttcggctttcaaaaataaattatttttcccgaacattgtatattcatataaatattttcaagatttttaaataagaaatattattattggtacattttaatattaaattttatggctaattagtaatttttttcgctgaactttgatatgtactaaatagtgcctcctaaacttttttggtcgttaaaaatttctcctgaactattgatattggtaaatttaaggatttttgtctaattttagtaaaaaattctaacatagatgaaatttcaagaggcatgatttagtacatataaaagcttgaggggcatgatttgatagatatcaaagtctggagaacaatcactgaaacagtaaaattgaatgaaattaaacaaaagtctttaaatttaacaatctcaatagttcgagagaaatttttaacggctaaaaaagttcagggggcacgatttagtacatgtcaaaattcagagagaaaaattactaattagccaaattttatttattttacttattgtagggttataaaaaatcatttactaattataatttttattaaatacctgatattaaattatgtttgtatgtagtcagtggaaaaaattgtgctcaaatctaatagaacaaatatggtcttatttaattggctagcttaggaagggacaattttgattgtttttaaattttgtttattgtgtaattttcagatttgttgtcagatcaggggaaatattttggaataatacaggttgtatttttaatcaatcaattgacgtgtaacttaatataaggaacctgtgtattaatattataatatatagtttcaaaaaaaaaaacaagagtagtgtataggagattatagacataattgtgtaaataatgttcaacacaaaaaatgtaggaaagatgttcaaactctaataattcaagcatgtaatctaaagtaaattgattgaaacctataggaatactttttatgatgaaatgtgaaaattcatactttgaatacacatactttattagtctattcacttccacagttaaactaaataatttagattccatcaccagctagctaaaaaacttaactattcacataataagtaaacaaaattcccctaaaagtttattggcataattgttattaatttttttgtaagatacaaaatcttttaatgaatattcacttcatgccaaaataacttaagataaataaaattatccaaaggtggagaatgtcgtgtagcgtttgtagcattatatacatttagaatattgccaaatcttatcacaaaagaataatttagaaaattttcatttaagtttttatgacatattcttgaaaagtctttcacaatctaattaattgcatgtattacggatcattctagtctatgaaattgaaatgatcgtctcttttctttaagattagctgtcttttaatttgaggacgacttttattaattattattctaacaaacccgcaacgtacacgtgtcacgtcaccatttgttatgactatcagtttcatactcgccgggtgacatgggattgggaagaaaggcgggtttatacttattatgcatgcgttggtgggtctgtctatctaacccattttagcctattaaataaggaattaaggattaataaaatatagttttttttatccaatcagctgtaacaactacctaattgtgtcttcaatttttcttttcttttctttttttggttatttcaatttatttttttttttttgaaatattgcaactattaaagggtaaatactattttggaccctgtgttttgtaaaagttattaattggaccctctattttgttaaatgacaaaatagattctgtattttttaaaatggtacaaataagaccttgaa

SEQ ID NO: 378291 - DNA, 6550 bp, Cannabis indica
gtcgtatgcatatataagttcaccgtccacctttggtctctttcaccttttgcctcaccatcagaaggtacctcaccatgtcatcatagacatttacatcctcagcagcacgaataacatccaggaattgagtcgcatcatcagcacgaataaatgactcaattgcatcactcactagtccttccctgagttgagcctttgcaacctgactccaaacagcatcttcttcaactcggaatgcaaactcaacagctcgttcaatgcttcgaatgttatccagtaagacattgacagcttgaacattcaagttaaacttcttgaaaattgcaaatgcttcttcaaagagttgtgcttccacagccacttctcccacagcaggtccatcgaaattatccagcctattgatgtaatccataactctagatggatctgccttaatggctgtcaaataagtaagttttgaagattaaagttcccactgaaagcagagttttgaagcacaatcttctcgagaagttcaatcaactcatggggtagatcagcagtcatgaaagccttaacagctgcagaaacctgctctgggctcttgctttcaggcaaagctgtagagacaacttgatcaataagttgtcttctgaagccattttcagggttaagaactttctcccaaagatcaccatccatcctttcaaccacatatctgtaagcaaggagcaaaaatgtattatcttaaagaactgagtggtggtacaagattgctacaagaaatgagaatgtaataatatcacaaaccttgcttgcaatttaaacaaagaatttttatttgtgacattaatgagctcgtcatcacactgtcctcgccgataagcaacaacagccaaggtaggatcacgtttctcacaatatttacccacaacacgagaatcatagtatgggttggtggtaaggaagtgctctgggttgttgttgctttcaataatgattttaccaagagcattgtggacatgcacatcttggcttccctcactcacaagatgctccaagaattgagtaagcaaacgaagtcgattcctagcataagacaataaaacatgagataccattgtatggttacaagtaataaacaagaatgccagggtaggaacaacaccttttctcgcattcctccacaaggggctctactggaagcaatgaccgtacagaaagaatcaaacctttgataaaatcttctggacattcatcatctagcaattgacccacaaccaatggtgcattcccagggttcacctatgagaaggcaaaaaagaaaaatcttatgactaatacatttatctaatttatggtatttggaaatgttaaacttgggctaaaaaaaataccttttgaacatatccttcaatgtaccgaagcatgttacttgtgtacaaatagtgggtgagatcagggacaaatccaaaacgatcacaaacattaatcagtgggcgtgcatctgggagcttggcttccattaagaaattctttgttttttcagggtcatagaaattcgactctcttgtaacgcgttctacttctttgatttgtccagttctagcagctgcttctatgtacttgaagtggatatcaggatcctcactgtcccgttttagaaaagatgaaaacaaaacttgtatttagctaatatagaaaacataagatgtcaaaataagcacataagctctcttaagaaaaatgttacctagagctcaaatatgaccctaagaaaaagtacagcccttcataagatttgaactgctcaaaaagcttaatacaagcatcaacacccaactgctcacaatattccttagcaacctgccattcaaagaaacgaaattcagtttatgcaacaaatatatctgttttaacaagacacaaaaccaaaactaaccacaatcaaatacctgaacaattatctgaagatttcctcttaaattaaccaataaaaggtccttcatacactccaatgcccattctcgtgaaagagtaccaaaaaattctacgagagactgcaataaccgattagttagtaaaaacagtcacaaattcctgtagcaagagaagtgagcataagactataattacctgtggctcaatagcatgtgtattcacaatgactcttttaatatctggcaactctgtgtaatgctgcattaaaggtaaattgttccagcaaaagccaattttaattaactaaacaagataacgatcatcaatagaaaagggttatcaaaagatatattacttgtagagctcgaacataaagaccacccttttcacaaagttgagcaattcgaggacgatcgtagtggctaaacattccattggccaaaattgcatcagctacatttgggaaagtaaccaaattgatttcaagaacctgtgtaataaaaaaaatgtcattagcttaataaacaaagcagcacacttaaataatttgtggtctcaaagagcaacagtaaccttagtttgcaggaaaccatgttctggtaaatttgtcttcaaaacatccaatagaaaagctgtagcctcacgaattaaattcctctggtgtacaatgaaaaaaaaaaacaaaaggtaagacgtcatctccttcacaatcttgtagtgctcacaataataagaccatatgattggttatacagccatggaaattgaaattatcctatgctaaatattccctgatgtcttctcttaagcctttcaaaaatctattagctatccaaatcagggatagatagttacacctatctgtctgagcataagtatatttagtgttctaagatgtctgtattttttaacatcaataggttaatatttggttattttgaggtactgtaaatctgattattttgtttcaatgaaagtttccaagaatgtctgcaataacaaagtagatttagaaagcaatgctcactattgaatctccttgaagatatcaactaaaataaataaacagcatacaccctggacataatacagagttgacacaaaaaaggaaaggaaaattttggtcatggaaccgaatttatatatagtacaaggtgacaacagtgaatgccaacaaacctgaagaaataaatctgttatggtgttgtaatcaacagggcaacctccttccatttgagacatcattaatgcaaaattaacagcaccctggatcccaaagaaattataacttatttagatacatacaataaaagaagcatatttatcagatacactagaatgaattaacttgtccaacaaaaagtattgaaaaaatgaaaagtggcaatgttagtggcagggagaacaatcccaaacacgagagagaagcaaaagacgacatagatgatggcatttaactccatgtcaaacttttgtttctttcttttaatataggttgaatatgctttcaaaccctgctgcaaggattgaaacatacttgcaataatgtatgcctacctgaggatctgtccgaagaatggtttgcaaaagaaacagatagtctggcgtgtacccaacctgcagagaaaagagacaaaattagcacagatctagttatgtatccttcagctagaattataaggtcaatatattcttagaatcattgaataagaaacataagcattacctgctttgaataaattagaatcttatcaaactctcttcgctcagcaaaggctgcaacaacttttggagttgctctggctttgatataaattttcagtgcaaggtcattgtccacagtctacagtgaaacgtaattagagcatcagacataaacataaaaaacatgaggtaggcattagtcgaattaaacaactaaattattgccaagggaagaaaacacaggaaagtgtaatttccaaatgctaaccttcacaagatctcctagctcctcactgcattctaacttgtcttctgctaaccaattttccaacaaattcttcttgttctggttcacaacaagacgtgatagctccaatgactcaaaagcattaagctttcccctggtcaatagagtaccaaaatactgcaaaaggggtggtgtttgcccactttgtacaggaacactctgcaataatgagactaagagttaattaccaatcataaaggttcagcatagcatggatgtgtaaacttaatctgttgtttagtaatatccaattccttctattcaaggcattgccaataatttgttttcaagtaattggatagtactggccacaataaggaatgtcgtattctgtatctttgacagagtttatctattctacacaacctaattaacaatctctttggatatacagaatagcaagttatggaatactttgacgccaatgtgacaataaaagcaaaatggagaaacctgaaatttggcaactgtatcaggagtacgaaggattccctgaggagattcagcagcaagttcagcagcttctttatacttcgtttgtgcaaacagttcttggaatcgctggacaacctgaaatcattcacaaatattaatttgtgatgaactaacaaaaggatgcagactaatcatgattttcctttgttcctacagctaggtggggcttcatgtatttattggaagagaaagactcaatcatgtcatgtatgaacaaggtaagatctagtcatgtgttatttattgatcacttcatactatgtgaatggatttatttcccctccatcaacttgatttgatagaaagaaatcatcagtcaagttaaagattaaatagaaagaaaaacacaccagattctcagcaccgggaagatttcctctttttgccagattgacagcaagctccaaattgttcaactgcaagaagtcatgatataaaacttaaatcccaaatatcaatcataatctaataccataaagataagccaatttgtgatacaaacctgcccactaacaaaaggcacaattgtttgttcattaacagtggccaataacacctgaccccgcctgttaattgcgtaaaatccacctagtgccgaagcctctgatgttaagaagattggatctggactgattctatttctgtaaactgcagtagccgtctccaaatcataaacgaatagaagcccaagcttggtgatgacgtagatcaaactatacttgtgtgatatctggaaaattgagcactaacaattaatattcatggtcctgaatactagggaagaccgcaaatataagaatctcattacctgcattgcaacagggaaatcatctgcaaaatctggaggaaagaaaagatctgcttgtttctttgtaaaagaaggtttccctgcaaataattttgcaatgttaaaatagaaaacaagatagaaataaattggtgatcaatattctagaccttttaaaaatatttatctttttgaatagaaggtgtgaataagataatactaagctaacctggttgggcaccaagctctataacatgcaactttgatgtaatttgcccagcattaaaagtctttgtcgcaaaggaaatgagagtagaaggattctcattccctggaacctgtttgaaaaaaataaatttgataattaatcaaaaaatatgcacttatgatatgcataccatgggtgaaaaaaaagcaagaaaatacagagagatgaagaacttaaataacgcactttaaattgtgcaaaagcagcagcatgagcttccagagcttgacttctctgttgctccacagaaaagagttgcatattccccttgaccaaattttgcctctgcaaacagagcagggaaataaatcaagtacaagaaataggacaactaaattgcatatccgaaggcatgaaaccatagactcagagactgcaaggcaaccaataaagtattaaagcatgtcacgggaaagttcaaaaggaccatttgaacgaaggctccttaacactaactagttacaggacaagagctcctttctattccaactgcatggattagatcattacaaatttaacatataaatgccaagaacatcatacatattgggttgaatgaggattccctatgatcaattgacacataaaatgcatatgagcattaatttactatataatgttactatatctaagaacatacctcaggggcaccaggggcaattccaatcaaaaccaaccacttttcagtagggtcacaacgatagtttattatctgattatttgccagattagcagttctttcgaacatcttcacaggttcagtctcacctataaggaagatattgtgcacataccagccaaatttttagaatgaaattgcaagacaaagcaaactataataataataataacaacaacaacaacaacaaagtgacaaaccttcaattgaccaatgatatactgaggtctgtgtaaccagacccaacaactttggggtaatccatttccaaaatacaacctacagaagtgcatggaggccgtgtgaaacaaaataaataaaaaatcatatcatatcatatcataaaatttaatatccaacataaaaatatgtcaaatggatgctata

SEQ ID NO: 378292 - DNA, 8154 bp, Cannabis indica
aaaaaaaaaaaaagaaaatatacgtatacacatacatatacgtatacttcacgtatatatgtatgtgtatttattatatattatattgttattcatactatatctttctcatatacaataaagagggttattcgcctcttgttcattttacaaccatgtcctcctctttcaatttagggctttgatgtattttcctatataatttttcttcatttcttcatttttttttgggtctgtatttttttttcacttccacacttgttgttctcatacccaatcgaattttacatatagttttttccaccaagtgtttccctcctaaaactcttgtcttgttttgaagatcattacagttcatattacgattcaaaagattgcatctacgtttctggacgatgctatgatctcactatgttgaatagtcaggtgaggttttgttgtaagaagatttacaattaagggtttgaattgttgtttttttgttggttatttatggcatttcagtgaaaattcttttgtgggtatttagaattgggcttgatttgtacttgtgtttggccgcattggttgatttatagctctagtgtttcttgatgtactttattatttggttatagtgaaagtatagattttgaaattaaggtttgtagagttgaatgcatttctttttttccacttgagagatcagcggtgagctagcaagtatagaaatgattgaattttaaactaattatgtgttgggtttgggaattgtggatggattctgagttttaagatgaagttttcaagtaatttaatattgtttgtgtttggaaaaaagtttctctctactttaattatggtagcaatttttgtttctaatgtgtttggtgatgtattaagtagggaaaagctttatttgaaacaagttattccatttgaattgttttttagtgttataatgttcatgattttagaaacaggaatatccatgaagcattatgtgataatgataatgatagtgatactgtgtttttttttttttttttcaatttaggaatggttgtggtgggttacataactgtggaggtgattttctgtgctagattgaaacttttatgataatataatggattgcaacaaggatgaggcagttagggctaaggatattgctgagaggaaatttaatgaaaagaactatgcttctgctaagaagtttgctctgaaggctcaaaacttgtatcctgggctggatggtctttcccaaatgctgacaacactcgatgtttacatatcagcagacaacaaaatcggtggggaacccaattggtacggcatactggtgccaattcatgggatgatgatgagacaattaagaaacagtatagaaagttggctcttgtgcttcatccggataaaaacaaatctatgggtgcagagggtgcatttaagctagtttcagaggcctggagtttgttatcggacaaggttaagagactagcatataatcataagaggaatttaagaggatctcaaccgaaagttcagacccaaaccgggggtccatcagcagcatccaatgcaaatggtcgtcaacaccctacaaataatgtgacttctaaagttaaaactcagcaaactaattctcggaaaggttccactccggctccttcgtttaagaagaatgatactttttggactatttgcaatcggtgcaaaacacattatgagtatcttagaatttatctaaatcacacccttctctgccccaattgtcatgaggcctttgtggctctagagaaggatccgcctccaaatgtttttaagcaatccaattggtcttctcgtcaacatccaaatgcaggacagactactgcgaatagcaacacgattaattttggcaagaactttccaggtactcaaaatgtggcacctgggtctgcgggtgccaattcgttcactaagtcaaattaccagtgggagttctccaaaacaacaggtgatcgtagctcggtagcaacatcctctgctgctgctcaagctgcaagtgtggttcaacaagcaagtgaccgggtgaaaagggagcgagaggaaaggcaatcaattgctgattgggagaggagtcagcttttcaaggatttaactaatccttctgataaagtagaaagaccattgaaaaagagaaactcggaaaacaatctcatgaatggttacaggggctttggtgctaatcaaacgggcacaggaaatggagtcgatggtgttggcagtgcatatgaaattagaaaagggaatgctgatatgaataagacatttgaaacttatggcaagtctaatagcttgagagaattgtcatatactgaaactaagattatgcttatgactaaggcgagaaccaaaatctgtagtatgcttgagatgtggagatcaatgagtgtagcagacgccgaatacaagcaaaaggagaaagataaagtgaataagaagcagaagaaggtggtgaaaggtgacaaagagagttcgagacatggtaactcttctgttaccagtaagagcatgtttctggtaacttagctgatggtgcagagacagagggagatgcccactcacccggttcaatcaatgtacctgatcctgattttcataattttgacttggacagaactgaaaattcctttggagaggatcaagtctgggctgcttatgataatgatgacgggatgccacggttttatgctcgcattcacaaggttctctctttaaagccatttaggatgcggatcagctggcttaattcaaggagtaatagtgaattgggtcccatggactggataggctctggttttaccaaaacaagtggggagttcagaataggaaagcatgaaagtactgggacattaaattctttctctcacaaagtcagttggaaaaaaggcctgcgtggagcaattaagatatatccccaaaagagtgaagtttgggctgtttataaaaattggtcacctgagtggaatgaaggaacttctgacgaagtgatacataagtatgagatggtggaagtacttgatgatttcagtgaggaacaaggtgtttctgttgctccactagttaaggtttctggtttcaggacggtgttccgtatgcacatggaacagaaagaagtcaggagagttcctaaagaagagatgtttcggttctcgcaccaggtcccttatcacctgctaacaggtgaagaagctgataatgctccgaaaggttgttatgaattagacccggctgctacccctttggaactgattcaggtgacgacagaagctaacgagttgccaccaacggagaatggcacaagagtggcagaacagatgcctccaagtactccaactagagaagcagacgaaaccaagaacattgcttccagaagtgaggaagcaatggtagcaacttcctaagtgtcccgaccttctctattgcagcttgtcgtactcttcgttccttcgttcctttatacacttttccactgctctggtgagtttcagtgctctttttcacgtctatgtttgagttggcttaataatattaatgtgatagttatttacatacgagttagttaagaagtcatgttcagtaaaattggcattagctttccaataattggtatttgggttttgttttgattgtttgataggaagagaaaaattcagaaactgataaggtcaatgatggatttgtggggttgccatttagcctgatttgtttgctcgaatcacttgatgaaatttatgaatagaaacagagcacctttcatatatacttttaaacaacaaaaccttttttttccctttctagctggccaactaatgcttgttcttaaatctaagtttttgatcataaattgtatcacagctgctgggcatttctagtgaatgaatcctgctggcttgttctctatttattttaatattttgttgtgtttttttttgatttccatgctactcatatatgttacgttaatttaaattgactatctgatttagattactgtaaaataatttcattagttttggaactttattaactacggctccttatttatttctgtatttctgctttgatatatagtatatacatatagtcatatttttatatggaatagaattacataaataagttctatgactaatctaatatataatacactgatcaatgtttacttaattaataatcagaatccattcaaaataaataaataaataataataatcagaattagaaattttgttttagtgtgccctctattttcttctctttgttgttcatatatacgtgtatagatataaattatgttcaatttaattgactttgtttgatttaaatcactgtacaataatatcatcttagctaaatattattttggactttttggtttggcaaaagttaacgaattggatcctttatttagttaaatgaaaaaattggatcttgtgttttctaaaatggtatgaaatagtgtttttatcaaaatataatttaataatagcctgacctggaggtgtatatgagcaaaactgattaaatttttttatatttggtcgtgctagaaactagcctcaggttggttatgttaaaaaaaaattgaccaaaattgagcttaagggtactattttgtacgattttaaaaaatataagatttaatttgtcatttaacaaaacagaagagtttggtaacttttgcaaaacatccaaaatggtatttaccttcgtatctttagttttgaatttgtattataaactactatttcaatgtttctgtatctctaattttgtgcaagtacgaatatatatatatgtaattattactaatttatttacatgtttctataataatactccaatgtgaaattaataggaggaataatttcaatatcacttaagtttgtctttgtttctaattttgtctacttttcatctgagcattgctatgaggccataccaccaaggtgtctagcacctctacgacgtgatatcttatagttggttagcggttctttataatctttattaaattaaaataagtgggacccgatattaaattgtaccaatagcgatgttacacctcataagggtgttaggcactccgggtgcccctttagcatttctcttttcatctcattttcttcagttaactctgacatccatgtggtttttgcacagctattatttgcctcaactcctttctccaaaaccccttgttgtgaatatgtagctagggctactctattaatatatagggaaacctccatcaattgattttgtttactcataaaaatgtgtgttttcattttttaaatagagttttcgcaatttgggttactgttagtcatagttgagtgctcatgtatagcaaccacacacacccacatggataaaatttacggaatgtgcaaggattaaacgtaatgacttgaaattcaaatggtctcatttctatgctagatgttacttaattttttatatgagtttattttttattctacctaagaggagtagctcaaatggtcagacatgtgatttgctctcacaatgtctgagattcgattccctcctaagtatctacgtaagaattgcgggttaggtggggatcctagtttcaaatatgtatttttgattctttcttacttttggtatttgtataataagttgaacaaagataggaattataaaattatgtatattctcagaaattgaacctcataagctatacgagttatttggtttattgaatcaattaacatatttgttgatggttaagatctttagacaatgaaatcgattttgatgttgattattgggttgggtttaatgaatcatttgtcgttttgtcgtttacctgtgcttgagtagcatgataatgaaacaaagaggccatttaggcttttgaaaaggaactaaatgatttggttagtaatttggtacttactgcatgctatagaaactggtcccctctgccttagagaaattagagtactttttccttcataattcaaaaaattacttatagttactttctataattatgctcattacagtttcttaatccattagtgtttcaatcttatcatcatgtctttttcaccatacatagctattgatcgtccttaaactaattactgattttatttatcttctaatctgttgaaggaacatccatgttacttatgattgcaattatgatttaggaattgtttactagttagagctgttttgtttagttagatagtttaatcattctaataataatttcagattgattatcgatcttctaatttaaatggttcatagctagcgaaaatgtgcttcgtttgccggactgctagatgctttttgaatggtgtgttttattttaagctaatcttttcttagactttatagatgttaaatgtttaggaccctgttttatagtagataatttaatttttacttgttcgttccttattaatttatctttattttatgcctcttctcattagagtgttgtaatgtttttgtaggggattttatggtcattcacacagaagttatagtttccatggcggctttagattggtctctttttgattgggcttccattacattttgtagagacttgtttgattttggtctctgatttctctaagagatccttgtattgtaatgagatagggtcttcgttagaggatatcgcaagtttatttatccgattttcctgaagtatttctaattcatgtttgacgttcggccataaggctattcatgaattggttgtgtatacattcaggatggatagtaaatttgtttggttggaaagtttctcctttttttttagatgtaatacaatccgattattttcaatgaaatttatgttcattgttaaaacaaaaaaactgtagtgttttcaatgtgcttggcaaaacttttgttttcacttaattcttcttttctcaataacgttaaccctgtaaattgtttgaataccattcaaattcaacatatttgagttttatcaaaaaaattccatggataactattagattttacaattatgaattattaaattaattttctctattttaatgacatatttgatttatatattgttatttggcactatttttttcctttttctttcatgtctatggaaattttatgtggaacatcatattttcacaatctaatagctcgtgtgacagagaaaaacaacattcgtgtaaaggaacattttccttcattagtcatacaaacatatatacatatatgtataaatttagacatttttcctgggtcttcaattttatataggtggaatggaatggaaatgaagaaacatcttttcttttgtgtgtgtgtgcagagtaggtatgttttcattttatctaatactcttacatagcctggaattgtggtggcaataaggttttattgtttatccatggaattgcctctggaaattgatacgagttaaccatatctattaaaaaaaatttaaagacataaacttacattatagggtttatgatatgtaatattgtgaactttgttgagaatactattttgtaaccaaacaaaactcctatttgggaaagttgtggttggattgaaggctagcattcatcattaggaaattaaagcatgtttgtggtagagtttgttggtgtggagtggacaataggccgtggaagagtggttaaattccttatagacatttatcatattggctccatagaatctcaaaaatccaaacaatggaaattaataaggttgccaaatcagaattattttgggtacttatgccgctatttatccttaaatatattaacatttgagtaattattttttttaaaaaatataataattgtgtgttgctaaaataataatataaaacttaagtgctttactataaacaactaaaagagtaatttgcagcaaaaaaacttaagtttaattcccagttgtaaataaatacctaaatttaatttttggcagtagtaatacctacgttataattttgaaactttttgtaggtacctggctgtaaaatgttaaataaattgccacgtgacaattactaattggtccaagtcattaaattttattttttttaaaaaaaattaatttaaatataccgataagaaaatgaca

SEQ ID NO: 378293 - DNA, 2376 bp, Cannabis indica
aaaaattactatagtttttttagttagaatttttttatcattaatttataaaatatgtaatattatgatttaattttatagacaaacatattacatataattataagtatataaacataaatttaaagaaaacccttaatgattcaaagaaaagagaaacttaaatataacggaagagtaccttacattattgatatggatgattttgtggtgattttaaggtgataattttccaaaaaatcaacacattgcgtttctctaattttctcagttgagaatagagtgactcttgtttcttgggaatcactactaatgtataacctaataattaagttattaattttagtattttaaatttagctgatcaataaattagaaatattacttaaagtatctaaacatttaactcataacactttaatatctaatgaccaacaattagtaaaataatcatttgcaaataaagaagcattataaagtatctatattgatttctttttctcaaaattttttaaagatttttttttttaaaaaaaaaaaggaattatataatttgaaaggaggtatgagcatttaggaggatgcatcgtccaacacgacatgtgatattattacctaaagtcaggtaatgctgtattattatatggggtccatataagtaattttctttttgtgaatagaatgaaaatttcattgatcaatcaaggctgcatatagccaataatacaatggaaaaaatgctcacatgactgatagtatcactatcaaggtcacaactttgttaccttccaatataattgttaatatatttagctaaattaacaatgacagaatccaccttctaataactatatataggagcctcaaagatataaatatatatatatatatttatatatatatataaattagtaaagagtgaatgaagctgttttgaaaaagtattgtatttgtgtacgtgtactttaaaatgcaatctgtttcaacaattaatgaaagaccagaaccctaaagagtcatcactgaccctataaaatttggaattgtctagattagtcattcatacattaactagaaacttctaacaatttgagccaagccccatacaaaacacaaaacaactatctaaaaaattaatagatgatagtaaaatttgttttgtaaaataaaagctagaattttctagcacataaggtcacctactatttctcatatatttaatataaatttgaaatcagtgggtgattgtgtgtgtacatatatgtaggccccagctgagagaagacaagtgtttcgtagtgagctacaaagggttgggtcagaaggtgccaaagtccttcgtctactgggaaacaaggttgagaacatggagaaacttggggccaaggctggggacatactccatgaggttcacgtagcagcagagcagctccaaaagaagattgatcaaagatcttatcttttagtcaactcagagagttgggaaattggaggagtaatagctaatactactattcatcatgaacaccaaaacatttctaatattaaggatcataataattttgggaagctgggttttaagtcattgagcgagacagtgcttaatctggggactaattataacattacatgcgatgatcatcaggatgagaaggaggatcatgatcataaatctgatcattatcaacaatatattaaaacgacgtcgtcagaagatgatcaaatatttgtgttgaccaaacaaacttcgtggccgctacccttgtcatttggtaataatattaatggtactactactgatcatgatggtgatgagggtaatcataatgatgatattgagagcaagacatatcagagcgcgagtgccttgtctctggctacatttgcttcacttttgattgagtttgtggctaggcttcagaatgttgttgactcctttgaagagcttagtgagaaggctggttttacagatcccatgattatcaccccaattgaaaacaagggcttattatctcagttattttctcataaattcattcggtgctttgggtttaaaagttgatgagatttttatatatatttatttaatgatctcatgtatgtagaacgtgctagccaatctgaaaaataaagaatcaaaatatgaaccaagttattgcatgtattaatttcatatatacttaagttgttcaagtaaataataagagaagagtttataattttgtgtttgtgaaatgtcgatgtaacactctaactagcttaggcgtgttacgtgatttttaaacgcactgtgcagcttgttgctaatcaacgaggtttacggaaatcgtgattagctaaaattttaatttttaattaaaacttatataatacata

SEQ ID NO: 378294 - DNA, 2126 bp, Cannabis indica
accaacaaacttacaaccacacaatattaatccactattatgcatttttcatatcactttatgtaaacgacggtttaacgttaaaaaaaatcttatttttagtcacaattaaatttgtagttatagtagaaaattgtgattaattataaattagtattcttatattgtaactaaaatgtacgtgactaaatgtataagtcacaaaaattacaatttattgtaactaaatatatttttatatagtcacaatacttgttgtgactaaaactaaattagtgacaacttatatgtcacttttactaacacagttcactactgcactggtaaaagtaacttttaccaacgtatttcgtaaactgcattagcaaaaatatcaaagttttaccacagcacatttatagtggctaaaatctaacttttaccagcgcatttatgcactgagaaaagtcatttttgtcagcgttttttcattttgtgctaacaaaagttttaatacaaacgttgatttgataacacatcagaagtaataaattctattttacgagcgcaatatcaaacttttgcttgtgctggcaaaagtgacatttctttgtaactaaaagtcacatttaatcaaaaacatttatgttgtgactaaaaaattattatcaaaatttaacaatttttttgtagcgtaatacttacaaatttctcaaaaactatacaatatataggcatcccataatatatatatttatttataatataaagctcgatatcatatattaattgaaaggtcataatatgtattgtttgagccaacactttaagggcaggcgtatacagttaaaaacggccaatagctagcctactcagatgtcttgtcacgatcgatctaactatataatttatacaaatggaataattaaaatgaaattttcaagaaagtttcttgccgtgctccatggtatattgtatgatttatatataaagcttttttttttttttacttactttccaaagaaaatgaagaagagaaaaagtagacattgatatattttaattttcaaccctagctttcacactgtttattaattaatcctatataccgttagttttttaaaccaaaaaatagacctaataagtaatagtcttgtactaaaatattattttacgtaccacatgcaagttttcttttccaatctgaaattttcatatcatttcaaaaaggatctttattctttacttcctacgtgtttggcaagctatagctagctagctaggcagcctactttcataaaaagcagttgaaaatttaaatactaatccttgataattaataattataacttgtttagtacgtatatagtttatatagtagtacatatatatgacctaacaacttgttctataagtcatatgattggaagagatatccatgcaaactgaataaaaatctctctttccacttctaaatatttatgtctctctttgctttattgaaaatatatatgatcaatgctcttgttatattgccttttaggtatatagcatatccatgtgtaagtgctagaaaaagatgtgacaatattggatattgtggtttagagcagacaatatattctatgtagggttttagtgggattatatatagtttcctctctcattggttatatatgtagttgtaattaactatgtcgtttagtggggagaaaggtaattatgtaaagatgaaataaaagtcattgtggtgcaatggtcttgtatgaatatgccaaaagtctatatagatatattattgtatcataatatattatacatgcacattacataccctacatatgtatgtatgtatatatatatatatatatattggttataagttagcacaatattgtatatatgtggacttggataaattggcattatatatgctataggatttagcaaaatataatttagccaatgaattaataagtttcaaaagttggagtgatattctagatcctactctaaagtcctcgttgtggccgaacttaataagcccagatggcatgaaactgtttgatcgtcgcatgactaattaataagaatgtagtaccttttactgcaaacataatagataattatatgggctatttttaaaa

SEQ ID NO: 378295 - DNA, 6535 bp, Cannabis indica
aaccaccaatttttacgaatcttgatcactctagcaacctatacaaaaataaattataatgcttgttctactatttttggaggtatatatatgcaccactttgtttaaatgtgaaagatattgtttgtatacaattaatttgatatgtacttgtattattatgctttatatatcgatatcgttctcacaatatatattataaaagcacactaaaaagaattaatggccggcacagagaagcaagattatttaccctaattttctattgtcatttagttttggcaaaagttctctagggtttttcagaaagcatcgtattataccattcacacataagaggatcaaaggagatataatagcgcattttcgtcatggaaaatgatatattgcagaattaagtaatatggtagcaaaatttttgtaaagcagttttgtactttttccaggaatggaaggctaattaaaagttatttaatttttgtgtggttgaagataatgattccttaagatgattgcaaagaatggggtcccatgatatatatattgtcagcagcatagagatatagaaaagactataaattttgtgaggtagtctcttcttgtcaatttatgtgacctcaaaggtcatattggagtatacttagctacgtctaatcacactctaattttattaaaagaaaatgactcccacggccacacatgaaaatatttttcttttgaacatatataaataaattataagaatataggttaagtaaaaaggtaattaataaagtaaaatcaaaataatctaactggtggtttttccttagttgtgctgctgcaattggtccaggttatgagctacctaactaggtggctaaggatagaaattatgtaatctatctataataaccaccagaaaggtatttcgttcatttagtagtactactactttggttattattcaaggacatagtttttttatctagataagatctgttttattggttactagtactttgaaaattcttttaaggtttatctagctaattagatattttatcgatcttgaccacaaatgaaactttagtgtccactaatttttagttatatattatctatataggcttaattaaattcgatattatcacattgttacctctcatcagatctatgtatagtttcgctttctctacgttatatatatttaggcagtgtgaaattatacacatctatatataatagcaaaatgaatcacatttattttattatataaattaggaagaaatagtttctgttaggattgtataatcagaaagctattgacatatatgtgctagaatcttatcctcagtcaaatggaaaagaaagtaaacctaacaagctagtaaagctaggataacttatatgaattgatttgtcattttttccttaaaaaaatttaattaagttcggaatgttattagtaatcgtggaaatctgaacaataataatgtctaattaacttgctaacctatctatttcaggaaacataacttatttgtacgcggaaagcctaaaagaattaaactcttcatttttgtgcattaaaattaatggccagagtccgtttgacaaaaccgatcaacaatttagatttttaggagtgaaatattcaaattttctctgcattataataataataattaactattattgcatataagtatttttaaaaaaactaagaacaattaccaaggaattaattaagtgttttttaaaaataattgtataattactaggtaatactgtaattattaaaatagtaattatcctatatcataaaatataaagtggtaatattacttatgaatttatttatatataaatatgtaaaatgtaggatatgatttgaaaccaacatgtaatacgtcattagaaagcgatgtggatgggtattgggttggccgttgttttcttacggtataatatatacaatcagtcgtagtcagccacattatatgtctcgatctgttctctctcaggacggatggcatggctgcgaatagaatgaaagaaaaacaaggttgatctacgtaaaaaaaaatatcagcatgttatgctctattttattttttctattcataaaaaataaaatcttttattgtttttttttatctgtaactactactcgtgtagggcccttcattaatcattgttttcacaaaacaataaataaatatcatttatttgatatattttttagaaattagctttgtaaatattgaatcaaagccagaatgagaggtttgagaagagaatacgggtgtatattattactatcatatatatgcagcattgaaaataaagtccacaatatttccaataacatgttagatgtatattttcttttgaaaaatcaacaaaattcaacaaaatgatatcaagttgcattgcgtacgtgttagtagaaaattaaaattttcataatttctttttttttttctttgcttacatatactaatacaatgattgagcaattaaaattagaaatttccattaaaaattataaatttgacacaactatatgtaaatcagttttaccccatataaaataaagataattggttgaaaatatttatcacataaatatatgtcaatttgacacttatataacttatgtatatacatatcatttgaaatttgagtgtgtaatagaattactaacatgaacattacttatactagttagataagcgatggacaacggaatagaaaagtattgcactaattaataagatgtctatgttaataagtacataaataattaataatattgatcccacaaatttgtataatttatataatcttcaaatgtgtgcgggtacgtaattatataaaaaggaaactacacaagagttttgtgttctatcctagaggaaaaatacatatggttcatctctgattttattattatattacaacaaacaaaagcgtagctcctcaaaaagtacaaaataaaagattaattaaatatgcgtataaactatctatagctgcagggaaattttatgaacatgattatacataaatatataggggtaaatatatacatacataaagtataactgaaatataataatgggccaatcaaactcgaaggaatttgaggccattctagctatataatatttttgttgctttgaaactacgtaacattcctatcaacaaaatctttttcccaatccaatctttacagcttatacatgatgaactatataaagtgtataacaaagtataattttatatgtctacatctatgtatataaatatacctgaaattttaagtccttgagggtggggtacgtatttcccttaagaataaataatgatcagcaaagcgaccctacgccgtacgtgatgacacgcgcgcagcagcagcaacaacagccactagctagtactattataattcatgttaatttcattgtaaaatgaactatatagtaagtacctataaattatgaataccagtgcattccgggcaattgataagatccccggaatagcccatcagatccccccaatgctccgagcattgtctgttggtgcaacgacgccgtttggttcgggagctggctaagcagtgaggctattgaagtcgattgatttccctcgcccatcgaggtggtcgttgtggcggccgtacaactatcatccagttgcagtcttttgcttgaggaagacgataagggcccagcagccgctgcttcttcatcgtccacaatctcgttgggccagtaaagaccgtgaatgagtgagcgtttgagggacatatttgaagaaggtggcaagagcagtgaagcatgttagtagtatttgttgtattgctattaatattggcatgatcattgcttagcattccatcgaacaggttgtggtcattttcgttcaacgccccataatttagtagtgtcgccgcctttggtagtagtagttgtagcttgccattatgtgggcccatcggatgaggtactggaatattattatgactgtgattgtgattatgattattgctgttcattggccccaacaactcctccatcgcttcttgatccctctcgtgatccatcactgccctattcgtgttgttcttcttgtagattcgacacagtacccaatcatcaagctatatatttcagtacagaagaaaacagtatggagtattaatcttcagaaattgtaaaatatatatcaataaaattcgaacccccaaacaaaaaatttaaaaagctaataataaataattactctgagagagtttttcttgttgcccaaatcgcaacctggaggaggtttgtttatggctttgttttcagcgagtctgtattcgtgcataatccaattggttttaatccctttcggaggtttaccgccatagaagacgagcgcctttttaacgccgaccttctgagatcctccagaagttaatacaggcttatccgtgccagttgccttccagtacccggacgtcgccgcccgattgggcctggctccgttcggatacttccgatctcgtggactgaaaaagtaccactcctgttctccaaacgtcgccttagctttaaaaatccaaaaaaaaaaaatcacacactaacaaaaaaatgaaaatacatgattcgaattcagaattcattgtgtaagatttcaattgagtacctggaagctcccatggatcaaacttgtatagatcgacttcggcgatgatagaaacagggagaggagctgagataaccttcttcttgagatagtgaaccacgagctcctcgtcggtcggatggaagcggaaccctggcgggaggtttggctgatgatgattctgtaattgttgggaaccggcggaggagtcggtgctctccatgggagagatgtaagtagaaacactagctagaagtagcagagtctgatctcttcttcagtgacagcttagggttttgagagagagaaataagaacgtaaaataagagagagatcaaaatattttgtattgagatggcgaaggcctttgtttataaaaataaatttatggagtttgggaaaaaaaatatactaataggatattttgattggggctgcggacgggtaattatttgctgcggcacgaatttcgacggactataattgggtaaccaataggacctacgtgatgtggctaaatagtaaattaagtttggctaaatatgaaataagggaagcgattaagggtgtaatgggaaaagtagtagaggtggttaggaagataggaacgggtgggtcgcaggcgatgggtacctgaccatgacgtgaactggaatgtgggccgttgatacgtgtaattcccaaagcaaccaggaagcgacacgtggggatttgaagtggtgggcccatctcacacaaattatttaaaaattaaaaaaaaaggatttagatggataagtgtggggtgggaaccaactttacgcctcagatgtcatgcttttgttatgcaaataccaccaaaattatgcaaagaggggccctcctccatgttgctcccactctcactctcactccctcaagccccaataaaatgaaaaataaaaaccaatttggacaccctattttagcctctgttgtcctcctctaattggccccataatgacatgtaataaataataagtgttccaaaattattttataaaattatagtagaattaatcaatcaatccatgtttaaaatctcatcaagaataacaagtatatatgtggatatatatatacatgtatttgtgtggggtcctaattggaatgtgatcctactgccaatttcatgaatgataggtttatatatgtattacttttatatacaagtggggtagtagattgggaaatgaacataattagctttgtctcctatttatattattggagttttaatttttctgaaaaatatgtattgtatttgttttgtgtgtgtatgaatttaaaactaagctagctagtgactaagaatctggtggtgattagaaattggatagttttatatgctcccatctctgttggaatataatttagaaacatatatatatatatatatttatatgtatatagaagggccaaacaagctacaaaagaatggattcatattcaactagattgctattgctcaggtagacagtacaactacaagaagcattaattctctataaagataaaaaaagagtacaaaactattgcctgaaattgttcatatcatagttgaaatatcttcatatataagaggcctctactcctttactaaattgatttgattacaagatcatgacagtaatttatatgggtatataatatagatatataacaggataaattatagctaagcttagctatgcagtatataatcaaacaaaacaatcagttcaaacattacacatacatcattagatgattatgataataatattcttaatgatctttccctggagttaaaccgataattattcacgcaaaacttttaatgagaacagtagcttatcagtaagcataaaccagaaga

SEQ ID NO: 378296 - DNA, 2837 bp, Cannabis indica
gagagagagagagagtgaaatgatggttatatatgtatgtacctgaaaaatctgaaattttgctggaaaataaaaaccgattcaaaaaaaggttagatagaatgaatgaaaatggtgaatggtggattggaaaaacttggtagtgaattgatttgagaatagagagaagaacagagagagagaaggttcttcctttttcagaaaattaaaataaaataaaatgaaatggaaaatgtggtattatatatacccaaggctaaggacagggctagctagtagagaataaggatgttctgccacgtggcgattgaataggaacttagagttaaaaaagtaacaaaaattcttttacggtgtccatgtccacgtggatcagtcaggtgcttgaggtttacgctaggttgccacgtgctcgtcacggacggagtacagttcttctcaatatgggttggatcccttttaaactaaaaacggcatgaaacaagcatatttggtatgaaaatatttgataccatgggcacaaatgtcatcaatcacaccccaaattactcaaataaatttcaaattattcatatatcaatatgttaatataaaattttgaaaatatatttggcccagaatctagttccacccgaaatactcaattgtaaatatactgggccgacttacctacagaagaacaaaacaagtatattatataataatttactccataaacaccctgtaatataaatttcacagttttactctttttaggtcaaaattacaaaaatatccctagctcatcaatagggtcttaacatgtcatttatcaaattaattcacatataataaattatataataatataattccatactaatacatattcaactagttagggttcgctaatctgtttctcttaatcttaggatattacataaatcgtgattgttttatacaatccaagattctaaatggctgtttaaaattgtcaaaaatagtgaagtattctcgacggttttaaacagtcaggtaacttgattagtaacggtcatcgaaaaaaatcaacttgagaatcgatgagaataaaccttttcagctaaaaagtaaaaagtatcattggagatgctctaatggattagatattttgttatagtagtgtaagtttatataacaatttggattaggtattagcttatgtaaggttatagaaaaaattttagttattccctatacctcacttaatggattagctcactactataaaattaggtttttatgactgttttaaaatatcgagtaaagtattctcgtcaatctctaacatcaacgcatattcgactgtcgagaaaactagatagaataggtgacagtagaaaactgtcgaaaaactttttcctgactatgcaaaattatcgaggatattgagcagtataattgaatgttttaaacagtcgatcgactatacccttatgcataataaaaaaaaatagggttgcattatatttttctctttttatttttctagcaaaaccagggcccgcactagtccaataatttcgatcctgccctcttcatccagatcccttcgacttcgaccctaccctcttcatccaatgattcgagtctcaagaagccttctccgtccaacgaagctctgaatcccaagcaaccctttccttccaatgaacgaatcccaaatagccttctctgtctaaggaagccccaaatcgcacgaggacaagaccgtgcgtagccttctttggccatccaacggagtaccgaatcaacatttcaagtgagaatgttgggagttcatagaggtgataacgacgacggctagggttgactagagttcgctggctggggtcgaccaggagcaatagattttttttccttctttatgttcgagtgagagtgagaatgagagaagaaattcgagagagctcaggactttgattggatttcatagtggtggttggtgggttcttgttttagggtttgaagatgagagggagagagagatgtagagagatctgaatgtttgaacaaaattaaagaaaaaaatgggtttttatatatttaacatggtattcccaaactgtgggggatgtcgttttaattcgttttgaattttaaatcgtgattgtttggcatagttagagattctaaacgactattttaaagttaaactacttggaatagtaaagtgttcctgatgattttaaatagtcacgtaactttattagcaatggtcatcgaaaaatatcgatttgagaatcgacgagaataaactttttctattgtagtggctctaccttttctaagtagtgtaagattatataatatttttgaatttgaggtaacaaaattacaaaactaatctaagttgcttcttttatttagaattataaggtctgttgttatttatttatctttataatataatgtaagatgaaaaggattagctatctaatagaacatgcttatgatcatcagccaagttagtctattttttcctacttatgacattaattcacacaataataaaattcaacaaatttattcaaactataagtagttatttacaatgtatcacctcgttcatactacttaatagcaatggtaatagatcagaaaaagatttaaatcaatccaattctattatcatatatagttagagcttccacttgagtaattattttgttacatatttaatttattaactaatataataatgttaatcatttgtgagctttgttatttgatactttaaggtgtctaacattatactgatgtaacactttataaatttacacaatttatgaaaaaatttaaagtttaatatttctatc

SEQ ID NO: 378297 - DNA, 2054 bp, Cannabis indica
aaaaaactgtaaaattatcatttttaccgtcagttcttacgccacctatggcgtcggttattagctaggaaccgacgccatatatacccttatggcgtctgttcctagataataactaacaccacatgggtatatatggcttcagtttttaaaaaccctttagcgtcgccctgatcagcgtcgatggcaaattttgccaaaaccgacactgaaagggcttaaattccgcctccaaagggggtttctgtagtagtgtgagaaaattaacattaagatcatcagtattgtaagtagaaactgagtcgaaagtcctttcgatctaaacaacgactgaagatgctagccaaacagaagacttccatgatacttaattaaatctgggtattgatgttgttctctctttagaaatagaacggaggcttcctggagttcacttgtgggtggaggaggtcgaaactaattatcagagttcagcaaaggatgtatggggcaattttaaggcaaacagagcaagaactccatcaaccaaacttgattttaatgaacccattaaacatggggatcaactccttactagagttgatgtggatgaagtagaaattgaagcttcgcactggcaattctctgtggtttgtgtagtgttgagggcaaacctaccttttcaggttttgagggatttatcaaatgtatttagggcaatctaggaatggaacatattgccaagatgcattcgggattcattctagttagtttcagagatgaaactactacggatttggttatagaaacatgggtcattcatttagataaaaagtcagtggttattcgaccttggtccagtgatttagattcaatgaaattcgtgcgatctgttcctacttggataagattaaatggccttgggttgcaatattaggggtagaaactgtattaatgcccttgtgagaactattggaaagcccatcatgatagacaaggttactcacaatagctcgatgataaattagctagagtgctagttaaagtagcaattgtggatgaacctccaccgagtgttaaatttcttaatgaaaagaaaaatagctaatggagaaatcggttgagtatgaatggtttcccacaacttgtactgcttatggaatcatgggagaaggggttggtttgggttcgtaaatccaaaactacttaggagaaagaaaaggaagtggtgaacactgctaaacctgaaactaattaagatggcaagatggataatcaagagaaggattcaaaagtagaaaatggtgataatactgatatggagaatgatacaaacactgaacttatagaggaacaaagaactgattcgcctattgatttctcaattcgtgatcctaatattcagcaagttatgcaacatgttggagattggatcactcccaacaaaactaggaataaaagagctaagtgttgtttggatttttgtaagcatgacacgtggaattcgacaagagaagccgagtcaatctttaactatcatagcgtacaggccagacttctgggaagggtacgtctgtcacaaggcaagggcacgtaagaaatcagtggtgcatgccaactcttgctcctgtgtgcagaaggcaaggtgttgcttctaggttcgaaaggacctcatggtagccaaggccctcctcgagtacctccatgcaagtagtggaaggactctgaacgagttttactccaattccgtgtcacgaaaggccaccgtccgtacttgtcagaccattgagtgagaacaatgcttttttggatacaacgtcaatttttgtccctcacatcaggtcatagtacgaggcattcacacctccatacctgccaattgcccagcgaccattcaagagagtgattcttaaaggaatgacctttgggttacatgtatggtatgtccagacagtccaagtcgtaccgctgcgcaccgcacaatggagcagccacctcccaaattgacggttggatctcttatagtagggatgttgggatttattttactaggatctagattactaccatgtatg

SEQ ID NO: 378298 - DNA, 5520 bp, Cannabis indica
gaaaaaagttttactaagaaaggctattgcaaatgatctcttgcatagtctagtacaaagactattgcaaaaagtattgaaatataggcctttaataggaattactatgtaaaatgtattgtactacaaatcactagaatatatctattagtcaaagacctatactttttaaactctctttcgcaatctacatggtcaaaaaagactaaaacaaagagtttgaacacgtaagtcttttataaaatatcaattatgaaaattgcagtacctttaagtaaatttatttaaaaataataaaaatcaaacgtataacaagacaacaaatgcatgagatgatagctaattttatgtgcatgagaaaatttacctttgcaaacccaattttatctcaattaagatgcatgtcaattgttttttttttttttttttttttttagaagataggtttctagattttaatggttaatgatatatgttgaactgaccctaaaactactaacgcaataattcaagcttttcaagttttctttcgaaatcaaagttatatcagtaaaatgaaatgcgagtaaaatgtaggaaacataactaccactatggctgaaagacatgactggactggttgagaattcggggtagcctttcattcctctagttgcaccagttcttacacctgaagcttgcctatcccggaagatcccccacaaataatatcttgaatgaaacactgcaaagcaatcgatctatggcgtaactacgaggtgcaaacagtagaaaagactacacaccaaaaaaaaagtacaacaaataaagattcttaataaatgaaggcttactcttatagtgaaaaggcaaaacataagatgtgaagaccaagagttctacgttttccaacaaagctctcatagcgaagtctccattgatcatgtcattaactagaatgtcataagttttgtcatctctgtggcagaatgcaaagatcaagcaaggaaagtaaggtaatgaaacaaagaaattataagatagcctgaaagtgtagagactaatactacctgtcttgtggcaaacaaaagagaccaacactgtgaatagatggcccccaatgctgaaactttatgggccaacaatgagatcgggtagataattctacagaaactaactctggtaataaatttctcatctcacacgctttagaagatgccaagttggaccaatgagctgcaactaaaactctgcctatacattttgactctatgttatggataacaaaacttcccctgtcaaacaaatcgaatcataatgttacaaaccaaaccaaatacacatcttcgtcataaatacaaaatgagaaggaaaagaacatgtattacctccacattggttcgagtagaggttgtggttctacatagcaattgtattctaacatatttgaaggatttgggtcagtaggagttacttcaatagttttcaaaggttcagcagcctctacactctcaacaagtgatctctgttttgtttcaaacttcggattgcacttctccttgttcttcggctcatcaccagaaggactaatagtaacgtcacgtattggcacctctgttgtagctacagaaccaccaacaaccttttcttgtaatacaattgaagacatcagaccagcgttggaaatttctacagatcccaccttttcaataaccaattcctgctgtgttttaacctttgtatcacaagtctcgttgttccctggctcattactagaaggactaatagtattgtcatgtattaccacctcttttgtagctacagaaccaccaacaaccttttcttgtaatacagttgaagacttgagaccagcgtcagaaatttctgcaggtttcaccttcttttcaataaccaattcctgctttgttttaaatttcggatcacaagtctcgctgttctctggctcattactagaaggactaatagtactgtcacgtattagcacctctgttctcgctacagaaccaccaacaggcttttcttgtaaaacatttgaagacttgagaagagagtcagaaaattctgaaggcttcaccttctttttaataaccaatctccctttttttctaagccttggatccttatcaggattcttttgcaaccagctttcgctaaagaaaccgaagtaacggtatcttttaagaaatctgaggacttgtgattagcagaaaatttcaaacgtttagactcttgttgatttttaagctttggatccctgcactgcttcttcctgctctgtagcacattattaataggcaaagaatcattcatgtgcacctgcgatttttctgcatgaccactattaacacttccttccacaattttcaaaggcttcaaaacactgacagcaaccttggaagtgttcagatgcttagtagtgtcatcttcacgaaccaacttctgtcgttttctgaacttctgatcctcattgtcgttctctttgcattgtagttcattataagaaggcttttgcaacttgttcttcgataccaagtcagagctaacctcattgttgttctttctgcattgcagttcattataagaaggcttctgcgccttgttcttagataccaaattggaggggaccttttgattcttctttattggaccacaaggacgattagttctaacagtgtctgattcttttaagacactggatggtgatggtggacatctcaatttatcaagaataggctgctttgctagatctggtttgcaatcctcgcagaaccaagttacattctcatcattaacttctggtaatacatccatgcaatagctataagacacagtagacaaacataatgaatagagtatccataggcttgttaaaataatgtgtttatctgattacaatgactgattaaaagaacaatgtatcaatgtgattctttatcattgtccaaaacaaagaggaaaaaatgcatgagattcgtttataacattacaacattcaaataatatagcatacccatgtctagcatattcttcacacttttcacagtaaatcaaagccgcggagtaccctttgtcaccacaaagctggcaaatggtcagctgtaacaaaataagaaacattgttactaaatgtaattccacaatatatattatataactatgtgtcacaatggaaatatctactaaatttctatggactaccatgaataaaaatcaaatccagtcatacactagcttaggcactactaatttgaaggtcagcatcatgttctattgaagtcaaacactttgtctcgcaacgtagttaaggcatctctaaacaaacaataagattcaacattttaaccagacaatcatatgatatcatcagtagtttcgtgataaaaattaatctccttgattcagtgttcaaaataatgtgaagttcaaaacaaacaaacttgtacatacctaaagacaataaaaacgaaatagccaaaatcaaattgagaagtttctaaacgaacactgaaatcgagttttgacttgtgagtctatttttgtgaatctgtggcttaagatttgtcaggcactaggttgcaaaaatcgtatatgcaagctgcccatttcttggtagtgcccaaagcttgtcttgcccacctacttatacgtgggtgtggagacgtggaacaaaaccaaaccggagaaataactcaaaggagcttaccaactagagtaacaccttaagtattttttcttagaagtgagtttcttgagagcataagtgagtgatttttgtgggtcatgtgtgcttcgaaaaagagatatactttgagtggaaatatgtgatcttccactttttattgctttttgtttaattttcttctactaatatgatcaacatcatcaattgccgttttttcacaataaagtttaaaatcaaaatcactaaaaaccaaatgtggctcattattagcaagcttcacaacagtggctatcttaaggttcatgattatggttttctacatgggccacaatgaagtaaacatatgacaagaaaatatgtgtaaaaattcttatttgacatgaaaattgaggtgagatacaaaatacacaattgcataaagttgattacacataagaaaatatctccaaaaggaatatgcatggcgtacaaaaacagactaaaacacaattgagaaattaaaaaaagatttcactctacactaacttcaccaacaatcccatataaaccatccaaaaaccccatttcactttttatgcaatatgtataaacctaaacccaaataacaacagtaaagcaaaagcattactctgaccaataaagatagaaatcaagaacttaactcaaaagaaatacacaaaaaacaaaaaccctttatcatgaagaacatgaaaaacacaaaattgaagagaatatagaaagaaaaacttaccattatagttgttggagaatggctcaaaggttggacctttatagttgagagagataagaaagaagaacccaaaagagagaagtgtcaaaccctgaaactgaatactgggaaacgtggagaggagaagtgaagcgagtgtttgaaccacttagtccactaacacagttgtacaaacaaagaaaccaaaaaccagaaaacgtgatggcgtaatttttgaataactgatcggtgaaatggaacaattaagaaggatatttgcttataagaatgggagttttctttaaaaggaaaaaaaacaatggactttctattgatattttagaagtgatttgggttggggttgttgttattaatgttaaaaaggacaccttgtcaatcaatgctaaaattaagcaatttcaaaaaaaaaaaaaaaaaaaattacacttactatatagaattttaagagttttttacgataaatataacacatttaagtttgatcaatttatatagtatttttttatttttaagtctttttatagtatttgatatatcatatataaatatatgtaaattagattttaaattccatattaaatgtttttatttgtttaggtagttttatttatcactgatgccgaaaaagtcgacggagtttgctaccggtgccgaaaaaatcaccagagtagcggtcggtgccgaaaaagtcatcggagttgttgtcgagccaaaaaattcatcagaaatggcattgttgttagaaaaatcactgaaaatttactaagaaactagttgtttccatttcacaaacacttagggcacgtttggttggaggtaatgaaaacaatggaataggaataggaataagaataggaatggtaatggaatggaataagagtaggaataggattaagttgtttggttagatttatgtaatcaataattgaatacatattcttatgtttggttgactatataatagaatggaatggaataaattaattttgaacaaaaataccattatttttaaaacatgatgaaaaaattaattaaatatattcaacttatatattatttttttttttaaaaaaaattagatattatt

SEQ ID NO: 378299 - DNA, 8248 bp, Cannabis indica
atatatatatataaacacacgatattgttcgttcattgtttctctgttttgactatgatctcactttctacattttcgctcccaatcccaaagactctctctccattattgatagcctctaatacttttctcctgtagacatgaagaaaggaggcttaacccctaatctcaaactcactgttcctcgcgatgaagtttctttcgctaagttcctgtaattctctctccatatatttatatatatatgtgtgtgtgtgtgagttttgaatggctgatttaggtttttcttttgatgacaggactgaaagtggaacgtttatggatggagatctgctcgtaaacagggacggagttcgggttgtttctcaaagcgaagttgaagtcgtaagatttcttttctaattttgaaaaatttaacctttttctttaaattatattttgatttcacttgtgttttcgtgatatggagttgtaatggagtacacgacgaatttcttagctaaaaatcgcgcattcttctctctcctgtcttttgaatcctttgtttattttatctccaaataaagaaatatgcctttttttttaatcctttttcccagccacctccgattcagccaaccgataatcagctgagtttagcagacgtagatactataaaagtcattggaaaagggagtggaggaattgtgcaattggttcgccacaaatggactggccaattttttgcactaaaggtatatgactgcatattctataaacattgatattgcattttgttgccttatacttttttattctttctcaaacgtcatttcctccctgttttgtgtactttgagaatattatctgtggattgtaatgttctacttcttgtcatgacgagatttttggactcgcctttgtttggtagagttcacctttagaatttttttgaactggataaaatggtagtgaagaacagaatttgaatctaatttccagagttactctaggtacggtgtatcctaattcatgctctctcagccacatagatctggggttgccttttaatagattgtgtaatagaggatttgggggaatagtctcatagcatatgagcccatttgacaaaatgaattgacgtctgaaggtagagaatgttggtttaagttggtccaggggtaactattttagcattctatctagttatgctatatatcttttacttttaaaggcttcgtggttcaggatattatcatggtaattcaagagtttgaacttcagccttttagtgaaccatttttggaagctaattgtgctggacttgtctattatattaacaatcctaatattccttttgttgaatttttagttttgtacgcattcttcattaagtcatgaatccggtgtaactgtttttattaatgtagccattatacttaactctgatgtttttctcttattcaggttattcaaatgaatatcgaagagtcttctcggaagctgattgcacaggaattgaaaattaatcaatcatcacagtgcccgagtattgttgtttgttaccagtccttttacgataatggtaccatttcaatcatcttagagtacatggatggtggatctctagcagactttctgaagaaagtaaaaacaattccagagccgtatcttgctgctatttgcaaacaggtaggatttaagtaaatcaattgtgaataaaatcttagttgtttcaagccaatcaattgaaacaggcttctttcttcaactcgttgttgtaggtgctcaagggtttattgtatcttcatcatgaaaaacacattatacacagggatttaaaaccttcaaacctgttgataaaccacaggggagaagttaagatcactgactttggtgtgagtgcaatactggaaagcacctctggtcaggcaaatacttttctcggcacctacaactatatgtctgtgagtaactttgttcatatgttttgctaatgtcccttttctcatttccatctctttttacttatgaaacttcatatgtgcattcccaacatatgtatctcactgcatctctgttgatatgttcaatatatttgtagccagagagaattactggaggcaaatatagttacaaaagtgacatctggagttttggactagtgttgcttgaatgtgcaactggtcggttcccatatataccagaagaaggtgacgtgtggacaaacttttttgagctcatggattgtattgttagtcaaccaccacctagtgcaccttctgatcaatttactcccgagttctgctcgtttatttctgcatggtaaatgctcacttttcatttttgagttttaggatggggagtgtttgaacagttacggaaccaagaggaaactcaattgaaatgtagctgtctttctttatttttttgctccagtttcgtgtaggttttgtgaatttactaattaccaatcggtaattttctatctcagtgtaaagaaagatgctaaggatagacagtcagcgcatcagctattggtatgtacaaagtttaattatatttgcaatgtatacaatatttagatcaatgagtgtaatagttaactagattcgtgctatgaggatacatggatctgacatctcttctgcttattttaaatgcaaaattcagatgcatcctttcgtcagcatgtatgatgacttggatgttgatctttcaacgtacttcaccaatgtgggatctccacttgctacattttcgataccataagagtaagttaaaggagtattccttaagtttattctcttccactccctagaaaatattgtaatgtgtgccctactgtcctcttcaatgttaaagatatgttgattaagagccacctgaactggcatcctattaatagcagggtttcgcgtgttctctttcgtgaattatggagaatctttgttgaagatttgatttagcagtctgtgggattaggatattaagtttccccaatcttaggattttcttacattctctgtttttcagagattgatagtgataattctgaagttgtttctgtttaggaaaaggaatactctcaattttgttgcaataacaacggtttgtagagaataagattgggacaatctatttaagaaaaggaatacttattatacatgtttttgaactcaactgtcataatgccttttctctttttttagatttccacgaatggagtttcaactgtcagtaacagaaatctcaagcaaacattcaaatgcagtagatttcttcctggaggagtaacttagcagtgtgaatggaggtttttgtgaccaaggaatatatgatttattgtattaacctttagagatttttcactactttagctagcctaaggcgcttgataatttttctagttgattggaactgcaaagatattgttcgctcctgaatttaagaagaaaaattcctgatgttggacaaacttcattgcccaacagcattaagctttgtttggcttcagaaaattgttaatgtaaaagaactcttgggaaattacaataaaaggagggagaatatattcttaacttctcataaaatcttatttttctttgtcttgtaaaatctgggttccaaataaagtgtaaattttcaatgggcattgtaaaatctgagttagcaaagtgcccggaattagcactgaaatctttactgattataatctctacggtttcttccattaatcaattgtggtttggcttgtatgacttattttcattatgatttaagtgttggggatatctctaaagtatttactgcccatttggttcatcattttgctacgattcaagatagatttagaccaatcattgcatataattactaggattccttgcctgacatctaggaaagcccctttctgctgtgcttgccactactgcctaatagcttttgttctgggaggaatagcttctcatattgcagcgtataggatctccccctttcaaaattggacgtgaactctttgtttttgtgatagaaagcgaaataggttacgttagattttatgcttgaaatttttttctaagtagattcgttcccatggttcgatcattcccagtaaaacgcagcgtgttcaaattttgatcacttttacacaagaaaggggcgctttccaaaaaaagcagtgacatcaccagagtctttccacttatacttgcacgagacttgattttcttcgctttggtagtgaatcacctactaaaaaatgaggcaggcgctttgaagaaaggaagcgaacccccttttcttgccggattgatgctaagttgaattacaaagttaatcttgtaataataattaaggctctcttttttcttctcacacacaaacagtttgcctcttttctggtgtgaaattttgggaacagagtcaatgtagtatcacagttcacagagagaaagggagatgaaaataaataaagttaaagtatataatatattgtaaaattgggtaggtatacattagtgttgtgatcacaactagcccagttttgtaaaaaaaaaaaattgaagggctgaatcacgttaaataattgttatttatattcatgtcattataacacatgtcaaaatcctgcaagagaagagaaaaaagcttctcttctctcaggtttttttcttgaattttcttacaactttcaagtccaccactataacgctaatgttgtccttgcttcccttctggagagcaagctttgagaggtactctgctgcagcttgagcagcaagatcaaccccgtggcctctttcgcccgacaagttatcgccatgctttttatgccatataaggatccttctccgggcaacatcacaagcctcctcatttgtcataacgtcccataaaccatcactggcaagaatgaggcattcgtcttcttttgctcgagaaacaaacatcacttctggatcaggaataatccatggtttcaagtatttgtcacctaatcatatccatattggatagtagcttggtcagctatggttttaaatctttcaagtgcaaactctaaggccataattgtttcagtgtaattatatggaagctaagtagaagcaaaaattcatcaagcacaggtggtttgacataccaatggatcttgacattgcaagaacaccaaaaactcgagaaccgttccactgtataactttgcctccggctgcttctatcctttcatattcatcttctctatctggctatgaagaagaacacaagaagaaaccaatctctataaatatttgaacaaaaaattaactgatagagctctaaaacaccacaactagtgaaaggccttactctatggtcaattgacaaaacaactggtgcttttcctcgacacaaaactgcccttgaatcaccacaattggccaccataatataggttggacaaataagtgcaaccactgcagttgaaccaactgtttcaggggcaacagtagcagaactagaaacctcagcatctactttggcaaaacaattagagaaggcctttttccacatctcctgccaactttccctcttacttccattatgcaagcctgcttttgcagtttctatctcctcaaccaaggctaaatgaagcctttgtcgacaataattagccacctaatgaaaacagtgtccacttataatgagaccaaattatagaatcctatcctatttacataccatgtaaaaatatagcatagaagatagtatgaagtagagtataagcatacctggttaccaccatgaccatcatatacaccataaaaatgggcagttgattgagttgagtagtgatttatagcatccaagttttggtggtcatcttctaacatttcaattgggagttgcatcaatctgggtacaactgcaagtgcatcctccatctctggtctccttccacagatagatgtgaaaccccaaaggggtaaacaatccaaatccaaaacattctgactactgctgtttgttattctatatggtcttttctccttagatggcaaggtagacataatacatgggtcagactcatcagatccataactgtcttttccctccaaaccaacctcaactactccaaccatatcttcttcctgcccatgttccatatcaccactgggtatgttcccagtggtattttcaaacttaccaacttcctttttagtgtttgttgttttgttcataatggaatcagaaaccaaatccagagatggagaaaatgagttattaacaaagattattattattgttattattacctttacctcttgaggtgaactcagtattttcaccctctgcactcctataactttcacttccaaacaaagggattcacatggtgtgtttgacttggcattgggattagaaaacagggatgctgtgtttgaaattaacttaaggccattaatctcaacttgggttgttactgttgagtcttcatggataaagttaccaagcctataaggtacagcaacaggtgaggatgatatcttcttcatcaagtctcttcttcaatgttattatcagtaatagctttaatgtaatgaaagctaaaacctttaacactgtttttgcattcttttctcaccaagatgaagattaaagatgttttagaaacattctttttctaccaagatccagttcaaataaaccagattaaaagattcaacctttatgaaaaactaataaacacagagacgtgaaaatggggttctgaaaaagaagctaattaaaaaaaaaaaaaaaaaacaagtgaaaagaaaaatctaggtgtaattgttttgccaaggtcagaggcaacccattttagcctcataaaattggctctcttactctcttttcaattactttcatgtgtatcaatcaaaccacccttcaatcaatattcaatattaaaaataaaaataaaatgaaaataaaaaagaaaggtgagtcacacctacttttatctaaaatatctctcagcccttaaaataaaataaaaaataaaattaattaatttagggtaggaggaagcaaagcaaacagtctcaaaaaaagaacacgtggtgaggcaggttttgcttaccgtttttaaactctggtgcaggttggtattagttgaagtgaccaagaagaaggacaattataatgttagataacttcgacacgtgtctctctatgattggcaacatagatttgttacaaaatgggaattgaccaaagccaaagcatctacacgtatccagcatttacaggaagaaaattttataaatccaaataaagaagaatcatatcttttaacatgaaaactgagacaattttttattattattttgttaaaattattaaaattaaaatagaaatgggataagacacgtaagtatacagatacatggggtacgtagttaaaatattacatactcatatttggtgtaaagtattttttagggacagaaaaagacaattccattgtctatgactcagcatcagcagctttagttttttttagtactagattatacttttgtttcagttcatgtttaaaaatactaaattagtactacaggcccatattttccttatttcttttcccaattagtagtgtacataattgaagctagatgactttaattactttaacaaaaaaattaaaagctagatgattttgcctctgacaaatcaaaataaattgtttgaaaaacaaactgattgttcaacatagtaagtagtgcacttggacaagttatacttctttcgttgataaacgtcaagatcacgattctaatatatatgcttaactaattagacattaatttctggttattattaagtaaaagataatctagtaacttgtttcaacatatagtccattataatagttttactttaattaatctaattattaactatatttaatcaaatcacatggctagaattagtcgtcagttgttaataatacttctattattttttttccgtcgagaacaagattttaatccatatgatgattagtcatcagttaataatattttaatataaatcttacgtctaaattagtcttcattatgaatgatacattatttatctcatatatatgacttgggttttccaccacacaccaaattaattatctaaacttgttaaaaataatagatttactataagaaatccctagaaataatatttattttgtcttccaagaaagttctgatttcatttccccacttctcattaaaaaaaaaaaaaaaaa

SEQ ID NO: 378300 - DNA, 7421 bp, Cannabis indica
ttgttatgaaggttttgggtagtttctactctttgctttaagtgttggttgaaaagaagcaaatgctttttcacttgctgttaggagcataaattagcttgtatatatcgagataaaggtgaaattttaccacataatggattaggcataaagtcccattaaagctcaaataagttcctttggctttatggatattttttttctcttttctttggaagaggtaataaacttgctttgccgccaagctcttctaaatactaaaagttctgttattatttcatgcatatcctttaaaagtgtgggttttggaggtctttttttgaaaacatgccatgtaggcactatgtgcaagctggctaacataacaaaaaattttcatttcagaagccataatactgttttatcaaaaattcatcctctgttttgtttatctattgtgtttcttagttaatgcaattttcagattcatttgtagcaggagcagcttgttgtttttttttttttttttatgacaactgacacgttttccttgactttcagttaaggatattgagcatgattttgatacccaagctgaggattgttatgttgcaatggaggcacttagtgaggtataccttgatattgtcatatgttatgataaaaatagaaaagagatctgcgccatttagtttttatttatttacttttgaatgaagaggaaataaaaatgggaaatgagctataatttctgctaagatttcatttatcaaaattgcttggaggtattttcactaccttttcttagctctctgaagctatttcattttgcttcctataggaaaaaaaacaccatattcttttttcagggattgggtctcaaaagtgtatttgttttgttttattattttatttacaggataaatgatatgagatgaatctaattaattcaagaacacaatggatacattctgtccagaaagatccccgaaaaaccctagaattcaaaatgatacccagacaggccccccccataaaaaacatttttctagactcctagctgctgtgctacatgacaaaattatcgaatacctaccaatcaaacccttcacaagtgcatttggttttgcttgtaggtattgcatgcactgcaacctcttattgtatattttccagactcttctcaatggttgtctagggcagttccaaagtcaaatcgtaaggaatttgtcgagaaggttgaagatatatttaatcagatatcaggtcctgttgttctgatttgtgggcagaacaaagttgaatctggatcaaaggagaaagagaaatttgtaagttaatttattaattgttttgaagcttgtatatgaatgactagaatgatgtttgtttcttaggctgatgtttttttctgacaattatactttttttgttatacagacgatgatacttccaaattttggtcgtcttgctaagctggtaagatgatggtgttttttcttttttttttttacttgaacttaatcctgaatttagaggttttttttttaccaaactaacttaatatttaaaataatgcattttaaagatacttctaaagtttcattacttacaaattttatttgcgattttgaactgaactattattattaaaactctttcatagagttttctgctagtttaaactatacagttagctatcataaacgaaaagaaaattgtttgatgtttttttcctccgtaagtgagggttcctactaaatttgggtggtcactcatggaagtgtgacctttgtctgcttttgaataaaaaagcttgtttggtatttcagatatttctgctatttgattcttgtgctgaagatcagcaattcttgtagctattgttgttttcttgtgtcaatgagttaagtttgattgaattttttcagcctttatccttgaagcgtcttactgagggactgaaggcaacgaagagatcagatggaaacgaaatatttaagctcttcacaaatactttgagtgtatatcctcccaaggtatgtgtctattatcttcttttgtaggtctcaatagttgaatagtggttagttaggaaaactattcctctttgtttttaaaacatcttaaaggtgtttcatattgaaaataacacagtacagactggtagaggataaggtatcctctaaagacaatgggcagaaaacataacggaagaatataactgaaggaaatagtttaaccagttatcacatcaatgtgcatacaatctaaaaggtgtttttaaataaaaaaacatgtctcaccaatcaaccacaacagtttttaaattgtttgtataatttccagaattcatgtctatgtgattactatacatatatatatatatatatttatatatattggtatcttagcaaaaatccttaataagattggattatttaggaatcaaataaattttgtatgtgtcaatgttgatgtagagttgagttgagaaaattaatcaaatgctaaacattttacatgattctcagcatgagaatgctgagaagttcgttactagagttacatgtcaaaaacatctggctatgaattttcaatttgtcatttacttaggatagtagatttttatatcaaatattttttatacaaacattattgtatatatacacaattgtttcatatatattttgtatgtgctttttgcaggaagaggatcaccttcgaacattttgtaaacaggtggaggaagataggagagttatcatatcacggagtaatataaatgaattacacaaggtactagtcctaaatttgggaacttcttatgtttaactggaattgggagtttcgacttgtttatgtgaagggacttgaatgtattagatttggtattttgcaatactctttatgggttcaatggcgcaattagctttgttattattattaataatgttattcttatttgttttttattgaattgcaggttcttgaggagcatgagctgtcttgcatggacttattgcatgtaaacactgatggtgtgatcttaacaaagcacagtaagatattactgtactattgattaattgaaaaatgtcaaataattttctttccctttttttcaacaaaagaaaataaaaatagcctattgctgttctagattcagtgagaggaaatacttagatgcttaagaagctttttggatttggtaatgaggataggattaaagtttgtgtttaaaaaaacacttgatgcaagtaatttgtgggattatagaatactccaacgtcaaaatcccatagggaaggatgacaaaatagtaaaaagtgcttagctaccttagtaaatcttaaggatacattcacatagtgattcagtgtatgcgtgggttgagttggtccaattcagtgaacaagtcacaaccaacttgaccaggatgggtagccatcagaaatgaactaatggtcttaagaacaaaacctttcagaacatcttctaatctggaaactactcctgaagcatgtaaacaatgtgtcatgtattatttattttaatttttcttgtacttttgcagaagctgagaaagttgttggttgggctaaaaatcatcacttgtcatcttgcccgcttccttccacaaaaggggaaagactacatattcctcgtgaaaggtatgtagtcttatttttatactatttgtaatactaaatacttatgcaagactgcacacctcacatagtcttgaaattgaaatcctctaattttgatccctctttattctgtaaagcattgaaattgcaattctgaggatgaaggagcaggaagctatatctcggaaaccgtcacagacattgaaggtatgtttcgtatccttttactaaatttaccggaaaatcattaagaaatattttataatgtacatatatcattacagaatcttgcaaaggatgagtacgagaccaactttgtttcagcagtggtggctcctggtgaaattggtgttaagtttgatgacattggtgctcttgaagatgtgaagaaggcattgcaggaacttgttatacttccaatgaggagaccggaacttttttctcaaggaaatttgttgcgggtattatatctttttctttgttgttcttggttgatataggatgatatttgttccttgtttttgtcagttgcttattatgtgaagctttatttagccttgcaaaggaattctactatttggacctcctggaactggaaaaacccttcttgctaaggcacttgcaaccgaagcgggagctaactttataagtataactggctcaacacttacatcaaaggtatgtgctccatccatgtaatatcttgtgctttttatgtagctttggatcgtgttcatattgcattaaacatgtgccagatgatactttggtgtctgcatatttttgtatgtactagagtgatgtactgttttgtcaatctgtgataggttgaaaaattgaaatgtcatattgccaatgttaacgtgaaaggactgattttacatttacttttttggatgaagaaaaccagaagcattgaagcaattgtgtactcatgtttttgtttgggagttgttataaacttgcatctttctgtgacagtggttcggtgacgctgaaaagttgacgaaagctctcttctcctttgccagcaagcttgctcctgtcattatatttgttgatgaggtaagctctttatctctctcgctctaaaagagattaattgtaaaaattgaagtgcataatgctcaattcgtattgcatacctaaaatttcttagggtttacacatggttggcattgttaatgcatttggttgtacatctgaagtagtttttgtaatctgctggtcctcctttttgctgtataatgttttgattggtttatatagtttgtttattatgaagagaaacaaaatttcgccttggaaaataatatttgggctctagactccctgatatggttttctttacatcaatattggatttgcgtaggtggacagtttgcttggtgcgcgtggtggtgcttttgagcatgaggcaaccagaagaatgagaaatgagtttatggctgcttgggatggattgaggtcaaaagatagccaaagaatcctgattctgggggcaacaaatcggccctttgaccttgatgatgctgtaattcgtcgattaccgagaaggtctgtattgttatggttttgttactctgcatgcatattgatgcttttggtggttttgtcatttgtgagatctgaacacgagtagacatgttttatctacttcttatatctcaacataacgcagatggtatggggcctggatcaggtgttaggtttatgaagcaaaaaccttgaaatgtttaccaagtttttgtttgttgtgcaggatatatgtagacttaccggatgctgaaaatcgtttgaagattttgaagatatttctttcacaagagaatttagaacctggttttgagtttgataaactagcttctgcaaccgagggatactctggtagtgatttgaaggtacgtagctaatttcatttctctttaatgtgattctttagtatctcatacttacaatattcattctcttctgtttctccgacagaacctttgtatcgctgctgcttatagacctgtacaagaacttctagaggaggaaaagaaggtaagttctttgaatgtttatgaagttaaattagaatacgcgttgtaaagtggctgcctgggaagtaagaacattttaaaactacaattaattaagtaggtgtttagaatgcttctttttttttttaattttgttttctctttacttttattgaactttgaatcggttcttttaggaatatttcaattttatgaattaaagacaagattattgtgtttaaacatttttcagaccacaatacttacaatttagctttatgccagcgtctcaaaatcactatttttctatgatttactctcattaatttcactagtacacaatacaaagctctgatttattgacatattttgggggattaccattagtagtgcaattttctaattcttgaaagtttttgttgtatttattcttgtttctcattttcaacttttcctaaatgtctgattgtggtttaattgatctgtgcccattgacgttgcttgaattgtcctgttataggaaagtataaatggtgcagcaccaaacttaaggcgtctcaatgtggatgattttattcagtcaaaagccaaggtaagataattttgtttattctactcgaatatatttattccctattatataattgtgtatattttaaagagttagtttttgcatgtcttgaggaattaggcctttggctaatccattttttcttcttctttattttgtgttgtcctctctactacaatattaacttcagccattctacagctttttgaagttaaaaaataagtaaaatggagtgactggaagggttcctctcttaggaaagaaatttgaggcaaacaaattagtgcattatgaagatttttttctctgagaaagtaattaataaaataaaaagctattgaaataaccttaatggtactcactttgcttagccatgcttgaaacataagagaacaactgattttgttaattgttttaacttttaagcataactttattcaaatgagacactgccaaatggttggtagtatgtgacctcgagtgaataagagtatgcttttgatatcatacaaaagcatactcttgggacccgatacacaaaaataggtggcgttttataattggttggtgatatttcctaaagcagtaacagtatgacactgagaagggtgccaggcaccaatagtacttttaaagtcatttgagttatatatatatatatatatattatttatgtttgtggaatttttgtgtataggtggggccttcagttgcatatgatgctacaacgatgaatgaacttagaaaatggaatgaacaatatggagaaggtggaagcaggcaaaaatcaccattcggctttggggaaaaataatattattgggtgttttttttttagaataatttattcatattggaaaaaaggggaaaaagacccaaggtaagtgatgggttgggttgggatatgtattcttagagaaaatattttttcttctttcatcctttttggacgggtgaaaaatctaatatagcctgcttgcaaaattccttgtaatgttaaatgtaggtgcttttatagcaaaattttccctctttctcttgtatattatttatttatgagtttagtgtattatctatttatgtttctggtttattaatagaggacttactttacaaaacattaaatcaataaaaatatataatagtaagaaaaaaggcccattagtaatttttttcttcgaactttgacatgta

SEQ ID NO: 378301 - DNA, 2560 bp, Cannabis indica
aaaaaaataaaaataaaataataactaatggtttaagttaaaaaaaaaaaaaaaaaagaaataattactctattcttcgagaaactgctagagcgtgtctactttataacataaaatatcgaattttcgatactacactgcaagattggatttcaaaatcaatgttttgtaatttcagatttgtaaaccctaaacctctaattttattcaaattcgaccatgtttggtgtggttttccccaatcgaagcttcccgatggacatctccgccttctcccaaatcgacactttccactggattctcgacatgaataccttcgtcggcgaggcctacgatcaggtccgcgagctctgcattttcctactcaatgacttcactctccctcccgacaaagctctcgctgtctacatccaatctccgggctgccctttcgtcttctgtggcgccgtcactcttactcgcccctccgccgtcctcaccctggcctggcctgaacccggtggctctctgacaccgcagcttcagattactggccccgatgcaccactgatgtcggctaagatcggagtgtcggtggaggagctagcgtcgctgccgtcgcttgacgtgacggcggagaagaggatcgagcggctggcgttgaaggttggggaaagcctgttcaatttcatgcagtcgttttgcggtgtggatgggtcgaaactggttgtgcccatggatatcttggatagatggttcaagaagtttcaggatagggctaaacgtgatcctgagtacctgaaaggttttgctctgtaaatttaagaattttgatattaattcaacttcagcaaaagaaatgttagtttatttttgttctccatctctctatttttgtcaatgctgtaatttttggtgaacttttttagaagtagaataagaaactctacttgtatgattttaaggaaaaatggtaggtttgagattcatagaatctaaaataatctacaataagcagaaaatctattatgatgcaaacaatgggcaagaactatcaaagttagatcatgtttgtagtcagttcattaagtaaaacctatccttgttaacaaatatcattgtccaagttcccatttgaatttccagcaaaaaaaagaagttcaaatttgaattggcaactttactgttaggattgggaataagaccgctcagtatgccgaagtaggcttaaccttctcttgcgtatgttcactcttccaaactccagttgtcacttatggtctccgaacgaatttattgaactataagagaaggaaagcggtcctgttcttctcatggacacttccaatatggcaccaaaataggttacttgctggaactggaaatatcatttagaactggaagaatcatttagaatcttccgtgcattactaaagtaatgtttgataggaagtagtgagagtaggatagaattggatggagtgattagagggaccggagattagaagggatgaagaggatggttgctgagagagaaaaaatattagcaaaatgataaaattgttcttttaaatataaatattagttactatttagaggaataattattgtattaatttttttctacaatcctcctaaagtcggaggttttgaattttttttctcccaccatttttccactctccttcactccctcatgctaaataagaatttaatctatcatttcatcattttctctccaccctctccattcttccttctctccctattattaaacatagtgttacattcagctacaaattattatagaatgtatgaaatacaattataaaataaataaatatagtaattatagaagtataatgaataaatatttgaaaatttcatatccatatagagatggtatgatcttataagatagtacaagagagttaagatcatacaatatgaataaaacaagtcggtaatgtattaacgaatgaaatctttaatatggaattaccaagtacagtttactatgcactatactttagtgcgtgtgattttgattcagattacacatgtagatagacatgcggtaaaagtattgtgtgtaatttgattatacatgactggaccgatatgtaataacatctttcatcaacatgcatttatcatgaaagagttattcatattacaacgataaccattagtaaatcagtctgaatcttgagtatacatgaactcctgtttgtgttcatcgagttctttgattcactcattaaagtttctcagagaaggtgattcttacaacttctattttgggagcttaataacatgagtgactagaaacatattatacgataatagaatccaagctttccgataggattaaatattaattctcttatagtgttaattctggaaatactaacagttggatctaaatttataattggattatagattaattggccacattgaattaatggttcatataattgaattatagattaactgttccaagtaagaattcagtaaatataattttatattgtcaaagtgtgcaattttatatttatagtggagtaataatgaaatt

SEQ ID NO: 378302 - DNA, 2881 bp, Cannabis indica
ctttgcgtggcctcccacgtctctctaccttcaattcagtggcatcaccctcaaccttcttcaattcagtggcatcactatctaccttcatcaattcagtggcatcactctctaccttcttcaactcgctacctgatgctaattgaccaagcacctcatttttcactttgcgtggcctcccacgtctctctaccttcttcaatttaccgacatcactctctaccttcttcttcaacccactacccgatgctaattgaccgtgcacttcattttccactttgcgtggtctcccacgtctctctaccttcttcaatttaccggcatcactctctaccttcttcttcaacccactacccgatgctaattgaccatgcacttcattttccacttttcgtggcctcccacgtctttctaccttcttcaattcacaagcatcactctctaccttcttcaattcacaggcatcaccttctaccttcttcaattcactagcatcactcactaccttcctaagttcactagcatcactctctaccttcttcagttcactggcatcactctctaccttcttcttcaacccactacccaatgctaattgaccatgcacttcattttccactttgcgtggcctcccacgtctttctaccttctttagttcacaggcaccactctctaccttcttcaattcacaggcatcactctctaccttcttcaattcactagcatcacacgctaccttcgtcaattcactagcaacactctctaccttcttcagttcactgccatcactctctaacttcttcaattcactggaatcattctctaaaggtggtctcttgcgcttatgtcctgagatcttatcaagaccaccatccaattgatctctattaaccttattctgttcggccaatttcttttcagacttatcaccttccttcgtctttaaatcaaaaatatcttcagacaccttcactttgtcaccttcaccagccaacacagaacttgaccgcagaaccctacgaacaactggcacttcattactcagctgttccgccttaaccttaaccttctttttctcagcaccaacaccatcactgtcaatgaatgcagcaccatccaccctcttcctcttcctcccattatcagctacctcatcaacctttacaaaactaccctcatcaccacaaagtccagcactttcttcaagcacctcattcacaccaagtccagcactttcttcaagcacctcattcacaccaagtccagcactttcttcaagcacctcattcacaccaagtccaccactttcttcaagcccctcattcaccaatgactctctctcaagctcaggaccacaaaagattgaatttttaaccttttcatcccctgattcagaactcacatgattctcctcatgtcctatactctcaacaacagcccggttcagagaatccttaccactctcagtcttagcataacgcttaccagatcttagacagtctttcatctctcctaaatccacacgaaaccctaatcgtaaaaccacccagtttcagttcaaaacaacctcaccaaacgaaatcaaaacaaagagaaacagttgctccctcgtcattccattcactttaccaaaaacaaaaaccccagttcgagaaatagaagggaaaaaaaatgcttcccggaacaaattaacccgaccctgaaaccgaacaaaaaattgaataaacacgaaaccagaaaataaaaatacgaaaaagaaaaagaaacccagatcaaagaacaagagtgttaataaaagcttacacaatgcagcaaagtctgggaaatcgcgtgatcctaaactcttttgaaaatcttctgaagtccggtgactcaatctccgaaatccgagacacataatgggtgggtttagatagaaaaagaaagaaagaaaaggggaaataataatatagagagtgagaaagagaagagtcgttgccgctgaaacttgagaatgggttgaagaatttagaaagttttttgagtaagcgtttttttttttcaattatttaattaaaatgttttatataattatatatttaaatattttgattggaaaaagagtagaggagtacatcgtagccttcgtaggtaggaagagagagaagtgagggtggccaagccaaggatgggcgggatcgtcaatttgccattccaatacggcctccgatttccgatttccctccataaatgtaaaataaataataaaaatatggtatttttttttataattttttctattttgagacccaaaacacaatttcgttggtcaccgcgtcacaacaacaacaacacccaatttgaaagaagtaaaagaaaagaaaacagaaacacatatacacacacccaaaagaaaatttcactatctatttgagaaatttaattatatatgcatgtattaggggaaaattaattcttgtactaatattaggggaataggtcaacttttcccttaatttaaaaatgtccttcctattttgaaaccctctactcatctctcttcccgcttttctctctcgctcttttctccttctttcctaaactgaaacgcaccaaatttcaagcccgaacgaagcagcccaaccacctcgcgccaccaacaaagttttccaaccatcgagtgccacccacgaagtttctccaaccatcgacaaccaccctcggaatgagaatgtggaaggttggttttattttttaaaatattatccatttaaaccctgaattatccattcaaacaatatgtagtttcttcgtattttttgtttattatttagtaaaaaattgagttttggtgaaatctgtatttttttgtgattttttttgtatatggtacgatggggta

SEQ ID NO: 378303 - DNA, 2734 bp, Cannabis indica
aaagatggttacatggcccttaaactagatttaagtaaggcatacaacaggattgaatggtcctttctttgtgcgatgctctctagaatgggatttgatgataagtgggtgaggcttatattttagtgtttggatacggtggagtacagggtggttagtggatcgcacgagattggactcattgtgccttctcgtagaatccgacaaggcaatccaatatccccatatttatttctagtttgtgttgaaggcttttcatccttaatttggaaatttgaggagcgcaagtggctacatggttgtaaaatagctaatagtgtcctgactatctcccatatgctattcgcagacaatagctatttgtattgcaaggcaactaatggggatgtctctcaagtccaataactcctggaggtatttcaaagggccttaggctaaaaagttaattttgagaaatcattagtgttttttagcaccaatacttctgttattgttcgtgctaatatagtggttgtgctgggagttgttcacgctgatgataataacaaatatctgggtctgcctagtactgtttctcataacaaaaatatgatctttggttatattatggatagggtgaaaaggagaatccaaagctggtatggaaagttattatcacggtcgggtaaggaggttctccttaaagtagttattcaagctctcgcggcttatgcaatgaacgtttttcaattgccaaagaaggtgtgtaagaatattgagatgaccatgtgtaatttctggtggcattcgaattcttctcagaaaaaaggtatacatcggatgagttggaaaaacatgagtaagcacaaggatattggagaaatgggatttagagatattcacgatttcaacctggctttacttgggaaacaagggtggtgtttattgactaaggaagatagcttggttggaagggttttgaaagctcagtactatcctcaaggatccaatctcttagtggaattaggctccaatccaagctacatatggaggagtgtccttgcctcgagagatttggtcaaacatggcattcgaattagagttggttagggtgctaggatttatgtcggcaaggatctgtggctcattcatgatgctaatccctatattacttctaatcatccagcgttggttaacatcatggtaaattctttaatgaaggtgggggagcgacggtgggatgaggagatacttaatgatgtgttgaatgattgagataaaacgctggtttggagtagtcctttgagtgacgaaacaaatgcagacaactggtattgggttcgtgagaaatctagttttttctctgtgcgtagtgctttccatctcttgcaagagctaaaaggaaactggaatgcagagggaaatttaggtttttggagatctctttcgcaactaaaaataccccaaaagttaagagtttcttatggcgtacttgttcaaaatgtctccccacaaaaacacagttgagacttaaacatgttcaactgaatgtggattgttcctagtgttatgcagtgcttgagtcatccttgcatccactagttacttgccctgtggccaaggcctgctggcagaaatgtgttattgcaacaggcacggttattcaagcatcatctactgcttggtttcaggatggcttaacccgttggtcaaatgctactattattgaggtagctatggtatgttggtcattgtggaaacatcaaaataataaagtttggaagcttaaatcgactaccattgaagtaattgtgttgttagctaagctcacctttgagaactggaataatgctcagacaaaatatataaccactcaaaacctggtttcaagagaggtaatagggcattagattgcacctttgtctccttatctcaaggttaatgtggatggcacaatttttcaaaaggcgaacaaagtggggtttggtatggtggcgagagattcaactggggtagttgttgaagttatgtagaaaagttgttgtggtgctataaaaaaaataaagattaatattgaaaagatttaagaaacggtttgaaaataaagtataaaggatatgatattgcttaaatagtatgaaaatggctcaaaataacataataattcttcccataataaaacttagaaaagtatgctatcttttcttaactagccaaaatacttctcacatctccctttcccttctctttactcttttctcttttctctattgcctttctttctttcttctctcattctctcaagttgagtggagtccttgagattttcggacgcaaaatctcacaccaaaatagttgtactagacccaaaagtcattgattttgcccatatttacgtggaaatcaaatttatcgaagaaaaagctcaaagttctataattttatggaaagatatgggtaagtgcactacgaaaatgatgacttttgccgactttgttaagtttttgtgccgataaagggtatgttttaccaacacattttactacttgcgtcagtaaaacccttcatattttggactaatcttccaaattttgtcgccgcaaatatgtgtaacatcctaactatcttaggcatgttagcgtgatttttaacttgatgtgcagctcgttactaatcaacgaggttatcgaaaatcatgattaattaaaattttgcttatttaattaaaaacataaagtaacatacatataaaatt

SEQ ID NO: 378304 - DNA, 4296 bp, Cannabis indica
tatttttttttttttttgcacacgtaattgtatggattgtacttagaaatgtaatgtgtctttgttcgaagtgatgagatgtttgctttttttttttgttaatttgcagtcatatgaagtcatgggaaagaaacttcagagggagaataaagaggagcaaaatgattttctttatttttaaaaataaactaaccttccgatggccagaacattctggttcctccaatgtgaatttttgattggattcagttgctgaatcagtttgctcaacagaataagaatcataactactactcttcttcgaacagcattcacctgccttctcagcttgatcagcaccagcttcagagacagcacagttattatcgggcactgttggtaatggtgtttgagttgtagaagcttgattggtagaatcatttagacgaaaatcaacattctttcgaagccggcaaacaaccatgaagtcctgaggtacaaagtgcaaaattaaaatacatgttaacttttataataggtaaagtcacaccaatccgattctagataaactagatagatatattcagcatttcaatagttcaaccttgcataagacatctccaccatattattattgatagaatccgttgtgattaattatggttagaaatccaagtaggcacactttaaactcattaacaatatataaccatttatggctaccaatgtttaagagaattgctaaaaggcattcgtggtgcaatcactattttgatttgtcatatcgctattggtacaatttaatattgagtcccttatttttaatttaataactattatggaaaatgattaaccacttgtaaacacgctatcttatagtgttgctaggcaccattgttacctaatagcaatgctaaatgtttaatcttttcccgtccctaatgcacttaacattactaccacaaaacctagaaaatttcttgtttctttccaaccacaagacctagaaaatatctttatggatcatctcgtaatcacaaaactaaacagttctataatttaggacagtactcgcctgactgaggagaggttcaggcattgaggccctcaagcctcaaggcaaaatcctgacacctcaccttaagggagcttcaaaatcacctgctcaaaccatatctatcaaaggcctttaatcaaggtacagattagaatataacagtaatagctaacaggcatccatgaattcgatttccacaaaatatttaaatgaattactagttaagactaacacaagattcctgagacaaggaaaacaaatgtatcactctataacaactttcgtactattgctacaagaaaggagagtttcctactaatacgacaacagaattgtcttcacacacacacaggaggagagtggtagtattgaatcagtttgcaaatgtatgatgccgtttacagttgctgttttgtaaacattgcatcttttgaaaaatggcaattcatcggccatattaattggtttaagaagttgggatgtgtagttttacttgaaaggaaaagcagggggaaactaggtgaaaattaaagatgggaaaaccataaaacatgtggaaactgctgtgataatgtcaacagtgaagtaatttttgtgcaataaatggcaaatagtttttttgataaataagaaacaaagaatcttgactgacccaaaaattaaggacttaatgatggagccaaactaaggaaattcccccagaactgaaaagggaaactctcaagtaaaaggctaaatccccttaaatatgaatatcttggctacagagaaaatgactaggccacttccagattcttcttcatttagtgtcataggagataaagctgaattactaaactaataggcaagtatagcatcttcactgaagaggttgtgtacaatgataaggtctttatattacccaacatgggtgggtagctcaaatggttagggatgtggtttgccctcacaaggtttgagttcaaatccctcatgaccgcctacatatcaattgctacagtttcccaatctccaaatgttgtagggttaagcagagacaagtactaaaacaatgataagctttttatatttaagatacagttttgaatcctgatcttggaggctcagttcacaaaccaataactcaatcttatccataaattgatgaggtctatatcaagaagatgaaatcaagtttcaacatcttgatgttgtataatgaaaagtttcccttatctccataatactttttggatcatcagaagtaatgatagataaatattagtatgcctagaaaacaaagttagggatcaagacattggaatctattctagactaatttagaggaaatgaagtttgaatgactcatattactaaggttatgttgccctaagctccctgattaagggtatattcgaagtgggacataataaacatgattgcaatttaattattcccaaattcttatacaattaatagtattacgaacatttaaagctctaagctccgaactgattgttagttatacaaactacaggaacaaaatatgttaagatacattaaacctgatacctacttgatattataccaatatagcagcctgaaaaatgactagtaagtaatactaacactaacaagaatacctgggatttgtcaagcatgcagtattcgtgcataatccattccgtcctttcccctttcggtgcacgacctatgtggaacacaagtgtccttttggtaccaataaatgttgaacccgacttaacattacgttctttaccagtggccttccaataacctaactcggttgccctcctactctgcgagccatttggatacttccttccacgaggagaaaagaagaaccactcgctgtctgatggaattacagacttggctagttaaaaatacaccaacaataatcagatattcaggtgtctaaactcggcaaaagaaattagtaacttctattcaaaactcttgatatatgcattgagcttaataatgttaaatgaaattctacatgtgttcttgtgtgcattgatcaacttgctaacaagtcctctatttggttagctaaacagttacagaggcagttgtaccctgttaaatttgcaaattaaatcatgtcattatgtaacactactgtttgatcttagagaccagtcattaatttctttccataaaatcttcaaaatactatttttcacttatttattgtatttatcatttgcaaaaaattatgtaccaaactttctcctattaagatagtcattcacccaactttatgatttactcttttgctttatatatcttttacgttcctatctaaaaagaaattactttaggaaagtaaagctctttatgtgataagcatgaattagctgtaaagaccacaatttaagcacagtagtattcaacttttaggttccaaatccaaacactaaaaaacaaaacaaacaaatgaacagaacgacaaggagaattcagtatccaatttcttcccaaaattaaataaacaaataacaactatgtcacgataccctaatctgaaatttatagagtaagagaaagaggtaaatagttagttagttagtacctggtaaatcccagggctcatacttccaaatctcaacctcagtaatgacctcaatgctcttttcggagccctccatctttttcttgaggtaaaaggatatgagctcctcatcggtaggggagaacctgaagccagggaacatggaggaagcagctatggagagctgcgcctccctggaagaagctcctgcttcgtccatggcggaaaacgacgagtttctctttaaacggcgtcgttttgtcgtaagagagagttatgaagagaaaccgtaataaagaagaaaagaaggaattggaagaaggggaaaatggtttttcttttttcggtgggaaagaggaaactgaccaaaaacaaatttaaaatgtaattgaagttattgttttattgcaatctactctgtttctgttttctcttttttactttctcattttttgtttgcgtgtcctaagcggttgcccttgtcgaagggcacgtcataagaatgagaattgctaaaatgtactcttcatgtcatattagtattaagtggcttttggcataaaatttaaaatgtataaaaaattattaaattttttcaaatcttgtattagaatggtctttcattttatttaaaaatggaatagtcattcaactaaaatagtaaaaaagtcattctattgaaatgatattttaatattttaaa

SEQ ID NO: 378305 - DNA, 789 bp, Cannabis indica
gggtcattgtaaagattattagtgtttagaagagaaaagaaaataattttgaataatgtgagatgttattaaaacctaaaaataacaatttgaaagagtaggaaatatgaggttttgtcacattcatttgatcaagagatatagaaattgccatgtactttaatttaatgcactaccacccacccactttgaagccaaaaatttaaactttgtgaaatatattacttttttgttgggtcattgttaatattattattatcaataaaaaaaaagacaatttgggagaaaaacattacatattttagtcacactcatttataacaatgtagtacttaatttaatgcactagacttggtaagaaaaagtcctttttttttggttgggtcattgtttatttatttaatattaagaaaagacattaacttgacacaatatgaggttataattttaaaacatccatatcaataaaaagccaaaaaaaaaagttgagaatttgattaaaaaagataatttgtggcgtaaatagttaattttaattatcgattacggataaatatttaagtttaattttttaaagtaataatacctaagttaaatttatagaacttttgtaagtacctgactattaagtgttaagtttttattcgtgttattttctatgagtatatttaaataaaaaataaaaatttaatgacctagaccaatcaaggactaccacgtggcttttgacttgacacttaacaactaaatatttacaaacggttttttttttccttttttgtaataatt

SEQ ID NO: 378306 - DNA, 2977 bp, Cannabis indica
atccctcttcatagtttattgaagtttcgccaattctccatttcggtactttcgtttttctttatccaattgttgttacttgctttaattgtttttttttttccttcatttatttgcttcatgagctttctggatttttggggtttcatggttaggtctttaaagctttttcttttgtttaatttcctacctacattcatatacacacgtatagatttatataacatataatatatagtatgcattttccagttttatatttcattttagattttgagtggaatgatttatcttttttgacattgttcttggaggtttttgtacgccttgggttttagcaagccttctgatttagataattttcatcaaagttatttatttttagtattcttgtgcgtggaatatacatgtaattacattttttgggtcctacattaaacaaggtgggtcatttacgtttggtttcgtacaaactaaattgatccttgttgatttttcatttattgtgttagtacttgtgtgaataaaccctgtagatatttggtggacaagactcaagagtcaccaatttatatccatggttggtactgagaggagcaagatggtggtatatagctatatatagcatgtacacttgagaagttcagagtgggaaaatctttccctgattttggggccctcttgtactgttcttttgcttagtaaatctacgagcacttactttgaaattttcaaacagatttaggtttcagagtaaaataaaacctgaggatggcttttctgtattcattcactgctttgatagaaagctcgttgctgttttggttcgttgaaacttcatataaccatataatctaatttatcacccaatattggtgacagggcaggtacactaggttggctaagttccagagatggagcagtatgaagttctagagcagattgggaaaggttttttggttctgctcttctcgtgaggcataagcatgaaaataagaagtgagcaaccctctcatcttatgtatatggattaatatgattttgtaagagttactataaatatattgtttttcttttttgtatttatctttcttcataggtatgtcctgaagaagattcgtcttgcccgacaaactgataggactcgccgttctgcgcaccaagaggttattatgataatatgcccatcccttgttgttttaatttatgatactttcttaagaaatcaataaagataacaatgttttcttttcgttgtagtctggtgttcttattgttgaaggcaatgcttatttttgtcaagttattttgggaattaacaatgtggttttgttttagttatgattgcatatgagtaaagcattagtaattatgctactttctcttttggctcctcagtttccatcacatgttgaatactgtatagtctattatccttggttatcctcgcagattacttgatcttcatctgaaggccatgagatgtctcttttttgtattccaagtttgtttgacttgaagcttgtaaatctgtatactgtcataatttttgatggtttgtgcttctggtatttttagcaaaattttctgccatggtagatgaatatgatatagcatgtttactatgtgagatttatcttgttttccttcattatattggcagatggagctgatttctaaagcacgaaatccatttattgtggagtacaaagattcatgggtagaaaaggtgatagtctcactagaagtatttttcattctttattataaataagtaaccgatttctactgtgcaattttgcgtgtacatttcacatttttcctactctgtttgtgataaatgtttatatacttatatgttgtgttttctttcatgtctttcctagtaagcctttagataagttaaaatgagttgaaaacttgctagaaattatgtttgttgtgcaattgactcttggtacttctttcagggttgctttgtatgcattattataggatattgtgaaggcggagacatgtaagttattttcttagatttagtcagggtgtgtgtatattttttttaattgagaaaattttgatacctactatattttgatccctgtatctgggtaatttttcttttacagggcagaagctattaaaagagctaacggtgttcagtttcctgaagaggttgttgtctagcaaccttaatttttcactatcatgttttaactgcagtgattgcattacttaaaaataatttattttttgtacttatgactgaattctgcagaaactttgtaaatggcttgttcaactcttgatggcacttgattatttgcatgcaaatcatatccttcatcgtgatgtaaaggtcagtggaaaaaaatatgcggatttgtttagactttagagtacatgtatgggatccaaaatttactttgaatgttttccaattgtttcagtgttcaaatatatttttgactagggatcaagacatacgcttaggtaaaatttcatttaccttgtctctatcattggtaatttacaatttgacattactagtacccccttcctatccttcacacatcgttacactattctaaattgtatgtgctaatgactaatgtgttgagatcattgatggaatcaggtgattttggtcttgcgaaaaagttgacttccgatgatcttgcttcttctgtgagtagccaagattaacaaacattactttcttgctatacaacctccctatgactcttaatgttgatcttcttctgcgtgcaggttgtgggaactccaagttatatgtgccctgaacttcttgctgatataccatatgggtccaagtctgatatttggtctttaggttagctgttttcctattctgatctccagaaactgaaacatgagtgtaggctatcgctataccaatttcggtccctatagcttatatgcataatgcaacttttttttttctttcctttttcat

SEQ ID NO: 378307 - DNA, 3254 bp, Cannabis indica
tccattgatcaagagtgacctgagctaaattaacaacattctccaccacattcttctttgccttccacaaaagttagttatgcatataccaaatcgcccaacacaaaatgattaccaactacattccccctcataaaatcgagtaattaaagtcatgacccaatccccaaaagagccatcaacaaaaggaaccaaggctaatccaaccacacgccaacaactcagaacaaattgacaagtaaccaaataatacaagatggactcacttgccaaatgacacactggacacaacaatgacacctctatgtgcttcgacttcaactggaatctagttgtaatgcacccatttatggtccttacacaaatttcttcaccttaggtggtaaatgcagcttccaaaaccccatcacatcttgatccacccttccatccctctcctcttgtaaaattttgaacgagatcctcatagtgcgtaatcatcaattttctcaaactcccaaaaccaataatcttccataactgaattagacataggaatactaagagaaatggttgcctctattttagaaaaaaggtccttaacaacatcacaatcccaagcttgttccctaataatactgctaaccttgtcattaactaagccaggataaccacttgaaagtcttggattatttttttacaagaagcaaaggatctttgaaagtataaatacttgcaccatcatcaatacccttcttagcccatttgcgaagtaacttctcggtcttcaaaagactctgccaaataaaacttcgattgctcccgagttgagcagtgagaaaatattcattcttaatgtagcaagccttgtagatctgagaaaccatcgagttgggcttagtaataaatctccatgcttgttttcctaacacatccaaattaaaatcccaaagcgaccaaaaacctaaatccacaacctctttactgtgcaacatcctatcctaactcattcaaaaaaataccatgacaagaattagtagacgttccaccaaaaattagccataagttgctcaaggtcatggcaaatccacactggcaaaagaaatacactcatggtataagtgggaagactctttgccacattttgaaccatcccttgtctgcacgagatagaagctttccatcccaacttaaaatacatttcctcattttctctttcatgaaacccagcacagctgacttgttcctcccaatcgtacttggtaggcctaaatacaaacagactaacaaacactactcaacacattgcaactaaagaaaatagttgatttgttcaaattaatgttctactcgacacccattcaaaattgtgtaacagctcaaccaccctttgagctccagcattattaacttgaacaaacaaattaatagatatcattagcaaatagcatatgagagacagatggagtccccctagcaacacgagaccccctaagaagtagatggtgctcatatcttagaatcaaggctaaaaatctctcaacacaaataaaaaacaattaaggtgacaatggattattttgcctaatccctcgagtaggaataatgggaccaacttgatgactaccatgcacgattactgaactaaggataaacaaccagaaactcacccaccaattggaaaagtcaaatttctttaatatagcacgaatgtaatgtcattccacatagtcatacactttgctcgtatcaagcttcaaagtcaagaccccttccttcctagaaaccttgcacttcaagtaatgcataatctcaaaggccaccataatatgatctaaaatcaatcaccctggaataaataaagcactctgagtatcaaaaattacttgaggcaaaaccaccttcaattaattagtcaaaaccttcaaaataattttatacaccacattacacaaagagattagcctcaactcacccatcgttgtagggttctttacttttttggtattggggggggggggggaataagaaaaatattggtatcactaagacccatgggaaacacacctgaagaaacaacttttcaaccaccaccaccacctctacccccacaatatcccataatttttgataaaaacctggactcatatcaaccaggctatgagccttattatgatgtatttgaaaaagtgccttatgaacctcctctacatacataggacaaagaaaattatcattttgagctggagtaaccgaagcttgaatatcattaaatagaacacctaattctgcctcataagcttaaaaacgattttgaaaataatctttcataaattgcgaaagcacatcatctcacgtgacctaggcaccactatcatcccagagccttaaaattctatttgtttgtttccatgcactagccaccgcgtgaagataacgactattttatccctttctctcaaccaaaattgcttaacccattgcttccaaaacacctctttctgagttaaaatctcaaaaatcctcaccttgctcatatcagagttgtttcattcgaagcttactttgcttcaatttgtctttaaaatagcatgtgataccctttccccaaccggccaagaccttcccaaacttatcaattttctcaaacaagtttgcttgataattgtctttccaaacactccgaacaactgctcacacattggttaacgcaaccataaactctcatacttaatctgcttgttggaaggaacaaataactccaccattggtggcaataaaattggataatgatctgatgaagacatctcgagattaataagacaagcatctttaaacatgtccaaccaagcatgtgaaacaagagctttttcaagacgagcctctatccataaatatttcccctaccccgctccaaattaaatgggtacctagtgagctcaaaatcagccaacccacaaaagcatttcctgaaactccttcaacaaccaattaggatacacctgatctcctatcttctcatcattacttgcgacattattaaggccaccaataaaacaccaaagaagttgaaaactattcttaatactacaaaccaagtcccacgttttctgtctaaagcttcgactattaggctcaccataaatacccgtaagccaccactccaacatactcccaaccgtaacaaccaagaaaatatgattgttcaataaaccaagtatctcagctccatcattagccttccaaaacatcgtcacacatccactatgaccacg

SEQ ID NO: 378308 - DNA, 4677 bp, Cannabis indica
tctacttaagtatagcatatgttttacatttacgtaaagggtataataaggacatcatcagtaggtatatcttaaagaatatgagaataaaagtaaaaattaataggaaacttataaaaatagtagaattaggttaatttttatgaaaatactgtcacacggaaattttttaaaaaatattgtgtttttataaaacaataatggaacacaaaactaaataactaaaaacaacagtagaacaactaaaaaacaaccgtagaataaccgtgaaaactttacacactacacaagtctttttgaaaaaaattctaccccacagtataaaagtaaaataattaaaaatttcaatatgaagtgtaattattctaaattaaataaaataaggtggtatacaatccaattttctccaaactaaactagtgcggacgcgacttttgaaatcggcccaggcccacttcgaagcccatgtttgagtgtggcactttgtgactttgtcgcttgtagttgaccactacagtccccacgcgctcacttagggagtggtaccaaacgcaagcgccactttttggcaaattccttccttacctcgcactttggaagctattgccccacctcactctctcccctctcttctagctttcctctggttccattcaggaacttgttagagagagaaagaagaaagaaagagacaccctttagagagagaaagcttaaacaccccatttcgctttcatagttttcactttcctcttatttgtgatgctcaagtcctttcctttttagatataagataatatataatacaaaaagcttgagtctttagggttttctagtgacaagtttccatttttcttttcaaaagaaaaaaaaaccaccaattgtgaacttcccagaatcaaggtaggtgactagattacaagtttctaaccatttgtttattaagggtcagtttgaaactgaaacagcatcaacaattgaagaattggtattaatctgtgtttgaagaattggtgaagagctttttcatgggatttttttgggatagcaaaaaaaaaaaaaggttttttacatttggctttgtggaatgagatagagcaaagaggaaaatgtctcggattcaactccatattctccaaaaagatggttacatgggttactctcctccatttgttcctgctccatatagtggtggttttcataaagaaccaccaacaccaacatcatcatcatcatcaacaccatcatcatcttcatctggtacaaaaataagtcctgctgttctttttattattgtgattttggctgtacttttcttcatatctggtctgcttcacttgctcgttagatttctcataaagcatccatcttcatcagcttcttctcaatctaatagatacccagaactttctacatctgatgctcttcagagacagcttcagcaactcttccacctccatgattctggtttagatcaagcttttatagatgctttacctgtttttcattataaagagattgtgggtcttaaagaaccgtttgattgtgctgtttgtctttgtgagttttctgaaaaggacaagcttagattgcttcctgtgtgtagccatgcttttcatatcagttgcatagacacttggcttctctcaaactcaacatgtcctctctgtagaggaacccttttcactcctggctattctattgaaaacccaatgtttgattttgatgattttcaagatgatgtgcgttctaacaataatggtattggtgggtacacttcttctcagaaaacagtagagattgaagaaactgctgttgttaataataaaaagggtgttttgcctgttagacttggtaaattcagaaaggtaaatgctgaggaaacaacaggaggagaatctgggattggagaaaccagtagtagtaatttggatgcaagaagatgtttttcaatggggtcttatcaatatgtgcttgatgactcagttctcagggtacccttttgtactgatcgattaagcaaagcaattgaacaaggtaataatcctactacagttgatgatggagatatggagggaaagaagattagcagtgtaagtaaaggtgaaagctattctgtttccaagatctggctttggtctaagaagggaaagttttcaacttcaacagattcacaagctggtatgccttctctgaatttggatttgccatggatggaaaaaagtaccttaggggtatgataatatgagtgaatacagtgagaaagagagagagatagggagagagagacagaaaggtatattctttatttattttgtgttgttgtgattattattactattattataattttgaatcggttctcactagaagagtttggccaggagttgggttagttttttaattgttcttctttttgaaaattatttttgtgatgctaattcagtgattctgatgattggccttgtgccattactgtttatgtatatcatatcttgttcattgacacaacacaatgatacattactcttaaggcattctaatattaaatcttgatcaatgttttgctcaatccaaacttatatcatgatgttaaattatcattatatataatttggttgtctttttctttggtgtactactctacccttcttggcaaggagagtcttttatttccaaaagtgatgacttttttcatcaatggtgctgagtctgaatctgattacaaccaaatatacagaaccatgctgcattgcacgtgtaactaaactcaatagcatttacttgtttggtttcacattagttcacattcatataataaggtagtttgtttatttattggttggtttaacaattggatagaaaatagcacatggatgggagaatagaaacaaaagggtattctttgtcaatttgttcttgtttccgaatggtgtgaccttttttttgtatttaatcattcaaattatgagatagagaaagagaacaatagtcaagaagaaacagttgggtaacaataattttttgaagcataggtcttatcttccaggtttaaaaaatcttgacctcctgcaaatgaagacaaccagattttgtgtctaaaggtcaaagttgatacttttttagtttgtccatttccactccatttactttcttttcttttctttctctttttcaaaatttaccaaaactaataatatattatctctaatctccataatccacggcaagaggtaattaataagaagagggaatgcttttgcttttattgcctttaaaatctttcttttttacaaacccttttggaataatgtgaggtactgtgtttatgcagtgcagagggatcttttgggttggtcagttgggcagtcatggtgggatccatgaaagctatgtcacagcatcttttttacctctttaaaaaatgagtcatttgatttaaaatattggctgtaccaatgaaactgtggggccaaacaaaatcacttctttccattcacatgcagcaactcattcttaaaataataataaaaaaaaactaataatttttacataattttaacatcaattaaaatgattttcttgaatctagcgatttctcgagtataaaaattgtactcttgaatctatcaaattttacaatctctataatttttttagtcattttaaattaattttttttttcaagggtaaataaaatgatatatcattaatgggtttactttgttgtctcattttttaaaaaattattatattggttagcaaatgatacagattccctgttaccaaaacacaccaagaaagtaccaaacagatcttctttttccagcaaaataattaaaaaatatataaataataaaaatccagcagcagaggctttatcaaccaataatagatattatattttttagtagaaaattttgaagttgtaaaaagtggtctccaccatctctgatcttaactcaaaagtacatggtacttttgtcccattatatacagtgtagttattatacattacagtctactgatattccaggcccaatctacttaggcggctattgggcttgatgatggccctataacataacaaagcacatctttcttatctttactgtttgtttttttttttttttttattaatttttattttttttcttttttctttttttgtactgtgttaagtttttacagttgttacactattatttttttagttgttctactattatttttaattgttctgttttgttattatagtttttaaatagtatttttataaaaaattcgtgtgagtaaaattataaattttttgctcaaaattcagtatttttgtaaaaatttcttattttttttaatatgaaaaaggttggatttaaaagaaagatgtggacactaacaaatctaaactaaatcaatcttgaatgtaataaccaaaatcttggaggttgtttacagtttttagtttttagaatcgtgtttttaaaagttagaattttttatcatttttaaaaatttaatggtgttggcttaggtttttaaaaaatttttagattttttttactaaataacattaatattctctacaccataccatgacatgaacccatccaactttagactggatcccggacctagacctgaacgcgaatgctgatccagactcggactcagacccaa

SEQ ID NO: 378309 - DNA, 5868 bp, Cannabis indica
catgggcctggcgcaccctccaagcccagttcaatattttcatcagcccaacttaatattgcactacaacgccatatgtattgactattcttagtcaaaataagtatcatccactataacatgggccttgctcacccttctaagcccagttaatattttcttctggcccatctttataacaaacgaaattaggtcaacgccatgtgtattgactattcttattcaaaattaaacgcaaaggccataaatttagagtgtctccgctgttatagggttttacatgggaatgtaaggtattgtgaaagagatttatgagaaaagtgaatagaaagtttggccttaatttcttatgataagggtctttgtaccttataaaggtttgttttttattttcattcacagtactttgattatttatatatatatatatatatatatatattgattgacatttgtaatgttatcattgatgattttacggggatgagaatgagagtaacatggtggttgctgaaagagacagaaagtgaaagaaaagaatatgaagccagcaaaatctgtcacttggctttctctcttgtcctttttttattgtttgtatgtgaatgtaaagttagcatctttttgtttaagtttatatatgttaacaaaactcgatcacactacaggttgacacagattgatttaattctctcccccccttttgattagcttcttctccctctcttatatcccatatataatatataaagataacactttgtttaaacttatcacagaggtagagaaagtagacaatatgtgtactaacaataacaacaagggtgagaataaaaaatctaataagtttgaagtgtgtaactttggagcatgggctatgaatgtggtaagctctgttggaatcatcatggccaacaaagagcttatggctcctcaaggttttgctttcggtttcggtcagttcttcttcttcttcttgatcatttagtgtactaatttatttcatatatgcatagattttaaccattttggttatcttattatgatgtacagcaacaactctaactggctttcatttcactgtgacatccttggttggtttggtgtcaaatgctgctggttactcttcatcaaagcatgccattcccttatgggaactcgtcttgttttcggttgttgctaatgcatcaattgctggcatgaacttcagtctcatgcttaactcagttggattttatcaggtccatagatacaacaacacccccttttattttttgttcttgtcttgaaaacattagtatgctttcttttttctgatcttgttcactggtgtagatatcaaagctgagcatgattcctgttgtgtgcataatggagtggattctaaatggaaaacattactcaaccaaagtgaaaatggctgtagcagttgtggttataggtgtaggagtctgtacagttacagatgtcagaattaatgccaaaggccttttatgtgcttgtgtagcagttttctctacttctctacaacaaattgtgagtcaaaataaaatttcaatccatgttaaaaaccataaaaactcatagttttcacctcttatttttgtggtgttacagaccataggtaccttacagaagaagtactcaattggctcttttgaattgctaagcaaaacagctccaattcaagctatttcccttctaattctcggtccattcattgattattgcttaactggaaaatccataacaagctataaattttctcttggtgcatttgtaagtagacccttttgaagattaaacatatctaagtctctatcaagaataaaaatctcatattttctcttgtcttctttcatttactatgcagattttcatactagtatcttgctccctagctgtgttctgcaacataagccagtacctctgcatcggtcgcttctcggccacttctttccaagttttaggccacatgaaaacagtctgtgtcttaacactaggttggcttctctttgatttggagatgacaatgaagaacatactcggaatggtgctcgccattgttggaatgatcatctacagttgggccatggaggctgataaacaagctgctgcttcagccaaaagcctttccatcatgaaagaagaggaagatttgaagttgcttgtgaatgaaggaacagaagagagtttattaaaagatgttgagtatggtttgtctagaaaatagaaagaattacttcaaatttttttcttggggcaaaatggatttcattgcttgatttttatttattttctttttcttttttttttgacataacaaagatttaagtcacagaaaattcttgcctatatgattcaatcattcaaataataccaaggtagggatacatatatttttttttggagtatttcctcaatgttttgttgtgatgtaattgattcaagcaaaaagcaaattagtatcttgtgatttatgggttctaaatgttatcaattgacaataattattttttgtatcaatattgctcaactcaataaatcacaagattctctatggatttgttcacttgaaaaaaagcaaagtgaaacttttctgattttggactaaatgtgaagatggtgatgcctggttttgcaatacacccaattcattgtatttatatacaaataaatattctttctttaaagaagatatgcctttattaataataattagttaaaataataacttgcaattcaatgatcatatttttttattggaaatacggtcatgattataattaaaaaaacaagtcaaataatcaatctcctaattctcaaatcgtttaaaaaaaattaaaataaaattagataaaaaagattacaatatcacaattaaccttaaaaacatttatattctattcattcaccgtttagaagacacaacaatagacatgggcaacaaattcattcaaccttgtagcttgagtactcaactattagataaagtatgtaactgcactactaacaatctcttcaatcatagtgaacttattattcataactactaacaataattcaatgacaagccatcgaaaaacaaaaaataactaacatcaaataaaataaaattatgttacatagacagaactaaaacactgaaaaaccataatacaaagacaaaattaatcacattaataaaaattaaattgcagtagaaaaacacaatcccgccaagccgtaaggcaatattcaatagttataaatttttgaacgagaaactttaatttttttccaattaaaattaagtgccggcggtagttattttcagttaagatttttatttatagtatttatttcaatttaaaaataaataaaaaattgatttttaataaagaaacattatccatttctggttctggtggagtggataatgggagctttgggactctcatggcgactcccaaattctcagctttttcataaccctttgagattgagaccactgcctttctgcaccaaatcatcaaagttacaatctttaccattgaagaggaacatagagtcattttccttaaggccttgtttggccctttctaacagcacccaattccaaaaagaagaagaagaagaagaagaagaagaagaagaagaaagtggttccaatgacagtggtggaagtgggaattcgaatataataatatattcttgcttagtgggtcttctcacagggatcggcatcgttctcttcaataaaggagttaaacccccataataaagcttggatttttacttgaaatttacaattgaattctcattttaatagttgtctttgatttcaggttcatgaaattcgagacctgttctgggatgggcaaccgcatagaggagcttcttgggtgagagaggagccaattcaagatatatggaagcaagtggttcttgttccagcttctgggggtttgattgttggagttcttaacgaaattcgaaatggtttagttgatgatggtgatggattgcctagttcagtttggaatggtgtcaaggctgtgtctcgtccatttctcaaagcagttgctgcttgtgttactcttggtactggcaactctttgggccctgaaggtcccagtgttgaaattggaacctccatagctaagggagttggtaatgtgtttgataaaagttctaacaaaaagctttcacttgtggctgctggatcagctgctggcattgcctctggtttgtattccaatccttgtgaatacttttgatgaaatagatgttagaaatttataatgacatgatgatagttgcatataatttaaaacactatgagttaatgtagtactaaccgattatgtcatcctcaactaaacttcacacatatgctaagcccagtcttaaaatagataccatactttttgtttcgagaaacatgaatttgggagttgaatggtatttttagtttcttgagagagttaattagtgacccaatagataatttaaaacactatgagtagttcaatgatatagaaaatagatttgattgatctactgagataattgagcaataataaatattagtagtgtaatattaacgtactaagtcttctttcttaggtccctaaaaccaaagcagatcaacaatatataattgtaatgagaaaatatgtatttgtacagttaagagagacttcgaaacaaaatcctagttggactatgtttcagttaactagaaatgcccatattgatgctttaactaaacttcacatagatactaagccaattaactaattatatgggctaaaacaatgaagaattattcatcaaactcatattttaataaaacaaatgtaagtccaaaataaaggtgctatatagatagccccatactttttcttttgagaaacatgaatcttggagttgaatggtatttttagtttcttgagagagttaatcagtgactcaatagataaaattccattgtttttgtcatttggtattgtatgttgatttttattaatttaaagattataatcaatttttgggtacttggattggacagggtttaatgctgctgttgctggttgtttctttgctgtggagtcagtcttgtggccatcaccaactaatccttcttccttaacacttaccaataccacttctatggttatactcagtgcagtaatagcttctgtagtttcagaagttggtctgggttctgaaccagcctttacagtcccagagtttgactttcgttcacctactggtaaactatcaatatctattcaacattgaggttttctttgttgtgtacatcttttaactattagaactattctgttatcttttcagagcttccactatatctattgctgggagtgttgtgtggattggtgtcattggctctatctaagtgcacgtcgtacttgatggccattgctgatgacattcgcggtgtaccgaagattttgtttcctccattaggtggcttaactgttggcttgatagcactgggatatccagagattctttattggggttttgagaatgttgacattttgttggaatctagaccctttgtgaaaggcctctcagctgatctattggttcagttggtagcagttaagatcttcacaacctccctatgtcgtgcctcgggattagtgggcggatactatgctccatctctttttattggtgcagcaacaggaatggcatatgggaaaattgtaagctctgtggttaatcagcctaatcctgttattgatctctccatcttggaagttgcatcaccacaagcatatggcctggtacgaagacttctgcttcaactagactttatacacatagatgttaagcccattaactattgattac

SEQ ID NO: 378310 - DNA, 2454 bp, Cannabis indica
tagtctgtagtcttataaatttataagttttccaactttgatcaaattgtagtttgataggaggcctaattgaaggtctcaccatttctttaactacttaaacaaacactttttatattcgatgtaagactcttatatgtcccttcaagatggtgactcgaaatctcaaattgttcttaaaacacagttttgtaatttgagtgtacaaagtaagagcatcattacattattaaattaattagtgtataacacttaaaacattttttcttttatattagtactactaattattttcactactattttttttattctataggctattctagcttgtgcatttgccgaaaaagactacgcaaaagccacagcagcagcgaaccgtgtactgcaggtactactactactcaaactcggttttattagagtaaggcgagtggggccgtaacccatttgacacgaaattttcttccaaaaaaaatttaacatttgcccaatacccaaaatgagttagttaacacaattattatgatgatgatgatgatattaaaagagttgtttgttattgcagatgagttttgttctaggtgtgggactcacattccttgttggaattggtttgtactttggagcaggaattttcactagagatgttaatgttttgcacctcataagaattggacttccggtatatatatatatacacatatacatacaaatatatatatatatatatgttgaagttgaatctaatacaaaattattttggtaatgaaaagtgtctattttgttaattttgttgttgtatgtatacagtttgttgtcagccactcagccccctaaattcattgtcatttgtgtttgatggtgtcaactttggtgcctctgactttgcatactctgcatattccttggtaacactatctccaaatttagcctataatttttataattgtgttttaatatattatgtagattttgattacgatttaagttgctatgttaattgctatatgcgtttctacgtaaatttttgtaaaaatatacaaacaaaaaaatgaagtataaaaataaaaaacaattccaagtaattatatctgcacacacaaattaaaacaaacttgacatatacttttatactattattagctaataaatttatactattattagctaataaattttaaagattttggacatttttcatagtagaataagaattgtactaagagctaatgaaatagttctatttattttgattaggcattggtggcagtagcaagtattacagccttatttactttgtcaaaaagccatggttttgttggaatttggattgccctaaccatctacatgggactacgaatgttcgccggaatttggaggtacgtacctaagagtgtgttccacatcggaggacagaaaagtcgacataaaaatattataagattatgagttacttcacttatgagtgaaaaataacagaatttcgttacttttgcaggatgggaactgggactggaccttggcgttttcttagagtaccatttgcagcataaatatatagctttacatgtaactataattatataaatattatccatttgtgtcacgctcaatattggagacttttgttatattgtatgagttttgtgtagtttatttttacatcatttttgttttgagttttgtgtagctcatgtttgtaatgtaattttcttcatatatctttcttcttgagggaaatgttttgaggagttactatatatataatataagtatctatatatatatgtatattttcttgtttttgtgtatcttaattcttagtaataaaaaaggcacattgaaatgtttattgtatttgtatcgcattcttatctaatctattatatactatatgttaaaatttacaatttgatctgatccaattaattttaattattcgatcagatgttgaattagattgattctatccactaaatatattttatgtatatattgtattgattcagaattatttaatattttgaattagatcagatttattcaatatttttgatctaatatttattaaattagatccatccaatcagtaaacttttaatcttaattttcatataaatatatatatatatattaactatattaacataaaattaattattctctcaaactaaatgaaaatacaaacattcgtcccaattgaatattcaaaaataacatctaatccaattcgattttaattagatatccaatatttgatggtcagttgtaatttaatcaatcggttataattaaattgaatcgtcttatatacacccatttggaaaaaccaatcttataaaaattgtgaaattccgtatttatatccattatattcataatgattactaaatgcggaatatgaaactgaaaacagtttttcctaattacagatacaactctgtaactcca

SEQ ID NO: 378311 - DNA, 1715 bp, Cannabis indica
tgtggtcttcgtttattgtgcttgggatagggtagttgatccgggggtgtgtgtattattccattttgtcgttgttgtctgtgcttttaatggagttagttaccacggttaatggccctctgatggtaaaagtttctcttgtgccgaagactcgatatccttgtctcagtgtgccacctcgctgaaagccctgtcgtcattgtgtttatttggcaaggtggtagcacccatgagtgttaatgctgaagatattatacagcatgttactaagaactggttgaaaccggtggctgtttgctctatttcggaagctcctgccctgatgaatagtttcaagctcagcttgaatgtgtggaagacaaagtttgggctttggagaatggctcctggtcctttagaggatatacattcattttgtatgcttggttccctggtattgaaaggtcgggttctgtgaacatgttaaaggtgtgggtgcaggttcataatcttccccacgagtactattcgatggataatggtaaccaactgggaggaatgcttggtaaggttattctagttgagttggatgaggagaaacctgttacttggggttcttttttcagggtgttagttgatatcaatttcctcaatccacttgtgtcgggttgctattttgacttaacctctggggagaaaagatggattcaatttaagtttgaaaaaattggaatattctgttatttttgtggtcgtttgggccaccagaggagaggctgttctctagcttcgccggtcacggtggagtcggtggatggttctgcagttccgttatttggtccttggatgtccactgcttcaagatttcttgatgtcttctctagtgttaccaaaccggtgatgcctccctctgtggagatgcaggtgggttcggacgttcgtgatgggaagatggtcgttgctgggcatggaggtccggttggaggctctaatcctaagactgctgggggtcggaatcgatggaagagagtgaccggtcgtgttttacccggtcacaagctgggcgtatcgcaggaatgggtgcaaaaggcaggttcaggtaagcgtgctttgaaccatgccgttaatggtaataaggttgggttgagtttgaattttgggggaaagatctctgagtctatttctagtttagagacctcgaatgtggtaatgaaggatgggtatccgttggtcaaagggggattatgtattgttgataatttattgggagctgggccgagtaaggacaagaatgatcttgggcttgatgttgttgggccgggttgtgaagtttctttgtgtaatgggcctggtaagttgtgttatgatgggttagaaggtgaaagggatgtgagtggtgggcctggccgtgagaatataaaagataaacattgggctgttgggtccaagtctttaatgaggtcgaatgagttaattgttttaaagggcaaggagaaaggagaggttattggtgggccttgtgggattgattgtgatctggtggggaagaatacggcccacgtgtaacgcccgtattttataataataaactcgaagattgattttaataaaatatatcttaacaaccatatagatcgggatcccgagtataaaaacacaagttaaaagtactttactaatatgtacataaattatttttttttaaaagtttttgcggacatgcatcctcaaaatac

SEQ ID NO: 378312 - DNA, 12014 bp, Cannabis indica
tttttttttttaaaaatttttaccttgtgcattcgtcttgtattcaaaattagtgtttcttacagcatacccattcttggatttttgtgtttgtggctcgaattacgctcgcaacatcatttttctttacatatgttttatttatgtcataagattggattctctaattttgccggttaatttcagcaatggcagtttgatttttcatcgagaaattagcatagggttctgatagatgttaagcttttggaagactctaagtttcctataaattcagcttgagatcaattttcttttttctttttctaattcattatttgctcttgtgtactttgtgcagcttgctcttcacactcttaattcgtcgcggtctgcctttaactcgattacatttaaacctggcttctttgatatctatacaatttctggcaatcaagtcgaatgtagcgtgctgttaaaggtactttgaaaactgtcttaatttttttcatgttgcatagtttaacaggaattttttttttggtttcttactgactctgtctgaacttcaggctgtttgttctgtactaaggacgcctgtagcaagcatagatagcttgagcattaaattgcctgattccgatgcatcgaaagtgcagtggaccttggagtgctttaatggtatttttgatttagctatttttctgtttgccccattgtgtttttttttttttgatagaactgatacagaagatctggaccctcatgttatgattagatgtattttgaggtgattatagattttacaattgctacaccatctatatgggttcggttttataaggctatctatagtatgataacaagtcttggtagcctcaattttggaatttttttatttctctttctaaattttattgtctattagaatgaagcttcatattggctggacactgatatatggtaataaatggtctcaatagacaactgtgaagccaatggaaagatttcaagaatgcttcagatttaggctctccactggattaagaaaaagaatgtcttttaggattcttcatttgtcagtatttctaatacttgtaatattataatagaaaatggtaatatctttgataagatatacctgaaacttgtcttcacgcaaaagtttgtacatgttgttcaggttacaaatactcaacacacagaagttgcattttgtcatttggttatttagatatacatcttcttctttgtattaaaagatgatggcatgtcatgttatacaaaacagctaaactatccatctttcttggtcagtgttatgatgttcatttaaatcatcaagatatcaatgtctgcactctattttgttcaggtatgagaaaaacctactggattacttgcaacgtcgaaccaaatatacaacagttgtccctggatagaagaaaattcccaagtaactttgtagtaaagcctcgagatctcaacagattgctaactaactttcaatcatcccttcaggagatcactattatagcaacagaacccaattcattgccttgtgatgtagcaagtgaaattggaggcaaagctgttgaacttagaagttatatagacccaacgaaaggtgtcaaggctttttctattttcactccatatgtgtctataatatgcattactgaacttacagcaactagcatatttattcttgggtttctaattgcagaaaatgactcatcactgcatactcaactatggatagatcccatggaggagttcgttcagtacacccacactggagacccggtagatgtgacttttggtgtgaaggaattgaaggtttagtaactaagtccttcacagttttgaatatctatcaagttataaactgtaagggaaagctttacacattaatgttgagttttactaatgaccttcttcagcttgctgtcactaccagcatttaattctgttacttgatgccattctgtgaaagctgacttatacatttgccaatatgtgcttatgagtgatctcattgtccctcactctcactttctggaaagcaaatgggactaatttcattgatggcgatgttttctgattgtttcatatggcaggcatttctttctttttgtgaaggctgtgaagtggacattcacctattctttgagaaagctggcgagtaagatattgttttcatccaacacatttatctctaactttgtctgcttttgtcctcttgccctctaccccaaatgattatttttcatatgtatttgattttcaaaataagcatataatcatttgggatgggtgttaactttaaaatttaatgtactcccaaattaaacatttgggattaagtacaataacctgctttaaaatcaaagcgggctcatctatgtcagttctattgaaatttgctgaatcccacataacatgttatgatttttacaaagtatctttatctctcttacgagaaatcacatttattgcatgtgagttcttaactgcaagagttcatgaagatttggaattgaagttttatttatggttcgagccgttttattcccctttatagatatatgcttccaaccgcaggaaagtaatttaatggtttgtactttgtaccattcggaaacttgccaaaaaccccaaatattgggatattactgcaatattcttagtttggtggttattacaagccattaaaattactttccaaatattgggatattactgcaatattcttagtttaaaaacaccattaatcatttcatttcaaaatccaacatgactaataacaggcatttggaaagtcttacacagtgtcttggactaagtagctgattctttatataagaaaatgtaccttcccttaatgttacaaatgtttttttcttgcatttaagaatcaagtgtcaagttaagacaatgtaatttgatattaatgattgtctcggaaacaggcctattcttatggcaccaaaatttggtgtagatgatgcttctaattcaaactttgacgccacatttgtacttgcaaccatgttgacatcacaactccatgaaagccatcctcagcaaagtgcacaagctgataccacaaggcatgtaggggctgataatggaacggcgtcccaaggaccagtcaagactggagcaaatatttctgagcatccatctgaccacaccagaatttggtccgatctctcaggtcaacgattttgttttcaaagtttcaaaggggaatctctgttcaattgctttaaattctgtatcttgtgcaggaagcgctgcaaaaaatggaaatggcattgaaggaagacaggttcgagaggaacaaaatttaaatgctagtgaacagagagaaattaataggatcagtgcaatgcatatatctaaatcggcatcagatagagaaaatgaacctgttaaccctaacacgtatcctgaggctatggtttcctacaatgtccaattaattcttactgtctatattatgttgctgcaaatacaccatcttacaattttgattattgcttcaataactattagcttttgattccctatattatgtactactggcactctcatgtctttatttacatgttcttgggccaagtacttcaacattgcacgctgtgcttggggcagacagtacaatttcaacttttctatcaaatttcagaagtcttgtatgaatgggttagtaattgtttaggattctagctgcatttccttgacttgttgtaatagcttcaacatggaaaaggattgtatcaacgaacatcaaggttagtaagcatgttgggttaactgtgcaattgttttttcctgcattaactgatgtcactgtgggttattgtttttaattttttgatgaagaaacttgtggtttattgttgtgcatcagatattaatggtcaaggtgtttcacaacgccatctcagtaactgggtggatgccaatgaagatgatgacgatgatgaggaagaagaggctgaaatttatgttcagtcgacaccaccatatcattaagaatgttagagcttccagtgcactgtttgatcagctgatatctgttctcttcttttgtaagattccatctacccatagaatgtgctttttctgtaaaattatttttatgactaattacatttctcctttaccttaatctcccatttttaagcaacaatgctgatttattatctgctagagtgttccctgtttattcgttgctgacatgagattgaaattgtattagataaagggtcacaatcttaaatatggtgcaagctccttctagagatatggaatttggaaatgtcaagttgattgttcttttctttatttttccacacaagaaacttcccatccacagcctgataagattaaggattttaattataacttgaaactctttagtttgtgcgaactggtgaagtaccattttgaaattgttttatcacagaagtgctatgtgataaatgaaaaacagtaattaggaagtggttctcttccatacgaacatttggattgatatgcttactgtgtaattcaagtcgatgatgctcttccatgcaaaataatgtaactctttccaccatcttctcaccattgtcattgatccaagcatggatgagttacaaactaacctccttgtgttgaggatctccattccatttgaaaaacacaaactaatccctcaaaaccctgcagcacttgcaggattgttctttgcatataaattttccaatgctaattcctctgagattcttttgtagtgaatctgtgccttgacatggtcacccaactctaacacttgtttggtgtaccttggtagcttgctctcgcagtgatgcctacctttttgttcaagatcgaaatatgcccataaaaatgtaatagactggactggacgtgtagaagaatgtgatcaaagaactggtgacaggtaaatgtccaccatagctttgagtcagatgtatatagcaatattttcttaatgatgagattgagttctgtgtggctagctaataataagttagagagtctgcttcctttagcttactaactgaaaacttcaaatgaatcatatattatcaagtgactaagtttgttgatactgccttggcttatacattattattatactttaaaaacctgcatgtgggacccaattaacacctagttgccacggacagatgaggattttttcgtgtttcttgtttatgacacgatccctgaaccaagcttacattccaggatgtcatttgtgcatacttgcctatatcagggcttgggatattgtttgttcttattttattaatttatttcgttaattggatgtgtttttaagactgactgataattatatttgcaactgggtattggagctgttggaccatattgatattggaccaaagactaggacaacaaaaatacagttagtagcgtagtcggttgttcgggattatagaagactgaagggtatttctgtccatgtgagagaatgtcttcactgttctatttcctttaaattaagtaagaaaagattcgtgaggaaagagaaagctcttcagttttattatattaaaaaggaaagggttaataaataatttaaaagattgttaagacgtagtagctagctggcattaggagagggttggtatgaggaagaacgcgcaaacaccgccttagcgatctgggatgggcccacgatctgacgtgctgcgcttactctcactaccttttgacgccgtctataaaataaatgacagggtaaaaaaatgacaattttatagccgttgttgtgcatttcaaattatttagtaaagaaactcatggtacatttatatattatcccgcaaaaagggtcatgatgctctcaatttcatattacttaaaaggtcactgtgggatgggatgtggagttttattcgtcatgactcaggactcatgtaaagtctactacattttacttgtaaaaagttttatggcttgtaatgattgtagagttcaactaacttcatctttgtttcttcctcaattatattccttaacgtcggtttgattgaacaagtattcatatttttatcatgctaatgatttgccatctatgttcatcttcaaatttcgacttggtagttgctagattctttgtacaatctgtatgagtagtgtttttttattaaataaaattggttctttctcagtctaatagatttatccgtgtccttttgtgcagtttcttttaataaatggcgattattagaagtgctaattaaatgctttttaaaaagaaaataaagtaagctaactacttttttaaagtatgacgagttgttatgtgcagatatacatgtatagtactaataaagaagttaaataatgaacactaaaatgagttgtttatcataaatagatatgtaaagggacagcttaacacacattctttacactaattttacaccatttgattaaaatgatctcacagtcatgattagtgttattttaatttttgcacaaggtgatgtgacattctgcagggtaatatgcatggagcatgtttgtacctagacatgatattctcattgagggtagcatccaaaataattcaaaggtaaaacgattaggtttagtttttcagaaagtattatccaaacaggttccatgctttgtacttctccaagcaaattaaatatgccaaattaagttccattttttagtccagagggatgtggtaattgaagagcttcaaagatatttgtaatgaccgcttaactttatatgagaattaaacagataattaaagtttattgccaaaagtaggctttaaattattattttcataattttggagatgtatttgaattctagtcatattatttatgttatatatgaaattttatattttttatattttatatctgataatagtagaatgcaacgatttggccattagagtcatttagatacagtctagtattttagaagtagcggggcaagatagttgaacattgaaatgttaagggtattcgggattgtaattttagaccaatttactctaagattatttggattactttatggttaagtaaaaataaaattgtcattttactctcgattgttattatttaattttgaagggagtgtttggtgattcctaagtttattaattatatcataaggtgaattaacttagataagttatacttatccaacgataagaaaaatcaaaacatcttattctctctcttttcacctttggccactatagaacccaagagaaaatcaactttctcttctaattcagaccagaatattgagtatttgtagcaagaatttgagtagttagtaaaagaataacccaaggtaagcttctactcctttttctttttgttttcgaagtgaaaaagctaggtttttcttgtagttttgggagtttagtttctgcatgagcttaaagtgtttagggttaatcctgatgctaattctaagttgtttgtgttgttttaagtgggttttattgcctattaatgagtttggacaaagtttgagcttttaagctcaaacttgatccttgaatggtagaaattgattcttagctttgatgatgaatttattggttgaattaagttagttatgacttaaatatgtattttggagctttataaaagttttgggggcttttgtgttgagaaagagaattttggaaaatttgtaatagaaaaggacaaatcgtggtctatcattttcagcaggcatggacccaggaaaaacattctgccatttttaggatacaacttgctattttttggagtatttttccccaagtctcatttttctgcgttttatcgatgtttagggtattgtcacgctatcaatcgatagagaaagttttaactttgagtctatgttctcgaaaagtgattaaacagatcacttaccagtttttatatgttgtgacttagaggcctctaaatcttcaagcagctgtttccactcaggttgaccgacacacctgaattcagaattaaggtaagattagtataatagttgcatccatgtttatatatttagcttacatgttttatgattgcctagtagatatcatatcaataagagcgatattagtgtacgtagagttgcagtgaatactgacacatacatgtttggcaaagtacgaattgacgctatcacatcgatacgattagagtaccaagtataagttaatattatggtcaatcatactatcgtacgaacatactagacctagtacgcattggacgcagaataggattgtgattgggtgtatggcgcttggttatagtccggtttatgttcatgcttttcttactgagtttgtagactcacatatattgtttgcatgtgtaggtaaaggcaaaacaaaggctggacaacaatgagcccgggctaaataaagattgtacatattaaggcggttaaacctagagtgtttagatcttcgggacaacaagttttattttgatagtcgctagacaacaacttttgtaactgtattttgaacactaatgtaactttgtaaacaagatccccaaatacgtattatactttacatttaagattaagtttaattaagaaacttttgattattcacatttttggtaaactctttgattaacaatggaatgcaaagtaatttaaaatcatgataatgtgcctataacaggacactttggtatcaaagccgccagattatctttcaaagatcgtcacgatatgtacaatcatcattagagataagctcaactcacagtttagtaagcttttaaaaactttagtagattgggttattagtatgaaataagaaaagtttgttaggaagcatgttagtagcccgatagctgaatatgcacatgttttaaattgccaagtaagcggtaattagactttaaccttgattgcagtctgaccaggctaacttatgattttgcaggctagttcaatagaatggacgctaggaaaaatacgagaagccaaggaaatttgatcggatcaagtggtggttagggagttcatattccccctaatgttcgtggtcgaggcagaggtcgaagaggtgtagctaatggttggataacgttaacccaccacaggctacctagaattggaagcagaggtttgtagaaattcaagccaaaattaatgatcaagatgaagaaatctgacgcctaagggagaagggtgcttctgtgatgcatgctcttgaggtgcaaatagctcttgctcccattgtgcaagtggagcaggttgttattggtaatcgtatggaaccattatatgaaaagttttatgaggaagcacctttagtctttctgggaggtccagatgctatgaaagtcgagcaatggttaacagttattaacagaatactaaatttcatgggtgtcaccggcaaaaattaggtgacctgtgccacctttcaattccaagaggatgccctggtgtggtgggatatagtgtcccttactcgtgacattaccaaaattacctggaaagagtgccaagatttgtttaacgctaagtactataaggaagcacttcatagtacaaaaaggaaagaattcacttagttggctcgaggagacaatatgtcggttacagagtacatgacccagtttagtagattgtgttgattagcctcgggaattattccaatcaattttagtaagaaggaaaagaatttagcgggattgaacacgaaataaaacatgatttgatgattaccactgatgagacgactacttatgctgctatggtagagaaggcactacaagttgagggcacaatagaatggatttaggagtccctgggacacaaagtgttggtggggccactccttctcctacctctggtttcagtaggtggtagcgactcaaccactgatcaaaagaggaaagttccatttgtgttcggtggctcgagtcaaaataagaagtttcgagggaactaaggccatggtaatcgacagggtgattctgagagctgttgcacttacctggaatgcgctagttgtaagaagcattatctgggtgagtctaagcaccaagtatgtttccagtgcggtatacctggacattataaaagagattgcctgaagttgaagaaagaagagtagaaaatagaggcaaacccgctctagctacccttactcaagtcgatgctaaagctagccctttaatggtgacaagttagctttcagtcaacaactttttttactctgtattgtttgattttggagccatacattcctatgtggcagccagagtaattgataagttggataggttatgtgacaattatgatatagggtttggaaccctgatgcctggcaaagaattagttatctttaaaatgtggattaggtctacgctgattaggattgaggatagggagttgagtgcttacctagtggaattgagtatagcagagtttgatattatacttggaatgaatttcttctccaagtacgctgctagtattgattgtaagcgaaagatggtaacctttcaacttgagggtgaagaactatttgtatttttggggtcagttaaaggctcttgaattccaataatctcaatgttgaaggctaaagacttgttgcttgaaggatgcatagggtttttagcagtagtgttggataccacccaacccgagtcagtctgacctaaggacattaaggtggtataagagctcttagatgtatttacagaagaacttctagggttaccattgcaatgagaaattgattttctcattgacttagcacctggagcaaagccagtttccaccctgtagaatggctcctgctgaactcaggaaattaaagatacaacttcaggggatggttgacttagggttttcccgactcaatgtgtcaccctagggagctccgatgttgtttttttaaaaagaaaaatggatcacttcgtatgtgtattgactatcgggaactgaataatttgacaattaagaacaagtaccctctaattaggattgatgatttgttcgatcaactttgggggaagacaatctatcctaagattgatctttgctcggacaatcatcagttgagaatccaagaggacattccaaatactgcctttcgtactaggtatggccgctatgaatttcttattatatcttttggactagctaatgctctaaaaacttttatggatttgatgaataggatattcaaggattttctcgatatatgtatcatagtatttatcgatgacatccttgtgtactctcaatcagaagtagagcatgagcaacatctacgaattgttttataacgactatcagaacataagctttatgttaaatttaagatgtgtgaattttggttatcccaagtgtccttcttagggcacattattagtaaagatggagtcatggttgatctggggaagattgaatctgccaaggattggccaagaccgaagacagttactaaagtcagaagttttctaggtttagctggttataaccgccaatttgtataaagcttttctaggatttcaatgcccttaaccagttaactaagaagaattagcaatttatatggacattcaagtgtgaaacaagttttcaagagttgaagcaatgattgattacaattcctgtgttagctttcccattagaaaagttcgtggtcttttgatgcatcctgacaaggtttggggtgtgttttgatgcaagttgatagaattattgcttatgcctctctccagttgaaggagtatgaacagcgatacccaactcatgacttaaaacttgatgcagtggtctttgctttgaagatttggcaacactatatctaaggagaaatgtgtgaaatctacacagatcacaagagccttaaatttttattactcagaaagatttaaatatgagatagaggcgtggttagagttagttaaaaaactatgggctagtttggcacagctgtgatgtgagaaaaagcagctgtagctgtg

SEQ ID NO: 378313 - DNA, 2266 bp, Cannabis indica
catgatccctcctttaataatcaatatataaatttacttgcatgcaaaaacctttgtgtgctttttttagtacaatacaaaaaccttggtccatgaatcagaccacccagcctctaaattgacaaatgacaattcaatggtcaaaatctggctctttggaattttcaacgaaactcattttggatttttggtttgttggggtatgtgatcaccataggttaatgaactttcaagacatataattaataataacaagttttcctgacaattgtagcctcaaatatttgtctattgtcaatattagaataataataatgataatattcacctcaaagaaaaaaaaatgttagaataatattattgagttaaaccggccttctcgaacatctaaaatactctgttacaaacaaaaaaaaaaaatactaaaaatactatttttgaccttgaccggcctatagttttgtctcaatcgacattaaaaaaaaacagatggaattttcttctcaattatataaattatcgttacatttatttatcctatattaaaacgagaaatagccctttaagccaaaataacttcattttgaaaacacacacacaaaaaagtatttgcagcataaaattttgcttacaaaagtttaagttttacatggataataatttgatatttaacgctaaatatttacggaagtttataaaaatataatttaaatatcataacttatttaaaaataaatatttttatttaatttgtcaaatacttagtggagactctatcattcaatttttttagtgatgggcagtaatagtaatatattgaggagaaaaattgaaaaagaaaaaagaaaaagaaaaaaaaaaagaggagggctttgactaggagagacagttacgtggtgtttagcaaaatcaactttagaatgataaccacctatgaataaatggaatgtgtaaatgttcatttgctaccactataaatacaaagaaaaaaaggaaaagaaaaaaaaaatcaattgtctaaaatagtttggacagaaataaaagatgatttgtgaagattttatgctttaaaatgcaccattaaaccaataatttatgggtactttctaaagaagagaaaagatttatatatatgggtgaccaattgaaatgagtccctgttgaagttggttcgaatattacaactcattattttagaatagtataaggcatttatatacttatatatataacaataatgatatgtgtgaatatatcgacatattaattgctagtataatgttctatgatgtttttctttgatcgaaaaatcaaattactaacttttttcaatctctatatttagtggcaaaacagaatgaaagtttgaaaatttgttgggaatcatttaataatggtggaaaatctctcattccatttcaagtgtttgttattggtcctttctggcatcacaaatcttttttcactttgtaatttgtattctctccattttaattttgaagaatcttttggtctcaaccacatcaatttattttctcacaagttgagaatagtacaatttctttcctttctttccattgtaaattaagggtgtttacagggcgcgaaacaagacatggacatgcctgctcgtccccatttgaattaaggttcggggttccatatttacaagagtaccctaatctctatatttatatcgaataattattgtgaattgtacatgctattcagatagataaacaatttatttaattagatgattttttattatattcgagttttacttcttgtaaaatttactaattaggttgtaaatatatatagagagaaagaaacaaaaaaaataagactagctagttactattactactagtagatgagtagtgaaagactttgccatgatccacttctagtaatgacctttgagtggagttcctattcccacttactttactatatcaccttaaaaagacaaccttttaaaagaataaaagagagaaagcaagaaaccaattttttttttaaaaaaaaattattattatctttttctttttttttttttaatttttcttagaatgcaaaagttattcctctcccccacaaaagaacatcaacaataaaccaagacagtgactccttttcattttcacccctcctttttgagagcacacacatgcttcacacacacacacatatataaaatatatatatatatatatagagagagagagagagagagagagagagagagagagagaagtgtcga

SEQ ID NO: 378314 - DNA, 4252 bp, Cannabis indica
caggggggaaaacgacaacattttatatgggatctaacttgtgaaaaaaaaaaagggtcatggtttcagaatgtgtttcatgttgtttttgtaatttgttaaaataactctttcatggcttgtagtagtttttttttttactttataaggtgggatttgttattcttgattgttaatttgttagtggaaagaattctaacctcttatgtttcttatttattgaagggaatgatatgaaatttcattgttaataaacattacttaaagtttgaaaatttaacaatttttatttaccccattaagttatttatgcatgtcttcttcaataaaaaaagaaaaagaaaaaaggtaaagcttttgatggggacttcacaaggaggtttaattttggctcactcatgaaagcttttctttatagcttcctagccatacaaccattgtacataaagctcttcctcttcatactttttgattttctctttaaactggggatttgaatttttctttttgagagaactagggatttgaattgaacatgccactattacattattacttctttttggaatataggagcatatataacaaaaggaatttacaaaaatacttcagttttgtatgcaatttatattaaaatacaacaagggcataaatgcaaatattgcttcatttagttattcattgagtggtccaccttatgtttactcccatatccctctccaaattaaattatcataaaaatccaaaattctattcctcttccccatactctaaatttatttatgtacaaaaatatccacaagaaaatcaaattttcattcattttccaacctatttttattaatattattttctcaaaaacttcactatctaaggagagtaaacatacataagattcagttaattaactaacttgagttcaccatagcattaatcccaatttacctaatctcattaacttgatctctaccccttttgcagagtatttccaaattattttgtaccacgacatgttgccccctcagtaaggattggataaaatttaattttaatgttgttgttgttgtgaggaagaactatatgatgattgcggttgtagctagaagtcttgctgctaaaatcatttgggtcgaaaggaagaggttgccatttttggatgaggttgttgcttgtgtctttggctcttgaagctgttgttgaaactttttatcaaaataagtgaattttcgacaaaaaaagaagagaattacatatttttcatatcgaaaaacaaaatacagttgtctttaaaaactccatctgtgatatcatattttgagggtgtacgacgattgggttgttttatcctggggacgaccgacaaaatttcggctgcttaaacaatcctggacagtgccacaaacgtcttaaacaaagcgacttagcctgtgactcaacctagaaattttattctgtaatattgttcctcttttattttcagtagcaacgtacaacaattttaagatattccttctgctatggctattatctcatgaaataaccgacaagtaagaaacctaacaacggtttcagttcaaatgtcactgtcgttatctcatgagataatcgacaagtaggaaacttaacaatggtttcaatctaaatgtcactgtcgttatctcattagataactgacaagtaagaaacctaacaatgattgaagttcaaatgtcattatcgttatctcctaagataatcaacaaataggtttcataacggtaatgaccgtctttttgctttcataaccaagtgattcacaaacgatcatgatcgtatattgacatgctatgtggtacacatataattttcttacctcgggttttgattcaggtgtgtcggctgacctgaatggagaaagatcaacgatctcaggccctatgtcacaactacgaaaagttcaattaatcacttcattaattcatcaatgtaagttttcctatcgatattaggttaccaataccccaaaacattgagaaaacatgaaaaacaagtgttctaaacatcaccaaaaaggtaagccatttataaaacaacaagccgtttttggaatttcctagcggggaaaacagtaggcagtttttccaaaaatggcctgctgttttttatagggaacgtgaaaccccaagtttcaacttctcaaaacccccaccaaaacttaaccaattaattccaaattttacagaacaatcatataacatccatataacaatctctacgtgacaagaatttaaatcacgcccttaagcaaatgttgccaagagagatcaagctctaagcttaaaaactctaacttgactctcacctcccacaacaagcaaatctattaaataaggataaaaatacttctaaactaactcataaacaaaaacaaagtgttaccaaacctacaacaactatagaaagcaaggtcaacattcaaacccaaagctttcatggaagaaaaatactaaacccttaggtttcctcttcaagcttactcctagctgctactaaaggcttgtagaactaatttttgactgagagaagtcaaaaaagaaataaagaataataataaaacaattaattaattaaaaaattgattattttaacatttcttagcaactaaaaaatttctaaccctaaggtatttggtcaatcccaagtaccccagtaattttaaaaccaacttaccttaatagtctcattaaaattactaactaaatccattgtgtcatttttagtctccgatcgagtctccaaggtcgtttgaaaatatttttattccataaataactcacattatgcccacatattctaaataaatttccgtaattaataaattatgcttatttatctacttatggtaaaatttcataattcacgctaaattagattaatagaatcataatcctcctcattgcaccctaattaatccatatttacataataagtcctaattattcataattatatttttggaatattacaatcaccctacaagaaattcatcttttattacttacatttcttaagtattgtacttctgtaatacaaaaaaattcaaaaataacattaactcgtgcacaatgttaatttaattacaaaactacgtaaatatatcatgtcagccaatttgttattatttattaatattttatagtttcaaccaaaagttattattctaagttacaaaatgtctcgtttattgtaatgaaattctgagttaacagacgccatccatccgactgatccgatccaatctgagctggttggttagtgtggtgtgacactttattttttttttacataaaatttatttaataaaatatttatttttattttatttatttgagaaatgtatttaattaaaattgaatacttaattgtctcaattttataggacatgtttaacaactcatccacgattggaaaaacgttattcttcccattttatttgtgcaatccattaatatctatataatacaattgttaccattttatttttgacaggagaattacattttttacatactgaaaaaataaaatacagttttctctgaaaacttcatctgtgatatcatattctgagagtgtattcaacgattcgctaaagtgcagtggtgttccagatacagtatacgatgactgaaaaaatttcgattacttgtacattcttgggcagtgccacaaacattttaaagagggcgatctagtccgcaactcaatccaaaaatttcattcagtaatatcgctcctcttttatttttagtagcaatgttgataatttaaaatatatttaggtaactttgaaaaatattgccaaaattaatcagtttccatgtaatataacaaggtattatttttatataccgattattttatgtatatttttattttttaaaagctaattatttatcatataatataatataattcaattagtataattctaaaatgaatattaactatgatttaaaaaaatttataaaacaataactaattactatattagtaagtaaatggtttcttttctggaaatagtaaaaaattatatgcttcacacatcttaaagtgttcatattgaagagtagatcgcaatgatatttttttaggcttattcgagtaacgacgtgatgcgaaattatttttaaaatttgagagaagagagaaaaataaggaagagagaaagaagaaggagagagttgttgctccagaattcgcccaaaatacgtgg

SEQ ID NO: 378315 - DNA, 7016 bp, Cannabis indica
gagagagagagaggtcttttggttttttataaaggtatttttgagttagaaaagaattaaaagaatagttaaaaagctgtgtagtgagaggaataatttaaaattatgtctgatactaaatagcccactatgacaaggttaagtacttagagatgtttcagtctttaagatgatgttttagtccttgagatgagttgcatttactctgcatacagagaaagatattattagtattttgtcagccctttggatatatatttgaagtttattaatgttctttcctttttacataaaaaaaaaaattagaaactttgttcccacatattacatattattgtattatgtttttggtttaaaaaaaatttgtatacaaataaaggcacaatgatattttaatacatcgatcaatgggaataattaaaaactgaaaaataatgcagccaaatatatgatatcaaattaatgtgtatgtgaaaaatatattaattatttcaggaaatattattgtgtggaagagacatatatatatagatatagatatatatagggtcgttgagttgatcatgaactctcaccctctacagtaactaatatatgcctgtgctcttacacaaaacgattatacttgcaagcaatgcaaaatattattccatcttccacataaatataaatatatatatatatatatatatttatatatatatatataccatatcctccttttcctacacaaaatgccacaccggacgtttttttcttttacctaaaactaaaaaagacaaaaaaacaataattatttgaccacgatcactttctctctctatatatatatctttatcatgtacatatatatacttcaaaatacaataattaatctttatgcatataacttaaaaactgatcaatcactacctggtagttgtggggtttatatatccaatagtaataataatagtaatatatatatatatttatatgctaggtttgcaagttagataaagtgcgtgtatgtgcatgattatgaatattacaattggcagacataattaagaagatgcaaacaagtttatgttatccgcattttcggtggaatattttcttagaggcccaagatgaaaagatctctcaatccaattggatagagcttacaaagtcaggaacaactctcgatcggttcatttgaccggatccacattcaaggttcccaaaagtaaatttttacttaacaggtaggtagtccaagagctgaagaaggatacgtagtcatccgagaatggaagatgaaaagaaattcgagaatatatatactatcttgcatgtttgcttaagtggcatgacacttaacaaaaaaatttacttttagtaacaactaaacttgttactacgaataaaaaatgttgtgactaaaatattcttcgctaaaagtattattagtcacaaaaaatataatttgttgtaataatatgtttttaatcacaatattttttgtgactaaaactaaattagtgacaatttatatctaaatatagtataacctctatctaagaatactctatttaagaatagtctctaatttgttgtaaaaaaaattaaatttccatttgggcaaattataaataagaataacatttaaattgtaattaattatacatttcttaagttccgtattaataaagtatacatctataagaaaaattacattttaataaaatatatacatatattatgtaaacttatttacgtagagttagtaattttattttaaattgtaatatatgtataaatattatatttactcaaatataattttattataatatataattttaattattatttattactattattattacattaataatattattttagtattttgatttttttttctaatgtaactctatttattgataaccttttaattagaatataatttacttgatcccaagtgtattcttgaattgaagttttgctgtattacgtattaatcactaattttttgctgtgactaaaacttatatttagttataaaatttgactaaaagattgtcactaaagataattatttttggtagttatatatataaatatatattgtatgccttatatacatagtataaaagtagtacaatctatacgcatagtcaaatgaagtataataatgcttttccttgaaatcccagatttcattatattatgggaaacttattatatgtgcatgtttctcataatgattaaacaatttctcattaaatacgtacatcaaccacaaaacaacaaaaaagaatacactaaccacccgtacacacacacatatatatatatacaatatgtatacattgtgaatgtatgcatgcttatagtggcttgcaagttatacaatgaaaactttataatttatagatacgtgatgtgatatatattatatatgtgacgcgtggcagtagtactacgtacgaacaacttcatgaaaatgcattatttacatgagaaattaaatctaattatttggatcaaataataatatattccaaagcgaccaacttgttggtaacgaatatatattaataactatcgatgaattagagtggataactatgataagtacaattgatcttgacaaataaatatagggttttgtaatttcgaatcgacccacatgcatgcatatatcaatgaagatgatgatttaattactgtttagtgaaaataaacaaattatcatcagatgtcaagggagaaaaacaaacaaaagtcctcctgtatataccatgtgttcacctaagccaagagataaaagtcaaaaaaccaagtaaaagggtttttaacaacccccgacactattatatctagcttaccaacatcttacattaattgtttttatcgatcagaaacaaaaattaaaaaaaaaacctaattaatgtaatcacactcgatgagtagtgatcttcaagccgcttaattaatcaataatttttacgtgcctggttatgtcctataattgacacgtatatgtatacatatatatatatatatttatataaatatgtagagttctaggaccacatccacacacatatatataggaaataatagttgaaattgtacgtaacatattctaattccctaatatcgactaacgtaggtaacctataacttgtcgtaagatatatatgtctggcaattgatctcgtaattccgtcagatttttagcaaaaacaaatcacggctcatgaaaatgtctctaatgcatggtgtggtgttcttatttttgccaatcatttaacctagaataaaagcacatacgtggcacaaatctagcttaattaaaattacccccttagtacaaaatgtggtacgtatatttatatatatgtaaataataaactaattattattaattattagtcaagaataatatacactgaaaacatttcttgttgtctgctttactaagatatttacgcatgtgaaggagagtggttcaggttgcttaagagtttatctattttcttaagcaacaaagagaactagctagctttaattaatatggttttcgaaattatggtaatattttccacaaccggatatgaacaaaatattgttgggtttaagataatattaatttatttattaacgatcacttagaacaaatatataattaattaagcatgattgtattctattttttatttggacagaacatacccttggttttactctggtcgtggattaaatatagatatatatcacgaccaacgttcttagcacgttggctttttatatgtattaattttctgtgtatagtgattacacataatatgaaaataaagctcgaaaatcaactagtaattaaaaatttgataggtttcttaatttcaataaaaaatatcaatactaatattatatataaataaagctatattaattttctccatgttcatattaaggttagaattaaatagcaatagtttggaaagtaacatttcactaataaaattataaaatcagggtcggctctaaaaatatatgggtctaaagcgaattaaattttggaaccctcaaaaatatataaaaaaaaaatattaaagaagagtgttatggaatttgaactcatgaccttgtatactatgtcatactactcaaccaattaagttataaatatttattatttacaatgcacttaaattttacttaaataaaagcttaataaatttatttattttttttattttacatccccgaaaagtgtggccctaggcacgggcctagcccgcctatgcctagggccggcgctagataaaactcagctcaagaaggagattcaggagacaatttattatataaaggcagtgaggccttgaatgattacaactaatagagctacttgtcacctttacacaagcttgaaccaaaaaacaaaaggaaaaaaagtacaagacaaaaaagtataagacaaagcaaattattgaaaggaccacaataataccaactaatctctattaccactaactcactgaaaacagagtcattagacagaggaattagacatatcttaacataactcctcaagcgagagggtgattcgttcacttcgagcttctcaataaggaattgatattgttaatgagaaagtcccttggtcaaataatctgctatttggtctaatgaaggtacatagcaaatgtcaagctacctttggatgactttgtctctaggtaaatgggattagagagcaaagcacgtgcactcatgttatctcaccatatcattgagatggatgactaaggaagcttcatttctttaagtaaggattcaagccaagttatctctgctgaagcatgtgccaatgccctgtatttttactttgtagtacttaatcttgataccactgattgttccttggatgaccatgaaactagagtctctccaaaatagatactataaccaccaattgactttctatcatttggacaacaagcctaattagtatctaaatatctattcaaactcaagttgtcactgtgctggaagtgtaagccatggtattatgaggtacctcatgagaattcgtttagtagcactaaaatgaactatagtttgacacttaaagaattgacttaacttcttcacaacaaatgctacgtcaggtctggtatgaacaagatattggagttctcatattaaactcctataatatgatgattttcaagggcttctccatcggataaagacagtggcttccctccattcataagagttagacatggtttaagattcaacatgttaaacttgctcgaaaattctccaatgtacttagcttgagtaagatacatgccaatagtgtgtcggaaaacttctttgtccaagaaataatttgggtgcccaaggtctttaatagagaaggctttatttagccttataatgaacttttgaagttcattaggttttttgctagtaaacatgatgtcatctatatagataagcatcatcataattaattgagatgttttgatcattaagaaagtggtatctcatgtgagtgttgaaagttccactacaccagagtttgttttcaagctatcaaaccaggtcctaggagcctatttcaagccacaaagtgattttttagcttacacatgtagttcggtttgcttgactcttcaaaaccttaaggttgtgtcatgtatacatctttttcaagctttccattcaagaatacattatttatgccaagttgttttactcctactcgttacttacaataattgtcaagaaaattttgattgttgaagctttaattacaggactaaaggtctcaccaaagtccaaactgggtctctaatggcaccctttagcaaccaaccgagctttgaacctttcaaaagtgccatcaatattgtactttatcttgaaaacctattttttctttacaatgctatagtcaagtgaaggtagaatcaaaatccaagttttatttttttttatcaaggttgtgttttcatcagatattgttcttctccatcctacatgcttcaaagctttaatgactatgctaggttctgctatgctctctttcaattttttcttactgagattcacatttggtttaaagattcctagcttggatcttgtcactatgcgatgaataggccttagttcactactttcaacttcctgaactgtaacgctctaatctataaggacgccatgtgtataattttataaactagtttaatactaatagatttatttaattataaaaaccgtgataatattaaaatttgagtaatattaaattgggcatcataacgacattataaatgtgttccaggtatccttgttataaaagatttactaaaaggctatatatgaaaataactcaaaacacaaaaatcaaaatacacaatagatatagcccaaaaataactcttggcaactcggcacgcaggccggtatggttaatatatacatagctagagaagactgtcacctcatggttgatctagctttttttgcctttacctacaccacatagcacccgtgagtcacaagaattcagtaaaaaaggtaaaaacaataatcatatagtttattattcgaatattatcatttgtacttagacaatcagaatcaaataatcacgcattacacataaaatgaaatctaaatcacttttagcatctgatacgaataaacatcagtatacatatatttggtaatacaaaactattataccaataatagaaatcatattcatgcaatattattaattttatatatgttacctcataaagtaactatcttcattacatcacattgcctaatcaggaaagttgatgcttaaatctaataatcttatattgcattgcctaatcaggcaagcccgtgccatggcctggcaccaatatatcacataatcgcatcacctaattaggtgggcatgtgccaaaaccctgcacctatatatcacataattgtatcacctaatcaggtgagcccgtgccacaatc

SEQ ID NO: 378316 - DNA, 5455 bp, Cannabis indica
aaaaaaaaaaaaaaatctaacagtagtggagattgattgatatgttaaaactaaaccaaatgggaatgtttagtgaattttttgagaaaaaatcttgtgtacgtctaaaatatactaaaataaacaatatagctcaccaatcttaggtttgttgtgcaaaaaaattcagctatttcaaagagtcctcacggataactatgtccacaaaccagctttctacaactagatgtctgatcattggaagggtcgatttcctgctgtgatatctgactatggtgatgatatgtttaaagtttcctttggctgcgtaggagataaatttaaggtcttaaacgagaaatcttgacactttcaaaaccatctcactatgttgtacacacaagatgttttacagtttgtctcaatgaaggaactgatttttactcccttttgggtctaaatatatcatttgccttcctgagtaaatccaaaccactagcacaagcattgggtgatatcattggagaatttgtagatgtccacgagattcactcgatgaatgatggggccctttttgagaatttgggtgaaactctcggtggttaaacctctccctcatagttgaatgataagtctgcagaaaattaaggatgaattttagattgaattcagatatgagaacctccctgagttttgttttgaatgtggccttcttggacacccatttgaaaaatgtgttgcttttatggagcgcatgtacaatggaaaatgatgatgatgatttgttgtatggggcatggatgaaaggtgctaaactctaacaactggacatgacaagtatagaatagacttctctaaagggaatgcctggtcattcttaactcgccttgcacgcaacaccctcagttcctccattccacaactaagtactaggaatcaacctcaaccaaaagccttgttcagaggagagtcctcaaactagtagatctcctcttctccatatgctgctactggatctgatataattgttactaactctcttattttgccaattgaaaaccagtatatcactaataaccaacccaaactcctattctaatctcctttggcatgcataccactactaaaccaaatccaggcataactacatccgtttcccacaaccccttaccaattacatatgtcactggtacctatgtacctgatataagggctaccactcgaccccatatcccaattgccacctatcccccaactttgacacctcttttcatgccaagtcatctttcttctggatcatctctcaatgcctctactcccttaatgaccagttcatcaccaatcatttcctctgggtttagcaccaccattgccagtaaagaaaatgcgttccctaacaaattgtccaagcgacaatgtgagccactttctatgagacaaatgctcaagtgttgtcgtaatcaaagttttggtcttttgctccttttttgtcacaaggagaagcctcaaacttgaatgttggatgaaaaaggttgagatgcatctgatgtagaaggtgttggttgcagtttttggttgagcaatgagataagtgtttggataccttcatgtttggttagtttagccagaaactgatcagcagaagcagaagcattgtgagcagctggatggttatttaaagatcttttgctcctatatcttagaggaaaaccaatcaagaaataacacttgttgtctttcaagtgacctggtttgtgacagttagaataatagggtctcatttttttattgcgtccagagttagtattggatgctaatgccgagggattttgggcaagagtagcagaggaataagtgtttggatcttgagcagaggtaataaggagaatatgagagttcttgagtttcctctgtctttcttcatgtataatcatggagaaaactttggacggagaaggacaaggttctagttgaagaatttgagctcgaacaggaaagaaagattcactcaagcttgtgagaaattgtaaaacttcttcttcgtttacaaaagccaagttatcagcggaagcaataaaagtacatggaattcttggtctgagttcttgaatctcatcccacatacatttgagtttaataaaataggaacttaaggaatcttccccttagcgtaaggtgatcaaggtttcatgaagctcaaagatccaaggtccattgtcttgatcaaatctcgaattgagctcgatccacattttagtagctgtgtcaagaaacatgatgttgctctttatctcggatgtcacatagtgaagaattcatgagatgactatctgattgcaacgaagctagtgattgtgaagaggatcaattgccgagggtgaaggaagagtgccttttaggaagacggacttgttcctagcaccaatagagagttcgaaatcacaacattatagttggaagttgtgatcagacaacggaggagtgaccaagatcggactaggatgatcactggagctgagaaaatatggactagaactatcttcatgcacaggacgagaaatgggaagaagattctggtgttgatgttctccagagatattggaaactggaggaatgatcggggtttctatcaaaggagcgtctggaacggaggaagaagtgtacggtggaggaattttgtcggagttcctaaaaccagtagctcgtgttctaaccatggtgaagcaattgtagaaatcttttcaagagagaaagaaagagtttaaacttctgataccatattaaaaatcaagagaatgattttatttaatgaaaatagagtatttatacaaaaggtctatgaactaactcaagcaaaaaggagtgttaataactaacacaaccaaatacaattagtcataacaatccaactgacagacctataactaactttaacaactaagttacataacaattctaatagcaaaataaaaatattcattccaataattctgaagctccaataacacttatttttctttgcaatgaattttattattatatttaatattaaagatttgtaccacttatatgtgatatactagtaaactgcctgttcaaactatattttaatcaaattttctcaacaaagaagaaacaaactatattaatcaaataaatttacaagtaaataatcagaagtagtatagatcggttaaaaatattatgatagaagtattatctcactctccttcaaaataccacaagttgagtttgttactataaattctagagtttgggttggtttggaaacaactgtataattattatggtagtaattacactgtatagtaattatattgtattttaaaatacaaagtgtattttaatgttaagtattaattacaagtgaatttttattgttatatttggcgagacagatagtaattacacaataaattaatattgtgtaatatttaatattataattgttatcattttataaaaaaaaatttaaaataaattttatctattagtaatattataataaataaaaatctccttataaaataaattcaaatttcataaaaattttgtaacaaatatttaaaataatttttaatttttatctattaagactatttaattgttcttgtgttctatacatcttgagctatttcatttggtgtacagtttgccaaccttaaaagtttaagtatgcgtcattccaatgtgtattatttacaaacaatacaaaaaaaaaaaaacactaaaatattataaaatagcactatacatagaataaaaaataaaattatgtatatgagaaaagaaaatatataaaagtgaatgactaaattcatattaagtacttattatattaattaaataattaaagttagttttggtatgtaattacacaaaataattacactcaattttcatggagtatgagaattgagagagtgaagcttttcaattatctctaattacacaattactctgtaattacgtgattaaataaatacattacagtgtatagttaacctctaattacatctcatttaaatttcaggtctttttctaaacgtgtccttaatttattccattattgtatcacatttacaaggttatctcacgatttatgcattagtaatagtaaagtctaactaaaagagcaggaagtagtcctattttgtacatatacattaagtggaacaatatatacattaaatgtgggataaccttgtagaagtaactttaatttgctttgagttggtaaaaacagcataggaatcctcaattcgagttagagcatcttgaatagagatgcaaataagtaatacatatgtaaaatatagttcattttattaataatttactctaattgtgtatcaaattgtaatgcaaatatgttacatattaaaaaaataaaaagtgatccaatttagatgacaatataatatgatacagaatttccatcacaataaatactataataatatttttaatattttattattaaattttagttaacatcctcttttgcattaaatgagttgtattattattattattattttaataaattactaagtgagtattaaataatatattaaattttgtatcataatttataataatgtattggagtacaataacaaaaattgatgtaaaaatattataaaactacattttatatcaaatatagctccatttttacatagaccctgaatggttgataactagagcttgtatggaatgaggtccaactcctctcttgaatctagtccgtatgtttttagtggcccagtacaatatagggcttccgccgttgatacaacatgggcctttctcacccagtttatagtggaagtgtccatagatacccattttcatatatcagtcttttttttagggaaacttaaaaaaatattaaaatttaggttaattcttacaaaaatactgtcgcacggaaatttttctaaaaatattatatttttataaaataacagtgaaacacaaaaccgaacaactaaaaacaacaatagaacaactaaaaaacaatcatagaataacagtaaaaacttaacacattacacagtataaaacttacacagtattttttaaacaaattctaccccacagtaaaaaaataaaaacattagaaatttcagtatgttgtgtaaataatcttttttttaatgtcaggcaaaattctaaaatacaattttgtttttctttttactaaacaatttggctttcatcaatcatgtttaaacttactatgtcaaactcacacactaagggtgcgtttggtaacacttttttaatcagttttttgtttttaaaagtagaaaagtgaaaatatttttcaaaatcatgttctataaaactgtttttacttttcaattttttaattaagaatctaaattttaaaaacaaaaaaatcacttttaaaattttttaaacagcttttttcttaatcaatattttg

SEQ ID NO: 378317 - DNA, 2753 bp, Cannabis indica
aatatagtatttttgtaaaaaaattccgtgtagcagtaaaattgtaaaattttcccaactctaaatatccataccaaaacaaattcttagtttatagatatagaataatattggctttattttcactattttttagaagttttatttatctgcttataatatataactttttctttttcaaaataataataaaaaaaaattaagaagctaggaacttaagttcacaaaaaaataaaaaatcttgaaaaattataaaagatttttgtttttactcacactcctaaaaatgttttttataaataggttacacaggttaaattaaatcaacccgtttataaataagttggatttgagttagggtgtttgaaacaattaatacatgggtcgagtttaggtttaatatttgcttgtaatacttaaacttcagacactgactcataaacacgaattggtacccctaatcttgggcatatagactgatatttttttttatttagggtttacatccttgaccacacgtttatttacatccttgatggctccattctaacgaagtcattgatttttaaatgagaaatttttgaaaaagaacagagttttcttcaaatgaagggaaagacagatgaagtactagtcaactcagctggtgggttttgtttgatgcactgaacttaaatgtgctatcatacaattattcagaattttgttggcatgaaaggaaaacaatttttgtctgttttgacacattttaacgaaacaaagaatatcagcaaacgtacagatatggtaaaagagaagactattgttcatttgatgttgatgtgccacccacgaaaattagtaatgtgttaatgtgtttatattttctgatttgctttttggaatatttagtgttattgttgggtgtacattacatgaacttttggcatctttactacctttgtttatttcttaaatgtggtcaaaacaaatgcaaaaaaattctcaaaacttcaaaaagtattatgccttcattggctaacttagtgtaccaaaacgaaaaatgttattttaatttaataattattataaaatatcgctaattatttataaagtgtcaccttaggtggtgtcgcacctgtagtgcgtaatagcaatactttaaaattaaaaactgttatcaaccaaacccatgttcaaggttacaaaaggataagccaaatggggcttttgaacattggcatgtggcttgctggaccatattctttgatttgggaaatatcatgcaaaaggagtccatcacaatcacaccaaatcattcccatgacgacttccaaattctggttaggtgaacccttttgatcaaatgttgagacttctcaacccctcccctcattcttttttcattatatttctcttgttaaggctatgtttggtaagaaatcaaaatatggttgaaaggatggaaagtgtgaccaaaggagtagtatgtcccatctttggtgcctatgggattgaaaggacggaaagtgtgtcatgaagaaagttatgtaaattttcaatgggtgatccgagggctctagtgagtgatttttatgagttcaataacaattttatctcacctctaccaagtaaaaaaaaattgagtaaaacctagtcattttgtggaggatttggtttcaaagaaacatggtgattacttgttggcttactaggtattcttctagttctccttcatcaggcatctgagatgaggccttcttcttcgtctaaggttgcgtccaagtggctcagaccgcctatgggaagcttcaagagttataaagacgttgccatcgaccaatcaacacatttttgtggttttgggatggtggtctataaactctctgagggaagctcttgctcaacaactcagaaattggagggatctttcttggccgaagcttgctatttggcaagatttagctcaatgttgttttcttggctacaataacgttcatatcgagtgggattgccaaagtttctatattcatctttgggtttgattattagagatataaatctttttgtaataattttaatgttgggaactataaatgtaacacacactcttgttaaatatattttacaaactattgcaacagaaattaaatttaagtatttatactgcaaattattctaataataataacaataacatacactcttctatcttatatgatgtccaaaagagatataagtatgaatttaaattttaaatacaaaattgctatatataaattattttgcactaaccctttttccatactacgtacgtacctttccatcttactaaaattccctttaaccaaaggtagtgggtattgtaagattagcaataataacaatcttggtttttcctcccctcccaaaataacgatcgattgttaattacttcaaatacaagtagctcttaattaacatgcatgtcattatgaatctttttgaaaattaaattgaattttggtttggtggtaggtcaagacctgaacggctattatataattacctgagttattttatgctaattaattttctaattatatattagaaaagaagaagaataagaatatccctcttagttcaaaattttctaagtacagtttttttttaaaacaaactaaattattatattaaggttttactttactatccaataagccggtagttgttgttagtaaattaaatcttttaggcattataatatcaaaaggaaatttgattttttatactta

SEQ ID NO: 378318 - DNA, 2516 bp, Cannabis indica
taaataattctataaaacaattctgaagtaatattattctagaaacgtaatattaatttttttagtattgaactctctagggagtatcattgattgattagccataattataggcataatctaatgatttcacagtttttttttttttttttttttttatacaaatactaagaaaaaaatctctcaattaaataataaatatcaattagttttttttgtaatggaaatataaatggaaatatatcaatttagcttttgttttgtaataaaatattgtgttgaaaacttagcactagtcaagacattttgttttagggattttaatatattaaattttgcattatttgcataattgttttcaataatgttccttgataattatttgactttattttcttttttgttattttacttggcttcgtaaatagtgtatttgtttttcttcattattttgtttgtttatgtatagaaatattttgacttgatatttttttactatgtcaaagtataataaaagaacagaaaaaaagaaagaaaaaaaaaaggaatcgataactgacctgatggtctagaagaagtgtgagagtgatgatgataatggtggtgatcacggcgtggagcaatctgacgatatctagaccgaaatggccagaaagtagccaagcgactccacctcatgttccgctgattatttccaacagatgatccctcatcagacccaccaccgccacgcccaacaccaacactattggcctcacccacttcaaccggcaactcgtggcggcaaacagggcaagagttgtgaagcctaagccacggcacaatgcaatccttgtgatatatatgcttgcacggcagctctttcgcctccccacccaactcaaactcctccttacaaacagggcaatattccgtatccttattcaggtgggattcctttattttaatcgtcagaatcgagctaattgccgattcaggcgccggagcaggcccctgtcggtcgttctgagtcaattcttctattaattcgttcattccaggcccgaaaaaatagtcccttatattcaccctaggcgttccagggttttctggatggagaatcggagagaacgggcttgaaggatcgatgggcctgagtataatccatgacctgggacggtttcggcgtctggattcagtttcagcttcggttgaactattctcaatcgtcattgtagtcccgtcgaagctatggtttcgccgacgagttctccccgccggcctaggcggaggcggaggcggttgattagtggattgggcagcagggtcccaagtatcagttccttcttgattaatatgagcgtggtgacggtggcctagccacggaatcaaggcaccgtattgggaagcttcttcgtcttggtcgtagagaacggaattgaagcggcggcggccaataggggggtcgagcatgagtgttagagcttcgagaagacgagcttcaggggaaggatcgtaatcggtgtaatctatgaaaaggcgaggcctaattccaacgtcgatttcgcggacgaattgaccgaaacaccgggggcaaacgacgtcggaggggttggatgaaggagcaatcctgaccgtccgattgcattgatagcaccagtgagggtggaaggatctggttccgatgacatggtttcccaaattgttatcagaagacatgattggttgttatgaagatgaatgagggttttaaattcagaaaagggttaattcttaattatgttagagtttgtttatatataattgattaggaagaaagaaagaaggaaagaagaaaggaaggaaagaatgaaggaaagaagaaaggaaagaatgaagagagtttgcttgtgtttggagttctactattggctattcgctcaccctaatctcactttttcagttgtaacaaagaaaagtatgagtgggatttgatgcaaaatcaaacaagttttcaaatttggagggaatatagttattattaacggctaacttttggagcacagaatgtataatcgtttcttttggtttttgtattaataactttttttttgttcctcattaataccctgatcagaacgagaaatgagtaggaggagtcttgtactcttttagaccaaatcaaaacttcaatcatcccaatgtatgtttatatgtagtatgtacatatagtcatatctgccaataaataaaattttgggattcatataataatacccatattttttttttcatatttttactgtcaaacttttacttttatatttttattgtactaaattctcaaaaatattatcttaaaattttaaaattacaaaaatactacagatctttacagttgcattcttctttattgctattaaagaaacttttttggcatatgtaaaaacaagatttttcatgtagatcacaaatgtgaaaattacatgaaatatgagatttcataaaaaagttaaaaaaatatggcatttataggtttgccactcttctatgacatt

SEQ ID NO: 378319 - DNA, 2039 bp, Cannabis indica
ttttttttttttatttttaccataactaatttatttcttacatttacatactagttttaatgtaataatcatcaaattatcaaataaaaatacaatttaaatatttttattatcttgacaacaaaatgccatgactaataaaatatcattttatttatttatcttcttttttatctctatttttattaagggtgtaaaaactcataattgagaaaattaataatgtgaatcctaattaattcataataaaatcaattattgagacttactacttggtatttatcccagatagtgcgaggatgatggaatatacataatataaatacactattagctatacattgtttctatcaaaataatcagtgatcgtctgtagatggattacactgagtaggaactaaaattactatttttatccttttaatgtattttatccttataacatttaattaatataaatgatatttcagtaaactaattatcattattaaaatgagtgctctattatttatccattaataagttcaaaggaaactatcattttacttctaacaaatagaagttatagatgtctaaatctatgactaacactctcagtcaattatactactccgagttttcaaaatgcaagtattggctagagagtagggtaagcttgtaacgaataaatcaaagaactcaaaataccttaaagcttattcatctcaagattcaaatctaattgatctatgataaactaagtaatattgccttaaaatagttataacggtaagattctatttttcaatatcggtctcgtctcgatggaaactctagacatccaatttcaagtttattttacttaatgtcttggaaaagacatgctacttacccaagtataaataaaccttattgttgattgtcacgtcaatgtaaatctaatgcactgataaatcatgagactaaaaatatttaaagcacataatcataattattttcacctttgatgatgtcattacaattatgaatagctataagttttgaatttaataaaatttaagtattaaacatataatcatgtaaaaaaaaacatgtgaaccaagcatttgactaagtcaaaaaaaattatactctcttattaaaaaaaaataataagattatataaaatacattttatttagggtataaaacccaacaaagtcttgagtacctttttgtacagtgatttaccaagaccagccacaataagtcccaaatagatagaagcacataaccaactacatagtaggaaaaggataaggtaatttcactatcatattgccatctatggagatattagaagttaggtgactctattagaaattcaatttgcacatgagatttcacttaaacgatcatccatttatgcttaagtcttttgaccacttctatgcacatcctcgcagtagttaactttggttttgtcataatctgttgttaatcatagccaatttccttcctttctaaaccatgcaacccaagaagaagaagaaataagaaagaattttcatgtgactttgagaatgatttggatttaagcaaatgagtaattagagtgcccactctatttttgtgatgttgggccatggagcaaacaaccaattcttcttttatcaaatccagtatggattgttagtcgttatcaattaaattcaagtttggaacactaaatagttgtaaggcacattctcaagtatcttcggagagtgagagatctcatgtttgtgtattccgaagaaatgttgaatcctactggatatactagttttggtttttcaatcagacaaatatagacgaaagtagacattgtatccactcttggtggtagagttgtagtctagagaagtcactacaagaaaatacattttcagcgactagattttttgtgaccaaatcaacttagtcactaatagttagattttgtgactaatttttagtcgcaaataattttagtcatgagactatgtttatttagaaccaaaaaaatcaatgaccaattttttagtcactgtttgttatat

SEQ ID NO: 378320 - DNA, 2519 bp, Cannabis indica
ttttatatatactgctataattcacgacccctttcattaaatagagatttttagcctaaaaatgagaaaatatgaagttctccttgacccgtacgaagttgacgctgcggaagctgaagttcttaagttgaattcaaggttttctgtagccatctcactgcagccataagttttgctcgccacgaccacaaatattagtcacgacaaaatcgttcctacttccctttctcagtaaaatatgtataactttcagatacaaactctaaatgagctgattcaagaggcgttggaaagctgaaaaagatatctaaacttttatgttttgaatttttccaaaatcggaccaaaacatagtcaaatttaggattgaagttttagcttcattatcttgcaaatttttttctattttgtagatcaccgttttctgaaatgtgacgaatttatacatttcaagtgtcgcaacctaaaaccaaaaaaaaaacaagcgtaattctatttcaaaaataataacaaagaagaaaaataactataaaaagtgaccaaaaacttaggctaaaaatagcctaatagggtctaaccatagtgttttgggttgcaaccattgttgtacatgacaacaatggagaataattttcttagctcttaatgaaagtatcaaaatattcactgaaatttttaaaaactgaattattaataaattaaggtaaggaaaattgtttaagaaataaatgagaaggggctttttacgtggtttgggcgttaaaaagccttagtgcacgagtcaatattattgaagctctttattattaagtattttaaacaagtgttcttgcccgcgtttgaaacccttagccttgcttgaaatcataaccatttgcatgaaggaataaagttatatttataggctagagtttggttattgggtgaagccaaaccaattagggttttttggcgaataaataaagcctactgatggggtaaagtacattattatattgactttgggtggaatatgtgagcctcatcttgtgagacaatggtcatccatatagaaggggacaacttgatagaaacaggtagctttcgctgtcgatcatgtacattatcaatcaaaatcatgggcattggacaaaaggcatgtcccttttgctgctctgcccatttcctaaacccgagaagggggcaaaatcctaaagtgccacataggattactccctggtaactttctagctgcccttcccagatcaccatatgagggcatctgggtatactcggtcgagcctttccttttttttgcatgagccatccttccaaaactaaaaaataccgcctaaccgtgattcttattagattgcaataggactcaagacttcgatctgaattcatcgtgggctgacccactagattaattgggcctgcaaatgggcccgtttcaattgttcttgaatcctgggaagtatacatgtcgcctatccaaaactaaagataccatgagaagttacaaatctaaaataggatttgtaacttatgaatcatacttgattatattatgttaatatatgagtaattacacaatagattatgaatttgatagttgttggaaagtattcatatctaatttataccattaaaatgatgatttaaatgttcgtgaaagagttgtcttatagagaagttacaaacctcaaaaaaagagttgaatgaaaatgtatcagacaacatgtcacatgaaggttgtgttatggggttattgatgttttgtaatatttctcgatgaagggtttgaagctatctctccaggcgacatgtcaccgtgtaccactgaaaccaattttttgataaactttcaataatgttcatctcttcaatgagaacgttttctatttccatgccaatatttttatcccatttattcccacttttattattagtaacaacagccatgaatgtgtgggtattagatttcaagttttgattcacctaaacactataaatacaggtattggttcaacttttatgacaccctaatttttatctacaaacactagctagaaaaatctctaaatgcttgattatttccataagcatttcaatctaaaccctaagggggtgtttggtgtaggggtagggattagatatgggcgaatgtgtagtttaccccttgtttggttcaaagttttaggtgggaatgtgttaatttttatgggtcccactagattttaaagagtaatcttaacccatttgaagagttgagtttcacattccccatcacctattttgacacttttctaggctaattaaaacttaaaacaaacaacccttaattgtttggtagtaagaaaaaataagtgcatgtttggcaatgtattctgtttttgtttttaaaattatgttctcaaaacagaaaacaaaaaaagtattttgtagtttttaaaaggtggagttgtttggctaattttttttaaaaacagttttccaaaaacaaaaaacaaaaaatatgtttggatgatgtaaaataa

SEQ ID NO: 378321 - DNA, 1681 bp, Cannabis indica
ccacattgatcattaccacggccagaccagctaaatccgctgaccaggctgcattagtaagcacaaagtcaaagtccttactggtcttgcaaaaaggtcgtttagggacactgagatttgtctccacgatctcaggatgactcataaagtcacaaaattttttcctaatgcgcatgatcgctggtaataagcttgtctgaactcccttaaacagggttccatttcttaatctccagacttcttcaaagacacacgccatgtacaccaagaaggatgcacaggtactactcgggatagccatcaacacacgctccacaaattctatcattgacaaaccagggaaatttcctatcaacagaggaaaacttctagagatccaaagggccctgtaaacaccacactctaaaaatatggagacaactctcttgctcaataccacagagaaggcattgtttatccccagcaaaaggcagcttattacgaattgggatagcttcattcaaaaacctccatagagacatagaaagccttgggtgaatctcacctttccaaatcattttccaaatgtcctttttttgattcatacggtacccttgatccacccaataggcactcttcacagagaaagcgtcattgtcgttttccttccagataatctgatccttatggggaaaggataatcgaggaatttccaagatcctcttccccaaagattccccaaagatctgtaccactatttcttcattccaggaaattccattagaaagatcagctaaagttttaaacgtataccttctactcctcaattgttccatcaactgccgaaactcatcatacttcaaccaagggatccacggttgtctccacgcatctatcaacttttcgtcagcagccatagctagagaacctttaagaataatacttcgaacttccaatacatttcttcagcaatacgaatcactctgccttggtgtaactgcccaaaagttttcatgtcgacaatacttccttaacaggaagttaacccaaggtttgttatctcttcgagccacactccaagcaagtttggacagtaaggctctatttaagtcttcaaatcttttgatgcctagcccaccagatgactttggttgacaaatgttgtcccatgccttgtatgctaaatatctatccttatccgatgtcccaatccaccaaaacttcctagccattgcatccatcgaacatcaaatagataaaggaaccttcatcgtggacatattgtacatagggatagaggctgtgaccgatttgattaacgtaagtctgcccgcataagaaaggagctttaacttccatccctttagtctctttctcatgttattcttcagaaattggtactcctatgcttttcttcttttaaaaacaaacgggttccctaggtgcttctcctgtccacaaacttgatcaactcccaaagctttaagaacttcagctttccttgaggtattatgagaaaacagcacagtagactttgttttactgcatgtctggtcagaccaagcttcataggttgagaggcatttcatgatctcacaagcttccccaacattagcccgcgtaaataatatcgtatcatcagcaaacatgagatgagaaatactaggggctgttgggttttatgccctaaataaaactcttt

SEQ ID NO: 378322 - DNA, 1182 bp, Cannabis indica
ctctctctctctctctaaaattattgagctctctctatcttaaattcagctccattagtgattgagtgtttctccactcaattaggggtaatactcagatctgtggaagacattgtagaaaaggagttttaaaattcaacaaagagatcgagatttattacttgacaataccccgctacagattgagaatcaagagttagagtgattgaacggaaggagatatttaattttcttgcaaccaaagtaaggttttctaaactaatacatgttatttaatcgttttatgatattcattttttcggatgttagattattaagtgataatcagacatacatattagtaaattaagatcttgataaaataagttttaccaagctcccccaacctctttgggcgtataggatgtataacgccgataagtacttcatccccttcaaactaatatgggccaaaaagatgctataataattaagtacccttctaaagtgagggtggagaggaagaatggctcactggtcagcatgaggtctggaccacgcacaaagaccctcccctgggtgattggctagttgagatgggagacaaaggaaaataatggaatcccaaaaaaggccactagcatggatgttatcagccgcttaactgttagtttggtcaaactgccacatcacctttagcttggatgttggctaagggactagcatggcctccgtaagttcctcgcctgcatagtctacccttagcttgaggcgttgtctagagggagaaagaagcatccctttcataatgaaatccccgactatttctttgggagactcttcctcctctttcttgtcggaagcttgtttaatttttagatcattaaattcaggacctgccatgcaccaagcaatgtgagggtccctgattgggtcttcttacaaaagatatcaaagaaacttgctataccaagttcttgtgatcttgatatatctaaaaaaaatactaaataaaaagagtaggtcattactaaatgaggtcgaacctctataaacactttgtgtcatttattgttttttcttattattaattatcaaacattttcattgtcgtttaattgacatgactaaattcgaggtcaacaaaagtaataaactaaactttacaatttaaaaaatatatattcttttttttaaaaaaaa

SEQ ID NO: 378323 - DNA, 2355 bp, Cannabis indica
ccatttccttgatctctttggtgataatgtattgcaactgaaattatttttatacttatgaaaatttgtaatcataaatcaaataatcaacaacacgagttattgtaacttaaatcccattagacaatttgtcttcctgcttttcaaagattgtgctatctgtttcaatactgccattgttgaataagcaccttagagcaatctcataagcagcaaaaatggcaccattaaccacaaatgccctagaaaccgcagtacctaaacctcgccatagcacactgaatccttcatgtttgacactcttttgaaaacaatcaataataccattatacttgagaggaatagaagatggagattgagcctgtaatctggtcttgataacatctaatggatagcaacatatccagctagcaactccagccagtccacccgagaccaacattgtctggaggctttcttggccgccttttctgcagcccggatgaaaatgctctctcatatactcataagtcgaaaaataaacaccatgagcgggtgcatccctgagaacagttatggtaaaacctctatacattcctctcaaaccttctcttttcattatggttttcacaacacttacagggcctttatatggttgaactttatttgttttcgcttggcctgtaccctgcaattgaaggcgaatcttaacaagctctacgggggcaagcattagactttgaagagcaccggttccaactcctcctagagccactcctttgtaggaaggagggtctttagctgaaacagacgagtcaaatgctcgagagaggactgcgtatatctggaaaaccatggcattctagaacaaaaagataattggtcagttcagttcggtgtaaggctgttacaaagcttgttgaagctacattatacataaggatggaaaccgaaattggccacacaaaaacagtttgtcacataagagaatgtcacaacatatcagcaatgttccctgtgtatcatatggcaattcaattgtgtgtttggttgaaaattttagtgactttaaaagtccaaaacagctttggtgttctaatacatagtaaaacaaaagagccacacaattgtaaaaaaggtttttcagtatatatgccatttcaaaggtgaaaaaggagaacacaaagtttcttcctaatctcgccaaccatttttaatatggattttccaaaacaatagcaaagataattgattacatattctgtttctttggccaattcttaaagattgtttcggtcaaaaactctcattaaaagctggaaatgaccctataactaaactccctcagttacaataaattccacaacaaaaaacaccaacaggataaacacacaagtaagattatttacacatattttgaaacaaaagagagatagtgatagttaattaagctgacctgaaaagtaacagaggccaaaggtgctgccatgcctctgtagagggcaccaggcccttcagtagagacaacatttcgaaggatactaaaggctgaaccggtgtgcaagtactgctgttgtcgaattcgaagggtgtcaaggggataaccagagactataccagcaatgcctccaaaccctccagccacaaattctctaccccaactgctagcaagaaactctggccaaaaatccatcttcttctcctttatcccattaaaacttttcccttatttgaaagaaaccccaattcttgttttgccttctagagctataaaaatgattcctttagcttgcacggttcaaactcttccacctaaaaaaatctcctttttaacataatccaatttggggtgggattatattgacagtaaatctacttaccaaaacaatttccatcaaaattccttttgaaggtttctttgagtcaccaaatgctgcatatttaagtaatttgccactttaaacataaaaaataaacaattacttaatctttcaaaaatcccacatgtctttcatcaacctcttcaaaccattgtaataaactattcctagaaagatgagagaaattgaaagagaaaaaaaaagaccagagtttaacaaacaacaaaggtttctctcacaacaaattcttaatttagaacgaaacaaaagccaccggttgctattgtgttggtaattgtggtctggggaactgggaagaaacggcaaagtgcggtttcaatggtgatacacgggagtgacacgtggaccaataaactatccacgttgcactatttgttgatgatgcaatggaaagttaagaccataaaaaaaggggagttatatttgcaccccataaaattataaatacacctcaatattaaaaaaatataaactt

SEQ ID NO: 378324 - DNA, 6343 bp, Cannabis indica
ataagtggattttaatcaacaagaataaaagacaaattaagaatgggagaaaaaataactacaaaaaaaagtgaatttcaagaggtgctaaatattattttgtgttcaaaaaattataagatatatcataaaaaaaagtccaccattttcaatcttggccataagaaaaacattttgttatcataaaattaaaaaaaaactaaaattaattgtaatccatgaaaaactcttaggctcatttacgtacgacaaccaatttgtgagagtgagaatatactaaagatcaaatgaacagtgctcagctcaattggaggttgagacaaatgattgcatttatatacacacaatgattacaacgacaatatgccatgtggcagagtatatacaaaaagcagagaggcaaaaaggcaaaagggagaataacagaatggacaagataaaatagcataacagataatggaaagttctatgcctgaaccaagattagcacaatgacctctgtattgcactaaaagggtgagttagagtttgtcactcaaagtttgtcgataaaaggtttgaatttagagtgtgttagcccctttgtgaagcaatccataatttgttcttgtgagggaatgtaccgaacttaaactttcttttgtagcactcgatctcaaacaaaatgaacatcaagttcaacgtgttttgtaccggcatgaaaaaaggatttgatgcctgagctttggcactcatgttgtcgcactacataactagtactgaaggcaatttgaactgcgtttcctcaagtagagactcaatccaagtaatttctgctgcgacttgagccaatgctcgatattaagactcggtgctagaatgagcaaccactgtctgcttcttggaggatcaggcaagaatcaccaaagtagacacaatgccctgctatggatttttttatcattgggataacatgcccaatcagcatcgcagtaccctgtaattgacaaattgtcactatattttaaatgaatgccatgatggatagtcccttttaggtagatcagtacccttttggcaatactccaatgaaccgtagtagaacacttgagaaattgactaagtttgttaacaacgaagactatgtctggccatgtgtgggtgaggtactgaagtgcccctatcacgcttctatattgagtatgatcaactaactcatctccatccagcaaaggcagtggttttccacctgtcataggtgttgtgcacggtttaacattggtcatgtcaaggcgagtgagaagctccataacatgctttccttgagaaagatatatgccagtagcatccctaaagacttccattcttagaaagaagttaagggctcccaagtctttcaaagtaaaagtcatgtgcaacttgctaataattttgtttaattcttgagtattgttgacagtaatgacaatgtcatccacgtagatgagaaccatgatgacaaactttagagttttcagcagaaagagtgaagtatcagcacgtgagttgacaaaattccacttaatagagttttgtttcaattggtcataccaagctctaggggtctgcttcataccataaagagattttttcaacttgcaaacataatttggtttatctttgtcttcaaaacctagtggttagcacatataaatatcttcttcgagtttctcattcaaaaaggcattattgatatcgagttgacgaacttcccatccctttgtgaaagcaatcgtaagaacaatcctgatggtagaagcatttatagactaaaagtttcaccaaagtctaaaccaggtctttgatgaaactcctttgccacaagtcgagctttaaagcgttgaaaagttccatcaacattgtatttttccctgaagacccacttgttattttttttgggcagaagacaaagtgaggaagacaaagggctgaatagggttatatgaacccaatggcgtcggttatttcgtattaaccgacgccataggaaaatgcatcaaccaatgcgtgcccctatagcgtcgattattacaaaataattaacgccatatgtggtgttattaaaaatttaacaccctatcacgtcggttattttgtaataaccgacactataggtttattaaaattttatttaaccacactctataacgtcgattgtttattactaagctgaaaaaagcgcctctaaaggcttgttttgtagtagtgagtatggtttttatacaattaggagtggttattggcttgcaattcgtaatgctgcgaaatctatatcttcgacttctactggtgtctccctttggtagaaaactttatggaatttaaatatgaaactcccaaggtaaaaagttttgcgtggagattttcattcaattccactaaagttaatcttcgaagacatggacttatcaacgacaccttatgtccaatttgtactagtaatttggagactactcatcaagttttttaggaatgtagcaaacttgtctccattcgaaagctacgtgcttttaaggttggcaacccacacatgattgttagtgttatttattgtttcatttgcaattatgctatgcaaaaacaaactactataccgctgtagataattggaccttgggtcaccgatttcttatgctcttaccaaagagaaggccgacagaataatgctgatggctttcctcttaaagttacaccagtggcccgacccattggactcactcacctattgggatcttcaagataaatatagatgctgccattgattctcttaatgcttattgtggtctaagtatggttatcaggggactctttagtcgcttggaaagtagaagaaaattgcattccagaatgggcaaaagccctagcaattcgataggctatgactcaatgcatctcgtttggcattctccatattcaaattaaatcagattgttaagagcttggttcataagctcaatatataattctatagttttagcttcttcttttgatttaattcttgatgacattaggaatatatgtactaagtttatttttctgagttttaatttttgtgccagatatctgttaattaataatatagtgttcgattctcttgccaatttttctttaagggcccatttaaaaataatatacaattttattgtcatatcgtttttcttagaatcaatttataagtaatatgttaattaatattttaaattttgaaaacttatttataataatttaaaattgtacattttcactaattttaatgaataaatttttgataaaaaaaatttataaatatacgtgtgataattctttcatttaaattcttataaaatttaaaatatattaataaaatcaaaattaaaaaaacaaaaaaaaatctcatctgcatgggattatttatccaaccctgctataggataaataatgagattagcttgattagttatccagacttctgccatgcccaaacactgaattggacaaattagcctgtctaattcaatccagtcaagcgtactaaacgggtcctaaaagctaatactagtaagatttagtggtatctgtcatgtattcaaaactttatcttaggctaatgtcaattattaatgaatctcttagctctcgacccctcttaagtgtcctcctttttggtggtgccgtcttaggctattttctcaaaatacataaataaataaataaaaaataatcaaatcaaacatgccaacaaattgaacatttggactgtgatatagtgataaagataaaacttaatcatgtaatatgtaccgtaaaaaacacaattccttaaagtctttgcattttcccaaatgttttcattggtatatgtatttccttttaacaaaagtacacaagaatgattagaccaaaagctggtgtggtgtaataatgatttaaaattggtatcacgtacacaaactcctctctttctacttctactgcctgcgtgtgttattatttctagaacttcgtctgaagataattgataacatttttatcaagttggaaagacttagccaaaacatcttcagacatttcaggattcgagccaaacacagcgctagagattataatcactcctggattttggctgctgagagctgcaattgccacagcatttccatcaccaacattcttctggtaatggacaagaccaactggaaagacaaacacatcacccttatgaagaactttggtgatccgacggttctcggggcttgacgttatgaatccaacttcgagactgccttcaacaaccgtcaagatctccgaggcacgagggtgagtgtgaagagggttgactcctttcggggcatagtcgactcgaataagtgaaatcccaaaagtattgagaccagccaattctgatactgtaactggcttcactgctgaccctatttggttcgaagtgttgcttggtatgtgaaatccgcttaagaaaaaatcatcagctgtaaccgtttttggatccttgcaactcagaccattcattaacactgtccaaaaaaatttgttcacaacttaacgacaaagttttctgtctctttttactattcattttatttccaaacagcttcccaattaaccatgattatttacataattcacatatttaaaaattttatggctaagcttggaaaaaaataatatacgtaaatatataaccgtacctggtcttgatgtatctgcaacgcagaaatcttgaagaggactaagatcaaatgctaaggctagcatagagaaagataaagcaacaaataaggctgagaaaacgatctgacttgttaccattgtcaatatatattagcagaagaacaacaagaatatagcttgaggaaaagttattttattttttctctctttgatatataattagtatgcaccatgtgaaggaggaaggagtttggaaacgtctttgtttatatatatatatttatatatagagaattaattaaaatataccaagaatgaacaaaagatatataataatatttggttgtatgtataaaaccaagtgcatgtggtagccccatgggccatatggccgtagaattggctggcctacgccttgacccgcgtgcttgaagaaacgtgagtggccacagctgcatgcatatgctatgatcatatttttacattttgtccaacaccaacatgtttaaacattagggaacacactacttatatctctttaccatgcgggctcttccatatgtaatttattgatattatatgtctattatttctttttatttttttgctgaagcagaagaatatattgcacctcaaaactttacagccctattagcaccttgtcaatatataggcatgtgttcaagattctatacaacttagtaagcatattatttttgctctatactttcctgtgagttaattaattatctttgggagagaatggatgtaattctatttttaatccctaccttcatagttcatacgactgatttgcagaggaaggagatgaaatctttggttccaaaaagtgtcatttcgaatcctccacagcaatgaatttgtaatattatttaataatataacatgtagattaaaatatgacaatatatattattatgtgaatatataatatattaagtgttggtaaataaattgtacaaattgtaacctactttgtaatgagttataatattaattgctttgtaacttcttttagttgatcacaatttggtgtaataaaagagatattacatataaaattgatgataggattcaaaaattatgaaatatagttgttacaaaatatattaatactcatttatattagagaaagaaaaatttacataatagaccaaaaaattaaaagaaaattacaaaagtacattaacacaaaaaatttatatttttactgtttgaacttttttatttatagaaatacctctacagtaaaataatgaactacttttttggttgttttataatttatttatagttttctgagcaaagtgtatttctgtaattttaaatatttacaagtgtatttttgtatttaaaaattttaggccgcgaaattgtaaataaagcataaaaaaaatatttttaaaaattttcctaagagaaatgaggtggtgtgtgtgaatcataagtgtgatcaccaaaaatactatataaaggagtctaatgtgcacatttgtgtggactagttttctatcacaaaagtactttgttagaaaatcataaggcttgatatttctcaaacctatttcctagagagtcccctcagggcttagagatagggaaaataagcttttggaaaaagtgtaataccttgttcaag

SEQ ID NO: 378325 - DNA, 1668 bp, Cannabis indica
ctctctctctctctctttgatattgatagttcatattgggttttcctctatttcacaatgtacaatatattcaatttggcattagagcaatttctgccgatctctgtgagcatggcgacaacagatcttggctctcatcgtagcactaaaactccagacaatctgaaacttccaccactgtcaaaatcaaaaccaagaacagaggaattgaagactctctcgtctatttcaaccataatctctcgattaaactcaacgatcacaacctcttgctctaaaacaagtgcttgctgcgattcgaggtaatcgtcttcaacgctacattcttgatgctccccctcttcaattcattttagatgatgatcgtgctagtactccaatacttaatctaacctttcttgaataggaggttcaagatcagctgctagtatattggcttttatccttgatgagtgatagtcctctaactcaaatggttggatgtaacaatacaagagatatctagagtacattggaagaacatttcactattcaagtctacaaaaatcttggagttttgccccaaacttcaaatctcaggtaaggctctttgtttatcaatgaatatctcctcaaggtcaaataatatgtttatgttgaccttcttgcttcagttggtgaagtcctcaacactaggaatcatgtagttgcagtctttaaaaaattgtcaagtgagtatgaaacttttgttatttcctctaacacttgagttgaatcttgttttaatgttaaaattgaggccttcatctcagccataccaagtatgctagagattttttgtgtaaagctaagattaaagtttcttctacaccaatgacaattgggttgaggctttcggcctttggcagtgatccatttgagaattttcaattgtacaagtctattgtaatttataggtgctctgcagtatctcaccatcacacgatttggaatttcgttcaatgttaataagttgtgcccgctcatgaagtgtcattaccaatcccattgggttgaagtcaaagagatccttagatatgttagtggtactttaagctttggtttacgtacacttcaaagaccccaactttattcattaaggccttttgtgatgctaattaattagtcgatccggctgattgaagatccacttttggccatgccatctttcttggaaaaaaattggtagcttggtcatgtaagaaacaacacactatttctcgttccagcaccgaagttgagttttgaagcttaaccaatatttggctcaactatctagcttggatttactctttgttttctagaaatgtcaaagttcgggggaaaaaaatcataattagcctaaattatatagcaaatcattcccttgaacttttttggtcgttaaaaattcctcctgaactattgagattgttaaatttaaggactttatctaatttcattcaattgtactgtttcagtgatagtttatgtactaaaccaggctccccagactttgatatctactaaatcatgcccctcaaactttgatatgtactaaatcataccccatgaactttcatccatgttagaatttttttactaaattagacaaaagtccttaaatctaacaatctcaatagttcaaggcactacaccaaaaattagaat

SEQ ID NO: 378326 - DNA, 4923 bp, Cannabis indica
ccgcatggggaccagacaatgatatctagtttggtaagggatggtgagccagatggcttagggagggcctgatacatcgaaattgaccgacaagtcccctaacgataatgttgtcaagcttggcagcagatagtgtagatcaaggagaaatctatcaaagctcatctacctcaccttcttatccgcctcctatagatgtttgtttacctcatcaagcttagtgtccttcgtaggaacttaggcatccttctcagtaagttgagcatctttctcagcaagcatgggcttgaccatgtttttgaaaagtatgaaataaagatagtagggaagttaataaaaagttgcatggaaaaattgaatggaaatggttgcacagaaaacataagttgggcaagtattggaagactcattgaggtagcaacttttcaatgcactgggtgtcagatagtccaaggaattattgtccaactcacgaagttggtcaccaacagtaggaagacatctctcaagatagctctagaaaacttccttagctctgtctaccgtgctggatgaagttgtctgaccctgtctttggtggacctttcctgggtacctttggaggagaagtagatctcaataaaggatcaacaatgaacggaaagggttgcacaagaaaacataagttgggaaagtataggaagactcattgaggtagcatctttcaatgcactgggcgtcaaatagtccaaggaagtattgtccacttcacgaagttgatcaccaacagtaggaagacatctctcaagatagctctagaaaacttccttagccctgtctaccgtgctggatgaagttgtttgaccctttctttggtggcctttcctgggtacctttggaggagaagtagatctcaataaaggatcaacaatcacgggttggttaaccagaggtggactagaagaaggtggaggcagactggcctgggtaacattcgaggcaacctttgtctgggtagtttaggactaggtttgcccatcagatgggctgcttgacagtcgcttcaatagattccttatcctgaaagccatgtctgcaagagaaaagcaacaaggtcagaatacaagtaataaacacaaaattcaagtaagagtaaaagagttactaccatcaaattcctcaagatggtctaccctaggaaaaccttcctaaggccttttgtcttctgaagaaaactcactagagttttccttagtcacaacaaccttgcctttgccttagtctgttggtgcagcccgagcaagtctcaccaacccttgtccctcaggcctaatcaaaactacgacatcaccaatagtgcccccacgtgtaagatgtcatcaaagagcttggtccctcctagcctttgtccaagcaatctcagccaaggagatctcatcatcagatttactcttctccttctcgactataggcctcttttccttagctttctccttctcaataagagcattgcctggatcctcaaggggattttctagggtctcaacaccctgaccaggagggtacatgttgtacttcttaaagttctcttcataggccaacttatagatgttacacttagtagcaggaagagacaagatgtggttggcccaatcccttatcttcagtgtggggatcggtcaactgtaagtaaggacttgacaaaagagctggcaaacaccttttatctcataagctatgaagtaaccttgtaacccccaatctttgacatgggcatcattggttccacccaaccattggtagccctgctagctaaaatagaattattcagtcctggcctggactagattttagctcaaaataataaatcacctcaaaaggcaaaggcttcgactaacctagttcggcgtatgggaagaagagtgcttagaggtattttatgccctttggtgtgatctgagttagacatagcttgaagaattagctatgtccctaaagtatggatgcaaaggaagaacctccccttgctcggcatggggaccagaccatgcttctagtttagtaagggatggtgagccagatggcttggagagggcttgatgcatcagacctgaccgacaagtcccctaacaataatgttgtcaagcttggcagtagatagtgtccccaccagccataggctcctcagctaggctggccttaggtggttcagcttgctcaacctggcagactcttcctcatgccatgatcttggtaataagaggattagttggggagcctggcaatatgactacttagtcctagcaattgttggatgtttctcagagtactgggtgacaatcatagtagcctctgctacaggaagatctctaaacacaaaagatgtctgtccaacgggaaatgtgttaagcacaccctgtcggaagatataagtccaagacttgggaaggaactacctccacccttggttcaattcccaaatgaaccttccgtagatttcaccacctattcgctcagaatagtggtgatgttggatctcaggttctagaaaacaattgctcacatcaaaatcactcaaagagtttccagatgagcttttagtggaggaaatggctgagtgatagtcttcatacagaagactaagtaaatcctcatcgattctactgtcacctccccaatagtcacgcgggttcatctattcagaaaggcagagggaggtgaacaattggagatcatgaaataaacctggagaataatataggttaactagctagaacctaagagtattaactgggcaacctaagacaatggatcattaaccaggaagccttaatttgataggccatcaaccgaccagcttaaaattggttcccgaggaactggccaacttgaaaatggttcaatgaggactggacagagttttgatatggatctaaacaaccgaataggatctctaatagacccaaagtaccgggaagggtccctagtcaaattaaacaacccaatttacacattcgaagcttagttctccgtgttctttgaacctcaaagttcaaagtgtcaaaatacaaatcaagattcaatcattttcatcaacatgtcatggattttacatcctaaagctattgcacagataacaaatttataaacactactctaaaacatgaaaattaagaagttcaaaggcttaaaactcaataagggaagaaagtaaaaaacttgaaaaggagaagagaagttcttgaactcacccactatgaagacctcacaagagtagtaatggcgaccctttagcaagcagagcttctcgaaggattcttagaccttaggggcgttgggtttgagaagcgtgaagttacgtgaattttgagtttcaaaaagagcttgagagagttttctaagttcaaagaaattgaatagagaaaaatcagaagagagaaggtacgatacttatatatgttctaaaaaaattatttttccctcaaaaaatcttaatggggagttaatgacacaaaataggcatgcataggaaagagaaggcaaaggttttaaacatggaaagtgtgcagccatcacacgattctccacattgatcgacataaatttgatagctatcataaaatcatgttagtctaagagaccaatatttagccatgcatatatgcacaataaaagggcgtcacaataccagacggagagtaaagaccctatccggacagacgtttggacatggacttagggggtaaatattattccaaattttttccacctgacgtggcacctccatgtagcaaaaagcaaaagacacatgagggacaagtcaacactaaccgggcaggctagtgttgtgcaaccccttatccgtcaagatctcagggttgcaagatggacttaaacaagaagagcatggagacttacaagatccaaatcttcaaggttctaaagcaagttcatcctaatatcagaatatctagcaatgatagagatacacaagcattgtcaagaccatagttggatatctagctggctagccgagggtgacaggtcatgtacctgggagcgtctaaatatggttgtcaggccaaaaacacatactatgctctaacatttgtgttttttttctatcagccttccaaaagatttcaaattgtacctagtggtcctacaacttcgaaacgaattgaattgtgcacaaaagtatgaaagcttcatcaaagtgtaagtaccctattttctagggatatttcccatctgttatgtaaaaacttgtaaaacccctaacactatataaagggccttaacactacgtgaaagggactttaaatcattctttctacacatgcacttaagagcttagaagcactaaggcattaaagtccctcttcacctcatcacttcacaagtcttctcaaaattattcttctcattgtaatagtgaagagagccatagctagaaattataagattttagcctgcaattttcatggtattatctcaagattgaatacaacaaaaggggagtatgtcattacctgattaaaggggtcgaacctctatgaatccttatgccatttatatttattatcattctccatgtgatattcataaacaaaattagatcctagttagactctgtatcagttggctaaattcactgtcaataggccaagaaatctaaaactttcgaaaagttcaaagacttgaaagccatggctaaaaagtaatcaggtacatcattaaaagacactttgatcagatcgtggtggagagtattttgattcaaattcaaagactacttgctagaagaagggatcttgtcccaactcacaacacttggaactcctcaacagaacggtgttgcagatggaccttgttagacatgctcagatcaatgatcagggtcgtcttaaatatttttgaggccctgttctaatttaaatagtt

SEQ ID NO: 378327 - DNA, 5128 bp, Cannabis indica
gtccattcattccccaaagaaatattctacatagtttttcaacctccttagtaatactatggggaagaacaaaaatgctcatccaataatttcgaaggcctagtaacacagaatgaatcaattgcactttaccaacaaatgaaagatgcctgctcgaccaggtatgtagtctttgttttatcttttttatgatggtgctacagccgtcagctttccattttgttggcctaagaggaactcctaagtatttgagggagaatgtgccttcaactaactgaaaatctctaagaatagtttgtttgtcattggtgttcatgcctttaaagtagacttgagattggttagcattaatgtgcaatccagacaccttactaaattcattaagcacccatttaagaatcataactgaggggattgaacccttgctaaacagaattaagtcatcagcaaaacataggttaattattttcagccccttacacataggatggaacctataagaagagttagaagctgccaattgaagtcttctcgtgagatactccataatgagaacaaacaacagagtagagattgggtcaccttgtcttaaccctttctctcccttgaatttgccttgcactctaccattcataacaatcgaataagatgttgttcttaaacacaccataatccattgaataaacttctgaggaaggttataggcagctgacaaatcctccgaaaaatctcaactgacagtgtcatatgccttgcttatatcaattttgattgtgcatctcgaggagactaattttctcttatagttttttaggaggtccttaagaatcatcacattatgagtgatagacctgccttgaatgaaagctccttgattttgattgatcaaaccaaggagcataacagccagtctagagcataatagtttagatatatacttatagatcgtagagaaacaagcgataggtctaaagtctacaactttagtagggttctcattcttaggaataagagaaattagagttgaatggaattcaagaggaattttacctgtgttaaagaagtccttaacagtcgagcacaatttaaatccaatgttaggccatagcttcttgaaaaaactagatccgtacccttcagctcctggagatttaatatctggaatgctagaaaaaatagccttgatttccttggtcgagaattgtgtgagaagatcaaactgctagttcaaatcaagcctagctctggtcaaagcaggcaacaacaagcttactggagacctgacttctgctccccatgataccccgaaaatgagacataaagtgatcaacaactttggggaaaattatcaataacttcaccttgatcattagtgaaagttgtgatgttgttctcaagctttctttttttaaacaagcatgaaaaaaggagctattttcatcccctttatgaagccaagttaccttgtttctcagccttaaaaagttgtgatacatcttttcttggttaagaaaattaacagcaacctccttctccaattcgagaaaaccagcttcctttggatgagcttgggcttgcatcctagcttcaaggtatttggtatttgaatcttgaaaagacttgccaatgtcaccaataaaatcaagattaaatttcttaagacaatgtttcaatctcatcaacttgagatatattgcattgagacccttagttgcaatcggcttcccttaattttcaagcacgaaagttctgatttcagtgtaattactccaaaaattaaaaaacttgaatggtttgtagcctatcttgactgaggcagcattaaaaatagtgcagaagtagtgatcagataagtcattctactgagtcatgttctagcttcttttggctcttcttcttcttctttgtaacctccttagaaatatgatccttggttattggaccatattcttgtacttcttcagatggatatagtccatactcaagaaaattctttgaggtgaccaagcttgagatgttctgagcatctactaaaagttgaagattagcctgcgcccttaaccttaaccccaaggtaaaagggagacggtagtagcttgcgaccaactggaaagataggtggtcgatatccatgccttgcacgatatagaaatctttaatatattcacctatcttagacacctccgagtcgattgtgtcagtcagccatgggtgctccagttgtgaaaaatagaagtacccaactgattgtgcctcagactaggcttcaagtcaaatagctagttcatgtcatgtgcggatggctggcctcaaccttgtttagcgtacaacactaatagtatggccaagtacttgatgcctttcaaagtgaactgggtcgggaaaattttatagtaattagaaatcttctaaatttatggatgaagaggcatgatcacaccctcctagacatgggaccagaccacgcatagagcacctccccagggttagtggcaggcttcccaacggtaggcgaaacatctttaacgtctccaaggaggcccttagcatgaagattcatcaacctcttgtaagtgagagttgatggaggtgaaacccactgaggagcttccttttccttagtcctcatgggacgtgcctcctcatactccacctcgacatagtcttagtccaggaccaagacctcactagattctgagacgggcattatggccacgatatactctccaaataggagaacctagggagcctcttcctcttctccttcaccatcaagagaagtagttgcatagacctcgctctagtcctctacttcttggacttctttttcatcagcgggcatctcagcatcctccctaggatgtttagcatgttccacactagccatttcaaagagtcgggaaaggtgtggatcctcaatcgaggtcctcttataactttacttagttttttccatcaccctacgattgaatgggggattccatttgatggtaatgcctccatccatacccctctccaccgatttggctgaggtaatggtggtgttgcgcgacgagcttcgaggactccgatgagtcacttgtaacctcccactcatcaaagcttgaggtcgattaactcttgctctccaaggatgaagatgcatggagtatagggtggcttttgtaaagcaaataaagcatatagttatctatctaatgcttacctctccaaaaattgcttgagttcatctataaaagaaggaaagagaggtaagagtcagacaaagaagtatgaatcctgcaaggaaaaaacatgtctaatgcttcgaccaaacaaattcaaaagcaaaaaaggtaggaaatttcattccaagaaaaaatttctaaaatcgaagatataagggcaaaggaaggacctagaaagtgctaagagactctgaataatcattttcaagcaattttagcacaaacaattgggaatcgattggaaattgagaatcataaattgtccacattcatttagactagaaattgaaagccctaatttccataatctctaccatcgaagaacagtttcatacaccccaaattatcacggaagcaaattaaaaaataaagtgaataatttaaagaaatggaaaggagaaagaaaacttactcactttttggagattcttgaagaattcatttagatggtttcggtagattgggattcttgcaacaactcttcgaagctttgagagaaaaaaaaagaaatttggctctgatattctgagagttaaaatgactaaagagtgtcaaagaggcttaaacccctttttataggtgcttagatgggttattcagtaattcaaaatttaaattttagctttccccctaataaggatagttaatactcattgaagagtacaaacattaggcacgcaatacctgtaactttcattgcgtgtctcgaggtctaattttcaaggcaagaaattaaatgcccaagatattgaagatacagttgtatcttcacatccttcaatcatatcacatcgaatcaagacagagtatgaagactgaacatgtgccacctatccaaccaactcatcgattgagtacttctgcatgcgagcacatggttcccacacaaacttgggagaaaatattatcccgaattctacatagggtgatgtggcatccagtaaggtgacacgtggagaatattaaaggtctggacgggaaattttccatcaatgatttgactagagaattctatactcaaaaatgataagtttatgccttcggtaggaatcatccgaacagaacctatatgtgattttccgcacaaattctcattattcagtgatattgaatcctgcgaacaagataatgcaactgaacaagatcttcaatgatattttccataaatatattctcatttaataattcaatcaaatccctatttttgtgggattgacacgcaccaacagagattatagaaaactagcttaatcaccaatttattcctaaatgttttgagaaacttagttgatgtattttttttcctataaatttttcccctaaactttgacatgtatgaaattatgcccctgaacttttctggccgttaaaaattccccctgaactattctgattgttagatttaagaacttttgtctgatttcatataattttactaaattatgctccccagattttgatatctatcaaatcataacaatctcaatagtttagggagaatttttaacggcctttaaaattcaaagggtatgatttggtacatgttaaagttcgaaaaacaaaatttttaattagcctaaataaatagtggagacattccataatttagggatcaaaaatcatatgttattgaaagcttttaggctatcaaataattgtaagcttttcttaaggatttttaagaaattcattaagccaattccttgtgatcttaataagtttttgaagtaataataaaaggagaataaactattacctgttataaaataatataaaataatataaagtagaagagaagaaagaagaagaagatgaagagagaaagagaaagtgaatgagaatttctgagttgtttattctaatggggtaaacccctatttatacaaatacaagagtgagat

SEQ ID NO: 378328 - DNA, 7446 bp, Cannabis indica
tcaaccctatactgtttcctaatgataattacatcttctgcaaagccaataagattgaagttgctaacgtgcttcggctccttgaaacatatgagcatgagcgtgcttcgggacagaaagtaattttttgccaaatcctctgtgtaattcaacaataatttacatgaagatgctcggaatcatttgtgtggcctgcttggtatggcatgaactactgaaaataacttttacttgggtttgccttgcactatgggtacaaatgctatattgggttttctcaaagataaaatgataaagagcattcaaagttgggaggctagatttctttctaaggcgggaaaagaggtgttgttgaaaattgttgcccaatctcttccaagctatgcgatgagcgtgtttctccttactaaagaaatatgttctagcctagaggggttgatgggaaaattctggtagaaatcgcaatctaagggatcaactacaggtgtaagctggatgaattggcggaaactatgtcgtcgtaaagatgcagtggggcttggttttcgtaatttgagggagtataacttggcatttttggagaagcagggatggcgtttgctcactaatgaaggactattggttctaaaagtttgtaaggctagatacttcctcaaagggaattttttatcagctgggttgggtccggacccaagtttcatttggcgtagtgttttggaggcaaagaatctaattcatgcgggtgttaggagatcaatatgtgatagtaaatcaacttcaatcttagaagacccgtggcttcctggaatggataataagtttgtgacaacttatcaccctcttgttggtaggtccgttgacagtcttttacaggtggggacaagagcttgggatgttgaactgatgagagacatcttcaatcagcatgatagagacttaatcctttcaattcaattgagtgtttcaattcaattgtttcaagtaactccaatgtttccctactttaaaaagttcatggcacataaaaaataatataaaacattctcaaaacaatgaagtccatatcaatatattctgcctaggctttgctacaggcagccatgattcaacaagattgttcaaaaatagtgtaccttgacgacttaactgtctagtttctcaacatgtattatttgcaactaaaataatctcctaagcttaggagttatattgcccatgcaagttggattggttaggtttaggatttcgaaagaataccaagaagataaggatcgtgttagagtcattaatacaagattatagtttcaaactttgtatgagattttattgtatggaattttatgtatgaacaaattagaagcatccaaagtgctacgacctcatttagtcatgtcctaaagattttccattgttgtaaaaaggactagtcaaattaccagcgccagctaccaaagcaattgctaattctttcaaaaggacaagcttgtaaattaagttgagtgaaaattgaaatcaaattacgtacattttcacaacacagttcgaactttcccctccatatccattgatgtcaatctcaagaaatgcatacggatggggacatttggtactcaaatcttctttacttaatttccaaggaagacaaagatcagtcaatagctgaaagcttggcaaacatatatctaacgaaatatgttatgttatccaaattgctgaaaaatacgactccatgaaagtaaactgttgaatagagttcagtgttctcaaagtttactgttaggactccaatcctgatcccctacttaactgtataagtcacctcaaattcccactggtaatgcttctttgtattttgagattagagggctgaaccatctaatccagttgggggcaaactacttgaagcaactcctcaatctcacagcttatttcaacaccatcctcctccaaccttttacgcatctttggatccaacttgccagcagctatataaatctttagcaacgatcggtaatcattggaattgagacggtgataaggctttagagttttgagaacattttcagcagtgtgaacatctttattttcctcaaaatagtttaggaatgtacttgttaatccccaggacggagtccattctttgtcatctttagcttcagaaacagcagcatccaaataaccaagggcccaatctagctgacgatttcttaaaaggaaaagcatgaacttttcccgagccctaaagaatggccctttacttttcttcatggcgtcctcaaagaccaactttgcttcttcaaacatgtcatgatggaggtaagcacctatggcagcctctggtaatctcatatcataataagagcagctacactcccactccttgaataatttctttaatcccacaatattatttagcttagcaagagcctgaagcatagtaagatagctcaagttgttcaatgttgggtacacagacctcaaggttttccacatcctatcaacttcactgggttgatcaattgcagcatagaaactgattatgaaatgatatgcctgacgtggtgcccccggtttcatcttctcctctagcttcgccagagcaagcttagctttctcgaaaagaccagccttgacatagattgaaaccatgttactatacgttgtccaatcacacttgttttcacctgcattcacaatatcctctagcacgctttctactcctgaaatatcatttaaagaagcataactctgcatcaaaatattgtaagtaaaggtgctaggagagatgttcttctgcttcatctcttgtgcaaagtaaagaactctttcaggtttgtccagtttcaagtacatagtcatgagactggtaaaaggcaaagaatttgaaagaaaccccaattgatttatcttctcaaagagttccaaagctttgtcctccatagctgcagtacaatagcaattcagaagagccccgtaagttattttgttctcagctaatggtgaaatgttgttaaagtaattctcagcagcaactatccctttggttttggatatgagatcaagacgcaaggcatgatcagtataagagtattcaatcttcctcatctccatccattccattatctgtattcaaacatttcaaaatataactattcccttaatcaatgaacttaaaaaacacatataaagttcattaatatgacgataaagacgcaccatataaaacaaggaaattccagaactaaaaaacacctagagataattaatttgactttccatgtaaataaggcattcagccattcacagaactaaaaatacctaaaagtcattactttggagcaagggcacgcccacatagaagtccaactttgggcatttacagaaataaaagaacaagtttgagcacacccactgccacataaagtttccttgtcaaacaaggcatttacagagctaaaaacacctaaagagcattgctttgagataattgcacacccacataaagcttccatgtaaaaacaaggcattggcattactacaaacatgtaaggatcatttcttcgaaaaatacaggcacacacacacacccacataaaagtttcgatgcaatatggtttcttgttctgaattaattaaaaggaatgagggtgacctcgagagctttaggatattttttgaacttgcggagttccttaatgcagctcagaagctcgcatttcttgacgatatttccctccatgacataatggtttagtgtcttccatacgctgcctccggtcgctcccaaagcggaaagctttcggttgagacgctcaggttgttccggcggtggtgcccgactcaaagccgccgtcgccgtcgccgtcgcctccttagatttgttaagttgcccgaggaaccgcgttgccgaggtatatttgttaggattcattgaagtgaataatggttggaacttggaacatgaaactcaaaacttaaaaagggtatttatttaggatatttacaattgaaataatattgtcgtttttatgtattatgttctcaaagttgctgtcgtttttattaagatgttcatctgtgtgtgtaatttattttacaaatatttaatgagagattatatttacaaatctttaagttataactacattgtcttaataaattaatccaaattaaatatataaatatatattttataattgttaactcaaatttttgttaaaaataaatgaagttttgtaattaaaaattaactgtttataattaacaagtatgtatgaaatactaagaatttttacgtgtaattaaaatttacatactccacgagtcattattatctttaattatttccttacaatatgtttagattataagagaatttttttgaatattcactcaatctcagagggtcattcattccttaaatgatcgatcactttccccataagttctgtccctatttataggttttttaaggaggaaagttattctctttcaatcttatctaggtaactgatccttacattttacatttacaacatgtggataaaatgaaataattgtttacaacgctctttgttcttaataagaaatagtctgttgttgccaaggtaacatattcaaactatgacttgcatcttttgacgatattcatgaataattggttgtgttacgtgagacgttggtgaagatatctatcctcactattgccttttacgacaattattgaattagttttttaggaattttgagtgtggtccctcccaacttatattctttaatctttcaatatactcacgagtatgtgagtcaatgagttgcaagctcttgaagacctcgttatctacccttttagcgatacaatttcagtctgtatttttttgagtcatcctagttagctccccagatgatctcagaatatcgccaccctgcaatactgtgttttatcaacgacgtcattggggcatagtgcgaaacatgtatctatttattaccacttacccagatgctagatatttgttgtatccaataacctcttttaatgttcaggattattattcacgtgtcatgtccatatttatgactttcttaaaaatctctttctagaactgaaagagttttttaaacgatctaagctgggacaatttggtatttctcctactagtaatgagtataatcttttgacaattttactttccttgagaaagattaattaattattaattaaatgtccttttatttgacgaaatttttatccgtctttttgcattttctagaaatatctccagttatttgatctaatttgaaacttgataaatgattctccatctttcaatataagaaagggttttttcacaaccttcttttataccttattttaaatacaaaactagagagaaaaaacccatttttttcaaaagacttttgcatgtccaacttgttttagacttatttccttttcgtatgatcaacactattttttctagcttcattcttgttacattccagacccttagtgctgaagattcccaatctgaaaccatcagcacttttagaagaacctagaacatggtaagtctctgatctttatcctaaattttctatttgttattttcttttttattgatttttcatacgttcttacatcatttttgcctaaaatagataaggtagtttttgttttagtaatccccttccctaaattatttctaaaaaaaaaatctgaattcctagaatacttgcttatgtgaaaagaatgtttattccttattcaatactttggaatttagagattttagaacaaaaaaatccaaaactgcttgcattacttttcaaattgcgtctggaacatccaaaaacaataatagaaataaacgatgagaaaattagggtgttcaatgagaaacttaaccgagaagaaacctctgctcgatttaaacattttatagatgatgtagctagtgggtaacgtcgcttcttgtgagacgtggctttgcgagaatctcctagtttaactaagtatcccttggtaatacattaatatttactcgaggttaccattacttttttcccacgtaaactaaacttttatatcaaattttcgaaagagcgcaagtccaaactaccctagaaccccacaatccaattcgaggctcagttgatcgaatctagggttaggtcaattgccccatatgtgggtccattcctaaggtctcgcgacatcaggattgaagatggatgtcgtatttgctcagtcgcaccaagcgagtttagttttttcccccaactcacctattgaatgatgaatgttgcaatactaatgactcttcaaggattggtgcttggagcatcgagcatgttaaagcaggagctgtccttccctttaggcaatacttcaaggatttctgtaattatgtcagggtgcacattttcaactcgtcccaaatacttataggatcttaacgtgcttgaagtcgcattatcatatcttagggtgggagtgtccaacccctttcaagatcatgtacttttatgcttttaaggcatgccctgcgagaaaaaattgctcaagtggcttctattatttgggtactcattccaatgataataaaattatcgttagacttccaaataaaaaggaattcaagcatgacatcttttggaagacagggcttcatccgatcaacactacctagtttagaattatacataagtatccattatctcttttgatctatgatcaactaagtgacattgacttagaaaagatataaggtaagtttatggtatattttccactgtcaatatcggtccagttcgatgtatagccaatacatctgatactagtatactttgttaatgtcctggaaaggacattccacatatcattgtgtaagtaaactttatcgttgattatcacgtcagtgtaaatccagtgcaccgataaatcatgtgactaaatagtttgaagcatataatcataattactttctactgtgatgacatcactgtaatcgtgagtaactatatgttttaaatttaatataaattgtatattaaaactataatcatggaaactacgtgtaaacttaaatgatttctaatcttttactgattataaataagattatattgaaatgagttttatttaaggcataaaatcccaacaaaatcttgtctcgacaaattttatcttaacatttttgtctaatcccattttaccaatttaaaataattttttcttcgaacatcgttatacaactcttcatccttacccttggcagtatttcaaggtggcgatttggggactatagacctataattctaagcttcaataaactagattgtttgttgagtctcttcaaccaaataatctcttgtttattaattttatgattactccactataaatatgaaattgcactcttaataattatagaattatattta

SEQ ID NO: 378329 - DNA, 1446 bp, Cannabis indica
taagacatgtgtcacaagtacatgtgctcattttagtaccaaaatattcacaaatattattccaatcatgtaacacacaaatacatttaaaacttccactgttacactccataccaaactcaaattcacacttgtcaactaaccccaaccccatctctgttcttgaccataataaatatttgaattttcaaacataattattccaaaagaaaatgtaaacttcaaaagagctattcagaagtttctagttaaaggagtagagttgatttcaatcaaaataatttcacagttatgtacacaacaaagtacaaacaataacaaaaacagtctattaattgttttcaagaattaaaaaaatcatcagaaaacaatactaatatatcacacaattactactaaacaaacaccatgaccagaacaatcaagaatcttcggctttggacatgacacagagccggctaggccgcggctcgaatgctatgagccgccgttgactgtgcgaagacggtctatcggagacgataaagctctccgagccaattcctcgccttctactccaccaatcctcactagtgagttcagcatcgccgatcttctgtagcttaacctactcgaaatacacgacgctcgaaattgatcgttattagccgcctttgtcgccgtcaaaatcttgtggcgggaacacctgaacgagcctgggtgcgtcgtaggggaacaaacgcacgtcctctttcggctagagactaatcccccgacgcagtcgccgccattgctctgcttcgtcttcagtaacgagaatggagatcttgttccgtacggagacttcggagagtgagagcgtccgtgaatggccacacgtgtgggagatgatgatgagcgtgagacttcgaacacggaggaattcgaattaggcgatgatagtaagggtttgcgattctgataaaacgctggattttccgattttgtttgagacgaaggaaccgacatagtcgaagtcatagagagaggagtatgagtaatatgaatctgatgacgatcgagaaaaagaaggaaagtcttttgggaaaagaatttgaatttttctctttttaagcggaagcaccgtttgatttctcagtttgccaaaccttagggtttagtcaaggatgatctatatatagagatagaagacgatgggtaaaagcgtaatttgattaaggactaaagggtaatttcaaatggaagtccgttaaagtgggcccatcttttggggacgaaacccgccgaatgcgcgatacgattgttatctttacgcgcaaattctatttagaagattatttttttggggtaaatactattttagtcttttgttttataaaagttattaattggaccctgtgttttgttaaatgacaaaatggatcctgtattttctaaaatagtacaaatagtaccctgaattgattt

SEQ ID NO: 378330 - DNA, 6054 bp, Cannabis indica
ttttgtgatttttatattacagcttgatttcggtggctttatctgtatttgattttttttattgtgttttggcaaattgggatcaattctagggtttctttttggttgcttatggatttttttttaattcaaaccctaattctcaattcttagttgtatttcagataagtgaatagaattagctatattaatagttctcaattatatttgcttgtttgtttggcatgcaagaaattaggttttcggtttggatagaaaatttaatggtttcggatgagataagtttaattttgtgatattgtggaataccccctttttaggagttagcttattgaattgtatggcttgtttttatatattcttgaatttcccacccaaattcctacatatatatatgtaaatatatatatctgtactattcgaaagagctcttttttgtcataataccattgagattgtaattgataggttcatgagctgaagtgggaactgggattttagagtgcaaatcataaagttttcaggattacccaaagtactgaaagatcctcttagtttcgtatgaacgtatctgtgtagcttggaacttctgagtatgacgagtggtcctgtgagacgagtttcacgtcaagatatacaattggtatgttaataattcgagtctctacatttgttcaatttcttattgaacttaatctttccttttcttaaatcgtaaatatctatttggtgtatatgctatcatgttttcgtatcttatggttcttaactaagttccaggtacagaatcttattgaacgatgtctgcagctgtatatgaaccaaaaggaagttgtagatactctattggatcaggcaaaaatagaacctgattttacatcactaggtaactatcttgtcccgtttaactctaattgattgagtgttcatagacatagcctcttaggttccaaattcaaatctcccaaatcctcttaggtcctaaatttgaatctctgaaaagaaaaaaataatactaataataataataataactcattgcaagctattagccaaaaaagataaaataaaatcattggcattaattattttttaatcttttcctcctcttcaatatttgttcattccctgtatccatatgtgagtacctaatctggttcttctcatgttaatgtactttcagtttatttatttttctagcatttgtgtttttttttatataattaaaacttgtctgcgtgtaacagttaatgtgtaccagattaatcattcatactttcacagttatattcattgcctaccaattattcatattcactaggcacttaattgctttcacctcccttccctcaatcttactgtttataatctaacaacattatgctagccttttactcattaacttctctcagaagaccctcatacatcctgcagtagttgatatgttataaaaatatttatatatattttcacagctgaagtgaaataagacttaagggaagggactttataatgcatgtacatttggaatagtttttttcccctctctgaaaggaataggttatttttgtttttgaggacatacaaacgtgaattggagtttagtcatcttgcgtccatgaatttggtatttgtattctcttcatcgaataaaagtcttgtttgcatttcagtttggcagaagcttgaagaagagaatcaggattttttcaaggcttactacttgagattgatgctgaagcaccaaatattggaatttaacaggttgcttcagcaacaggcccaattgatgcatcaaatgcacccaagtggtgttgctccgctacctacatctaatggtgcccacatttcatgtaagtatactttattaagttggacactttataggctcaacataacttcagctccctttgcatcaatcagagttcaaggataattttgtattattgttctctcaaacattttttccgtggaagaatgatttaacttttttttttattttgtttagtgtatcaatgtttggggaaatttattattgaagggtaatgttaagagaaaatgttcagttggtttaactcttgaataatcttcaattgcaagttttcctgttttggtatggaaattttaaggattggtttttaactttcttacctacaactggttttgatctaatcgcttatggcgtgtttggttggttggaagggtcatttatggactcacaattccattggtcaaaggaattgttgtctcaatccttcttctagtggaaagcattttccattctaaactacataagaaaatttatgtttcacctaggggtgctcatggtcactttggttggttttgaaattccaaaccagttaccaaattgaataagtcaaactttatttagtggggcatattttttatgtaaaccgaaccaaacgaaatgataattgaacctgtatattttgagcatcaataaactttaatatcatacttgaatataattatcataaagtatatagttatcatgtattatcaatttcataataatttctactcaagcaaatgttaccaaagttaaaaaatgttaatatgtgatttttatgtgtatatacatacatatatatgtaaatatatacgataaggtctgtttgcggtctttgttcactcaaacacaaactgctaactaattgattgtaatttttaacccaaaaaaataacaattgaccaagtcgaccaattaatagataaaatcacttgttatagtctatattagcagttcattaacacccttaattaaaataaatagtattatgtaattaaattattagtttctgaaatttagtgtaatattgaattaactaaggtagtaaaattatttaattatataatgaatgattaatctcttctgctttagtattataaattcatccaatcactatttgcattactcttacaattgcattaatcattatttccattactatgttaattcaattccattgaacaaaacattatcttagttcacttagggtccaatatttcatgattaacaagttttttatgcgtattaatttagtatgttgatcactgttcagtcacagtttaaggaaaaaaggataaaaatatggattccgaaattcgatcttgtaggttgttagtttcttaagtagcatcacaccttttacatatgacaattgtcagttgtacatttatttaccaacgagattatctctactttcattatcactcaaagccaactaacttaacttattgtctggtattttagttagtttgtccaaattaattatctcaacattttaatggcatgttgagctttattatcttagcattaatgttactagttattactttccgacgtgtcatggtttgaaaactattgaaatctacgttttgaaacccattaggttctgaggtgtagaaaaaagtatcaaaacctacatttttttctgaattgttccaaacctacacctcaattaatcgaggcatctgaaacctacttggcatgagttttaaatcaggaaacttgtttgtctttggctgttctaacatttgtcttgggctttcttaaaaagtagtggttgtgtttttatcagattcttgtgggcccactgggcatattcgaatcaacaaaatatcaataaagacaaaacatagaaatggaaacataattactattcttctattctgttctaattcaattctaggtttcggaattttagtattttcttaattttgtgaactttgtatgctttcttattactttctatgaactaatgttattttttaatgcatatgaatctatgattattaattttatgattttgatgttatttgagacttacacctcagtccaattcaaaacatacgtttgatttgatcgaggaaattgcctcaaatcctgatttagcttttctaaatcttattatctgacagtgcaccagaactcagcatgctatccccaagagcatataggaccagctctgaagccagaaaacatgcaccatgcagttggttcttgtttgtccaatgcatttaccaatggtgggtcttcagtgcaccagggtatgcacaatgctgtggatatgtctgctcatgctggtaggattgatgctccacaaaacatgatctcaacacagaactctaacatgggactgttgcaaggaataaatggtggaatgatcaaatctgaagttggcaggatgatcaaatcagaaggtggtggtgtcattaagtcagaaatgggatacccaagcacttccccatatatgttcggtgctgataacaatgtcatggaatcacggccaaatattggagatgcatctgttgctcctttcagcactgtagatcctaacccgcaagccctgaatgattcacttcttgatgtagacacttcttcgtatggatttttaagtcaaattcctagaagtttcagtttatcagatctgacgactcatttttctcaaagttcaggtatgtacatcttttgtctgtgtctctgggttattattagttattctactttgtttgagcaggatgagtatgtgcatgagcttttttgtcatgtgtaagattgtttgtcttttttagctagtaactataatagatatcttaggttcagactgcacttgacacgtcatcattctattggtttttcccatactataatttccaccaggtggtagctcaaatggtcaggcatcaagttttttttttccctctcatgaagtttgatgttggacccctcttgggtgtgcatagggtttactctctcaaatattgtaggattaggctcagagtagcaatttgatagagggtgggtgtacatagagttttctggctttcaaatattgtatgattaggcagagagtgtaacaatttggtagaagatgtgtgcataactattttaactgttcacgaaactgaatccatgattcttaatttttcagatatactggagagttattctaggtcaccttacctggtaccagatgctgaggacttcctggattctcgtgaaagagataatcaaggtcacatctttcctgagtagagtaaatcttgttactaaataatcatacaattccatgtctaatatatctcctgcttcatttcttacccttacaggagacaataaaagtttggacaatcccaattccttatctaatatctcataccatttcttacccttacaggagacaataaaaggttggacaccatatcagaaggactaagttatgacgattttgggagtgactagttaataaagttacagagtaagttacatgtgtcatgttctaggaaaattatccttttcttctttagaacttaagttgttagcattagtattagatggtaatggatgggatataaacatgtagctaggattgtgaatgtgtacacacttgagaaattggacaagaagcacatgaaagtaaatgattcgcctttgaagtgtttgccaaaaaaatgacttgaggttttactaactcggcctcggctggtggttttgtttctgcagctctaatttgacagtggaaattgggtgggtgtacataaacacattatggagtttggatgtctaagcattaaactattttgaaggtaatggttgttgacgtagtgatgagaattgacattagaatggttctcaagagatggagaacaaaggacaaggcttttccaaaggtttttgtaacaatggactacatagactttatactacctgctgtatttgataattgtggcgtgttagttatttgtatccacaacaaatttggtcttttgttggatgatgatgatgatgatattttgtgccattatgtgtttttttttttttttgagataaaaagtaaaaagtaaaaggtaaaagtaacttcttagagtgttcacacaaaatatgtcaccaaatatataatattatttaaaattgtggtctcttcttaattaaagtctaacatgtgatttggtctgtaaatctttcgagtgttgtagtgtcatgttttagtgtatatcagtattatgtggcaatgtcattattcagtaact

SEQ ID NO: 378331 - DNA, 1563 bp, Cannabis indica
tacttattttggagagtgagaagaagcaacaatgacaacttcatgaactaatttaccactaataatatttttagagtttcaatcttgggtttaatcaatgtccataccctcctaccaaatgtctttctctaatacacaaatttttgttttttctggccaaggaatttggccccagaaaaaaatattgttgctggctggaccaatattatttaatacatattgaagcaaatttatcgatgtgaaagtacagcttaacagccagggaagggaagggagttgtggccacccttcgataggtgagaggtctcttagaacagcagcactagttttataccgtacaaattttctcgcaatccaaacacacgtaattgaaatttccatacaaaacagcgtcctcccctgctcatttttcttctctgttttaatcacaaaattaatgatatagactcgtggctctaatcttcttactcttctattaatgttgtacccagtttcaggggtaattaaaagagaattgaaaaaccctttaatttgacaatgatttaataatttattgtaagaattcattaatgacacaaacacaacgattgggactgggattgggattgggacccaacttgtttaggggtcagtcaaatttatataaaagttaacctttcacttctctgtcaagaattttgactgacatgattttataagctcatctcattgataagaaagtctaagcattattcattgatactaagtgttattcttatctataaaactgaaaaactttgtagtttacactacgattcaagctcagtggatgtcatgtaacttgaggtatattcatttacactctataccttgcttgcttctttgagccatgattctgaatcagtgtttccaaacgttttgactgttttattttaatcttcaaggctcaagctttcatcctgacatttgattttgctagctactttaattattaaagaagaaaaatacaattcacgcattactgaaagtactctagtgaagaatggtagtagttagtgcccaaaaagaagaaaatcccatttttcataaattgaaataggataatctcattctctaatatgttttacgtgaaattttagagttaaatacaatgcaacaatgttaattagaaatactgttagttaattaaaaaattaaaaaattgtttgtcactatttttaacacactattaaaaaattatttttttataaaattagtgctaaaatatatagtaatatattagaaatttaacatttttagttaattaaatatcaaacccatattctatcaaaattaattataaaaaaatatcattttaaattttactctaaacccctaacagtgatagacaaccttacaatacaagacttaaaactcaccaaagacattgaaaagaaaaacctcatcaaggacaattactacttatggttgtcatttttagaatgataattggataagagaaacggattacttatgtattattttatttttttacattttttgctaactagtatttggacttgtttgtaacgccgtattaggtcg

SEQ ID NO: 378332 - DNA, 2157 bp, Cannabis indica
gtgagtgtgagtgtgtgaatgaactgtgaagcaaataactcaaataaataaataaataaataaaaagaaagaaaacccagcttatttctcagttgatttttttttttgggtcagattcaaacctaagaaagatttatagagatatgctactcttggcactattgtcattgacaagagcaaggattaagagaaaatcaaagtatgcatataaggccagctagaaaaataacaaaacataaacaatttttgatggaataaattctttcctatccacaataataataataataatattaaaggatgtatatccatatccagtcaattgtttcccggaaacatacacacccaatggggccaaaatatattacttcacaaaagttgcataataaacaaaacagagatcccaatggtacaacatgtagggcaattccaaagaaagtgaggaacattgaaacaaaagattctgataatgaatcataagaaacaatagagtcaccatacaaggactaaaaatcacataattttaggcaagcaaagacattcaatcaactcttagtgactttccaaacatagcagaacaaccaagaacagtgcaacattgaaaaatggctcatgttgttcttccaaatatcacatcactgtgtttgatagcttttcaagtgcttttgcattcgtccaataccgctgaatacaataatccacataccacatatgctaccatagaagtacatgacactcaactttgctaatccaatgaagttaacagaggcagaacctgcttctaagcactaaaataatggactgggaacagacaagtaaggtacatttctctatagtgtatataaccaacataaattacacatattgctgtctaatcgcttggatttatgaaaaatttcaactttgataaagtaactaacttgtgtcatccattgttataagtttcatgttcagcatttgtatgcatagagttttcaataatagctaatgggcttcacatttcaaggcaatttctttaattcacaaagcattttggcatataaaagagctaaagatttaagaaaaggcatgatctttcttgaggaattgaagtcaagaataatatatcaagacttaataatatgaagttcttctgttctgacaaacatagccacccgattgatatttaaggcataatttcaactcaagcctcaaacaaagtagaaacctcactaacattgcattagtagtgaattgtatcaaatttttgcttaatttgactaaccttcttcaactcatctcatctcaactcaagcatcactatcatcactatcatcttcttcagcgtttgccttatcattggcaatgtaaaccccaggctgaacctgcctccgccgagtcctcgacggaagaatgttatctaaatcaacttcggcaagtgggtcatctgacaaatcactatccccatcttccaattcacttcctccgccattactcgaatcatcatcatcatcatcgtcatcctcgtcttcttcttcaacaatcaattttcctttgcctttatcttccctcgtaatccctttccccttgtggtctacctcttcctcttcctcttcctcttcctctccattcgagtcttcaccgtcttcgtcatcggatccgtaatctccctcgtcttcttcagacccagcttcagcttctttaaccgagtccaaattatccagtggggcttgattttctttatctaaagactcgatctttggattcttcttggggcagtcgaggggttcatctatagagacatcggatttgcgtttggggtgcaatgctgactcttcgtggctctttgtttctgccatgaattagcttcggacacactctgctacgaattggaaagagaagagagagagagtgaattggggaggtggagaaagaaaaatggtggatttgggggttagggttttagggttgtagttgtattgtaaacccaccagagggagaaagggaaaagaggatcttttagtctgttagggcttcctctttcttagtcaaaacgacatcaatctctgtctactccaatcaccaacgacaatctttctaaacaaaaattaaaacaaggatgaattgttgtagaaattaataatatacgcaagatctatttgtatataacatagaaca

SEQ ID NO: 378333 - DNA, 5498 bp, Cannabis indica
ccgctaaaatttaaacttaaaaaattaagtgcaagtgaaataataattgagaggatgtagccgcaaaaaactctatattgtatagatgtagatatatagatgcaaattaacaagaaaattaattaaatacttacgagtaagtttgcaaagatagtacttttctcctcaacaaagtccattttatgttgatcattacataaagccagtctccaatattatccatccttctaaaataagcaagtctccaagaagtattgatccataaatttccacaaacaccacaaaatccaataacaaatccagcaccaattcccttacaaaaccatggcaaatcaaaccatatttctccaacatttttgtcaccgccttcattgtcccgagttgaatatgaaggatctcccgggcatgaacttgacagaggaggtccacagagtccaagattcattgaatacattgaagcattaaaagtttgcaattgagtaccagttggaattcttcctgacaatcgattatttgataaatccatgtaactcaaagaagttacattagccaagcttatgggaattagaccatctaatttattgtgggacaaatcaagtgaatcaagcttagtcaagctcccaatattttcaggaatctttccgaataaattattccttgatagattcagttgaactaattgagtaaggctaatcaattcaatcggaatctctccattcaacttgttacttgaaaagtcaataattcttaataaaccaagaattttgacatattcatgatcaactcctttccatgtgattgatgcaacattttcatacagaaatgacacatggccaaacatatatctcattatgcttgaagatgtaatggtgactttttgatcatcatttcgaaccatcgcagttatatttttaatgcaagagggaatcgttccagataaatcgttgattgataaatctagtacttgaatttgaacaagatgacaaagattcaatggtatacttgcatgaaatttatttgacttcaaactaaggaaaaccaatttgcttaatctttctccaatccatgatggtatttttccttctaagttattattggccaaatctagaacttgaagtgaagtgcaatttttcaaggaggaaggcaaatttcctgagaagttattatgcctcaattgtagagtttcaatagttttcatattaattgagcttggaatttggccagacaacatattatatcctaaattcaaaacaatcaacttttggaaaccctcaaagcaatcagaaagttttccaaatagattattatgagaaaggtcaataattgttgttgccttcaacttttcttttccttcacataaaaaccattgtgtaaaattgttgttggagagaaacaatattgttgcattaaaagacattgaaagtggtacaaaaccttggaattggttgaagctcaagtcaactacagccctattgttttctcctattggaaaatttggcaaggtgttactaagaaaatttagggacatatttaaataatttaagttggaagttatatttgtgaaccaaaaagggacaagaccaaagatatcactattggaaatatctaaatggtagatatatttttgggtttggagccaagtagggaattttggacctaacttgcaagacctcaattttatggaactaagttgaaacaaggggacccaattggagttgaatttcaatctcaaggccgagttataagataaatctagtgtttccaatttgggatattgtaggttcaattcagagataaccccaacaagagagtttgaagaaatatctaaagtttcaagataatcaagattattgccaataccattacttgaaataccattgaacttattgttagatgcattaaaaagggtcaaatttggcattgaggaaagatcaggcaataatcctatcaacttgttcccatccaatttgaaaacttgaagatttggaaaaatatttttgaagtcatgatcaagaatcaaccctcctccaagttggttaaaactcaagtctagaatttccaatgaattcttggtggaaccagctgttaaattttgtagcacatcatggattgttccaccaagattgttatgagacaaaactaattttttaaggttgggaaggttgcctaaggattttggtactccactttcaacaacttcattagatgacaaatcaacaaattgaagagattttgtttgttgaaaggaatttggaaaagaaccatttatgatgttatttgagagagaaatttgcatgaggtgagtactagaatttaacaaccatgtaattgttaaaggatcatgtattgaatttccatctagagtaagatcttgcaaagattgaaaggaagcatttgtatgagaaaggaagaaattatctaccttgggaaacaagcaatctgaaatggataagcttgataagaaaggcgctcctttgaatgattgaagttgttccacagtgaaattcactcctgacattgttaaagtgttcaaagaagtgagacgcgaaatccattcataattactcatttgagatgagcttgaaagatcaagactttgcaatttggtgagatttccaagttggggaggaataactccactaataggatttccaacaagattgagatatgtaagctctttaaaagaaccaacaaaagatggaatcatagtaatcttattatgtccaaaaataagatgtgtaagatttttcaaagagcgaatagaatttggaatcgcagtaatctcgttatctaaaagatttagatatgtaagctctttgaaagaaccaataaacttgggaattcgactaatgttcatcttcccaagcattaagtggttcaaatgttgcaattccgccaaagaagaatcaatctcaccaccaattacatttaaaccgccataaagatctatggcggtaacatgattggtttgttggtcacaactgatgccgttccaattacaacaattttgatcattggcccatgaggagagataatcaaaattaggatcaagtaaaaataaattaacaagatcatcatctttcacatggtaagtagttttcttaaagctaagtagagcctctctctcttttggtatgcattgtggttgatcactctctaaactcaccacatttgcaggtgtgacaagcactaagagcataaaccacaacaatatcattcttacaaatcactctaatatgttttagatcaataataatgtaatggggaatttgtggtttgtatttataataggcatttctctaccatgaaattaattttcttttatatattgatatattgacaagaatgaaaagtcacgatgactttgataaattaagctataattaatgtatgtatatgcatgaacctactcatttttcttttttgaaagagatatatgaactactccaaactacatattgactcaaaagtcaacactatatatatttatgagtcagattcggtaatttttattaggtgggaacttaattgttaataaaaaaaaaaaaaaattatgtctacactataaaaattttacttttagtcacaataaaacttgtgattaaaagtgaaaaaattgtgactaattataaattattattcttatgttgtgactaaaaagtccgtagcaaaaagtattagtcacaaaaattataatttgttgtgactaaatatatttttagtcacaatacttattgtgactaaaactaaattagtcacaagtaacatttagtcacaaaaaatttatattgtgactaaaaaattgccactaaaagtaacagtcttttatagtgctactttatttaatttttttttattgggactacagcccccacacctttaagagtgtgtccatcactgtttatgagaaatatgctaaaggatgccttagtgtcaaagtgtcattatgttatatattgatgcaaattaatatattgagtctcacacatttttatttaataatatgttcatttttgttaataattatcagcttccaggaaagacaagacaccattagaagaccagtataaaagaagcttgaaattaatgcatgtagagccaactatcgaagactatatatgtgtataagttgaataaaaaatctaaattattattatattatgttatacataatttttgaaataattaacggtgaactaggatggagacatgtgtaatattaagtaaacattgtagaagatatttatgaaatatcactaactaattacaagacgctactataaatagtgttaggcaccaaaattagtagaatgcacactatactaaacgatatttggtagaccgtgtaaatttcgtattattttaaataacaaatgacattatgttaagataaaacattgtattgtataaattattacgactataaattttaatacagtatgagctacgttatattatttaatatataacaaattattcgtattggcttttattataatgtttacaaaagatctgggtcaactctggccccaaccctagccccaaacccgaatccagacccataccttaaccatagacccagaccccaaacctagaccccgaccccgaaccccaaccccagacctaaacccggaccgaaccccagaccccagaccctagagtcagacccagacccgcacccacatcctgaacacaaacctatatctggagaccccaaaaccggacctgaacccaaacacaaaccccataactcggaccccgaacccaaactaagactcgaactcgaatcggatcctagacctggacttgaaccctggacccaaacttgaaccgtgactcgaacctcggacctcaagtttgggttcgagtttaggacctgggtccgaggttcgggttcgggtctagaatatgcttccatgtctgcatctaggttcggggtttggggacgggtttggggtttgagtcatgggtctgggtccaaggtctaggtctcgattcgggttcggagttcaagttcgggtccaagtttgtggtctggggttcaggtccgggtccgaggttcgggtctaggctctagcatccgggaccgggtctagggttgggtttgggatccagggccaaggtctgagtttggattacggtttcgggttcggggatcaggtcttgggatttgggtttgggtccaaatctgggtatgggttcgagttcaaggtccaagttccagttcgagtttagggcatgttctgggttcggggcctattttgagttcgggttcgagtctgagtccaggctgtaatcggggtcgggattgagtttattgaaaataatttataattttacataacatatcagtacaagtgtcaatatcaaatataatattgtattaaataatactaatacaatactatactatataatacaatatattagggtatactaaaaaagtattcaattatctatacgttttcaacgttttaagaagttttttttttttttgt

SEQ ID NO: 378334 - DNA, 5514 bp, Cannabis indica
cttaattccagggtattacaacacccatgaatcatctcctctctttatatcttctaataagggctgagaaaccttcagcgcaaatcaagaataaataaggtaaaataggatctccttgccgaagtcccctactaggaatgataggaccgagggtgtaaccactactgacaatattatattacaccgtagataagcaaccatagataagccgaacccatttttctgcgaaccccaaccgagtaagcattgcacaaagaaatttccaatccactctatcatacgctttactcatgtccaacttcaaagccatatatccttctttccccacttgtttccttttgagataatgcaattttcaaaagaaatcattagattatccgtaattaacctaccagggatgaacgcactttgattaatgtaaatgacctctgaaagcaaatctttcatcctatttgcgaggactttggtgataactttagcaataacattacacagagatatgagacggattcgctcatctgatcaggttttttcttctttgagatcaacacaatattagtattttgcattcctactggcatttcctcagtttgaaaaaaaatcattaatagactttatcacatcattgccaacaaaactccagtatttttgaaaaaaaaattaggattcataccatctggtcccggagatttatcgggatgcatttggaacaccacatccttaacttcttgatcaacaattggccagagtaagctgttgttgtgctcctctcttaccataggtctcacacagtcaataacctcaccccacatggcattttcagccttaaaataccattaaaatactccaccataacatcccccaacccgtcttcccaatttctcaatgtacccgaagcatctttcaactgagtgatttgattattacgtttccgagccgatgctttagcatgaaaaaacttgctgttttgatcaccctctttcaaccatagttgctttgatcgtcgccgccaaaaaatttctcttttattaagcacttgaaagagccgttgctttgcttgtttaaacaattctttcccttccacgtcccttctttttttgaattgctttaatgtcttgttacactccttaatctgagaagagaaattacccgaaactcctttcccccaagcatgaagggcctgacctcattgagaaatttttttgatcaattcgagtttcacctgctgcattctagctgcttcgaattatactttcgcactcctggtgattgcaccagcaattttcaaatttaaaggggcgcatctgctccctagcatcacggtaatggacttcaaggagaagcagacagtggtcagatggagagatttctaaattaaataatcttgcagaaggaaaattttccagccaactttgagtacacatcgcacggtcaagtctagcctcaatccaattcggagtatccctgcttttttcccacgtaaaaggatgtccaaacatatcttaatcacataatccgcattgttgaacgaccccttggaagccatctattaaccatgttggataaggattgccaccgatttttcattttggtgcagaacattgttaaagtctcccattatacaccaaggagcagtcaaccgagcatgaagagtacgaatgagcgcccaaatttgttgacgtaagcttcgattaggctcaccatataatcccgtgaaccgaaacgattgttgtccttcaaaagtaacgaagccatcaatatgattcttagaaaaagaatcaataaccacatcatttttatttttccacatcaaagcaactcccccaactatgtccatgggcctcaacagtaaaagacccctcaaattgcaaacttctacaacaatcttcaacttattactaagagtttcacataaaaatatcttcgttatttaacccttttttttctcaaaaaaaaaaaacaagatcgttttaaacattatttcaatcagaattgtaagactttattcatcaagaagtgaaaaatgagtagggtgacttcttgagatatttcactcgggattcaaagcaaactgtacgagtctgagaactagtaagaacaataatatgaaattcatactatgatataataatagatcatacaatcaacttaaacagtcctccaaaaaatttcagacagaaaagcttcaagttttccccactctaaattatacaccacatccatttgaccctcaaaatgtaaggatatgtttattttaacagaaatattaaaacatagatgagtccatatggtgccgttccacacaggtctaaacgccaccagtgacggcagcatgtatggcatctgcaagatgaggaactgttctggagctcagaccagccatgctaattcgcctgaaaaattaacacaaattcagtgctgtctaattattattattattataatatgttatgtttacgtataagaaattgggctactgacccatcggatgtcatgtatatgtgatattctttagtcatgaaggcaacttgttgagaattcaatccagtgaaagtaaacattccaatctgtttgatgatgtgactccagtcaccaggtgtgcctgaaaaacagaaaggaaatcagcagctgattgtgattcataatttcaacacatcagagaagtccaaaatctccggttaagaggtaagcatagggtgtttttattttcacgaataaaacgtatgcttagactgacaggacagccatagctcatgagcaatagatccccaaaccaaacacgctcgcacacagcgaaaatcaagaaagaaaaaggtagcatgagcatccaaattgcaaagtagaagtgctgcgaacaagatccgcacccaacactgtgaaatgttcatgactaacactaaagcatgtacagaattcatgcactaagactgttacctctagattgtatggcatcaaaaagctgctggcgcatgctaatgatcctgtcagccatagccttcagctcaacagtccattcatcgtataagttcctgtggatatgacacaaattcaaggttgagatgagatgactactactttcgaccaaatttgtaagagaaattatcacacttgaattacttttgcgaataagagtctgcttaatatatgtatatgtctcagcatacaatttctagaccaagaaaaataatttccagcctaaaagatagtgaataacattacctatctctgaggatggtagccacaatagatgcaccatgaatgggtgggttggaatacatgggtctaatcacaagtttcagctggctttcaaccctgcttgctacatctgctgccttacagacctatcaaaaatggtaaccatacagtatagtcaagacaagagacaaagatataaatataatatacaactaaaaaaaaggatatagttcattatgggcatggtaatctatgactcatacaatagtaagcgcgccaacacgttccccatagagacccatgttcttggcataactctgagctacaagtaattcaccaccatcagcggcaaacatacgaattggctgtgcatctgcatccagactcccactagcgaaaccctacagaaccaagaaaaagagtacctctcaaactaattgtatatttacaacgtaagagcattatttggtaaaatgaaactggaagctcctgagttgcatgcatgtgatgtacctgataagcactgtcaaagaaaggcaataatgattttgacctaatcagttgcttgatctgatcccactgatcaggggttggatcaacaccagtagggttatgagcacatgcatgaagcagtacaatagatccagaaggcgcagattcaaagtcctctaacagacctgttagtaacataatattaaaacagaacagaaaaccagaagattttaatgaaattatgtgtcacttaccaacaagaattagtattaataatttgtaatgtaatatatggttgcgatacaaataaaagacaaacaaggcaactcgaagacaaggaaggagtatggattaaattacactaacagctagagaaatcaaggacaaatgttcaaattgtaaaaaaacattgacgaaaaatatgtgggcaatagtagatggggttgcaatatttatgaaaaaaagtaacaatcatatatctctgaaccttggaaattgagtccacgtgtttctggatcataatatcggtagaatttcacatttaatcctgacaaattgaaaacttttatgtggtttccccatgttggctggggtatgagaatagtccgctgcaggaaaaggtagatacgattaagttattttattcagcaatcgccaatactttcaaatcctaaaaacacagaaattcgacaagcacatacttcatggtagtgcttagccaaaaattcaccaccaactctcagcgagccagttccggataaacactgaacagtagtcaccctgttctgctgaattgcagggctacatccaagaaagtaggaaggtatcttaaatttattttttacaaaaacacaaaaaggcaagtagaaataaactaaagattcagcaacaatgtgttactggaaatcaacagcaaggccttttgtacctatcagcaccaagaatgagcttagcacttaatttattgaattccgcaagtccaacaataggaagatactccttcacacgtgaactgatgtcaagaatgaaagttaatcaactgcttcaaaaatgattctgggaaaagaaggaaaaaagaaaaaagaaaacttacacgtcgttaacaagcagctgttctgctttcctcacggcattcagtacaacaggtttcccttcctaacatgccacaagcagaacattaataattgtaacacggcaaaagatataacaagtaaagaaaaaaaatgatcacagttcaactactttctaaagttatctaattgaaaagaaatgataatgattaaataaataaattttaatattaacaaacgacaaggaatttgtaaccaagctaaacggtttaaaatgagatttaagaggacgcaatggagattatctgtacaagattttggtacgaaacactaacctcggttctataagctccaactcccaaattcattttaatcgggcttgggtctttgttgtaggcaacagtcacctgttcaaatattgcaaaacgaaaggtgttaaaataggtagataccgaggcaagaagaggatcaatccaaaaatacaaagaaacatatgtaacaattagtagtcatgagattcaaatacgcatagctttgtttagtccactatatgataatttcaaacgcccctagaatgactaatataaaattcagtgtttaaatctgaaatcaaagagttactttcttcattttagggatccaaaattcaaaatcaccatcattcattttttttgtttttactttgaaagaatataccaaaacaaagcagcgacaaaaaaaagaaaaaaaaaactccataaacaaattattgtgttaa

SEQ ID NO: 378335 - DNA, 3128 bp, Cannabis indica
tacctaatattttttaagaaagacaaaaaaaaacaaaacaggggaaggaagaaagcctttaatcgatctgtttgtcttttccacacctctaggcgaaaccagtaaccctagaacgagttgggaagatcttttacgcaaatttatctctcatgggaactccagaaacttctagggagccctgtccggatcgtatcctcgacgatatcggcggcgcgttcggcatgggggcagtcggaggttccgcttttcacttcatcaaaggcctctacaactctcccaaaggagcgcgcctcgtcggtggctcccaagccgtacggatgaacgcgcctcgagttggtggaagctttgccgtctggggtggcttattctccgccttcgactgcaccatggtctacgtccgccagaaggaggatccatggaactcgatcatcgcgggtgccgccaccggtgggttccttcagatgcgccagggtttaggcgcggcatctcgctcagctgcctttggcggcgtcctcttggctctgatcgaaggggctgggatcatgcttaataaagtcctcagcgaacaacaacaagtgcctgtcatgatagatgagcccgctcctaatgtggctggaatgcctgggtttcctccaacagggcaattaccgggtcggttcccgacgcagcaaattccggaggtaagttccgctactgggtctgcttctgatttgggttcaggttcaggttcaaagtcgtggcttggaggatggttgggtggtggggataagaaagagccccagacaccaagtagtggaagcgagacgaagattttggagagctttgatgcgcctccagtgcctagcttcgagttcaagtgatttggggttatcggttaagaaggtatgctcgtgaaagagaggtttttccaaagattgcattagaaaataagtatacaagcgtgaattttattagaccgcgtttcacttttgtatgggaaaatactaattttatgctgcaaatttaaattttgaaatgtaattagttacttttgatgttccttcattataatgggtgaaatttttgttgagttatgactcgaatagttgtggttctgctaactactaattaactcactctgttagtgttgtttgcgactggcctttaattgagctgctatcttgtgttgaagctgaaataaaacttgtttaatggctttgaattaatttcatctaatggtagttgttctgttaaccactaattaactctgtaattggcctttaattgagctgttatcttgggctgaagaagctgaaatacaattttttctaatggctttcaatttcatctaatggtagttatggttgtagcatgaagagaagaggtagggagtatttgatggtggagcagagtaatggctaatatttatttgttacgtgttatttttggtttagttaaggatattttttttcttactttactttcatttttcggagggttgttcatggtcttgatttacgaaaatttctcttgttctatttacaatacaccatatataagcaaagatttctgtttgaagaagaaaacaggtggtagattggtgcatctgtagactgattaatagaaacagcttcaaccacttttactttcgatgcaattgacccttctctcaagtcttttccgttataactgtacaaaatgtttatgtctccatgaatgaagcttagaaattctgtattatctttgtcgttttaatagagatgataatattaatacctcaagatcaccgatgaatctcaatatttattggatgcatattgtgtgctgtgctgatgaagctctaatatattcaaattgggtctcactgagcaggaacagaaggagagcagtagtacactttttttgtatgtaggtaatagttggccatttcttttggtattttgtgtggtatgtttctaacttgaagaacacctgggaagggagtttctcaatcagtcggcaatttcaaataggaatggcaaatggggcgggtctgccccgccccgcttctgacccgccccgccccgacaagctattgccccgccccgccccgccccgattaccttgaaaatttaattgggtctgacccgacccgacccaactgggtcgggtttgacccgtattttttttttttttttttttttttttttttttgtcaaatttacttcttcaaattttattttataagtgactttataagttaagagaaaaatattttgttttattgaatcaattaaagtatttaattatattttataattattttaaaatttatcaaatttaacattaggagtttttttaataattcattgatcataaaatgcatgagtgtggcaaacaaacttgttcttcttcactaaaaacatttcactaagatgatgatttttagttgtttgtaagaaagaaatagttgtggaaatccttcactatatactaatcactatcacttattgtttaaacttgaatcgtatccattataaaacctttaaaagtatttcctaatcaatatcacacataattcagcagccagcaaaaaaagaaagaaaaaaaagtcttatatatgagttaatattttgtgatggagaagttaaataaataggacggtgggaagaagcttaaataaaaatgagttagtaaattgtattggaaatatgaattgatataattggtgtgtgtaatcttttagtcttcttgtattgggaagtcctacagttgtttggggtatcgaaaaaggtgtattgtttctatgtaattataattatggtatgggttggttcagttcaataaattatttggttttataattcacctatatatatatatgggagttctgtactgtaagattagctcatagaaaaattcaagagaaatatagtatagatacaattttttttatattttgtttgtgttgtcttccttcttctgggttctttttctggtttgagttcacacccttgttaatattatgcataattttactctttaatttctttctaataatactgctgtactctactcatttaaatgttttaagccatttcactcacaggctgagagggagagcttgaagtagttcgtggcagagaatagtaaaattttggttttttttt

SEQ ID NO: 378336 - DNA, 4159 bp, Cannabis indica
gcgctcttaaacttttggctctgccacttgttaggcctcattctttcactttgtctggccgctacctcaccttgactttcagattagtatgatattgttcgttttgagcctacaccctcacggttttactttagggtaccttttcaaaaaacttcatactaatgaagaaagtggaacacttatatccaagataactcttgtatattcttccaatgtgaaacttaggttaatactcctaacatctttttctatcccaaatatctccttgataattaaacgtattagtagagaaacagcattttgtaaattaatattaacaccaaaacgttttaaaaaaataggattagattgaaaaataaaagaccataaaaaaaatgaattaatcatctgccaatagttaataaattattacataacaagctaaaatgatattacgaaatatgaatcttgcatttttgagaaattcacctggtttgatttgaaggatcatcatcaacactattcactcgtagaactctgatcactaacttatattgtaatattaatagatacagaggacatacacgtcaaaagcagagaattgtgtgagcattgaacatagtttatgtcgatatatggcacaaatttctgccaaaaaattgaaagtgcacacacgtggtgccaccatctatacaagtgaccaaaaacattagtgttggcttactctatgagtagagtagagatgaaagaagagttagaaaaacaaagatattagagagaaggggaaatgctagaaaaggggccgagagttcattactatccttttatgcccttatcaaaaggctcacgaataatcacagtgtttttcgacctagcggtgagacactctagcattgtagtttggatggttctccacggaggctgaaaaaaaaaaaacaaaaaataattatataaaacattttttttttgtaaaaaatttatatatatattttacatttttacaaattttataaaaataatatgaaaataataaaaaaaataacatccaaacaatattaaaataacaaaaaaatattacatataaataattaaaaatcaacaacaaattagtaaatataaaaatatatcaaaaaatcgaattttctacaaataaaattataaaaaacctaaaaataattaaaatttggtacaataattttttttattatttttgtacgtttgtaaaataattcaagaaaatgtacagtgttgttgatgttcgcatatcagtactagtccgttatggtgttgttgtacttgtaagattgtacatttgacacgttttccttacaggctaatacatatctatctataccatcccacctaacttagcagatagatgtaactgtgtaactgaataaaacattccacacaatataaacaaggacattaattggtatatagactgttggatcacactacacaattctccaattaagcttgtgtatattataatctcatcaatcagttttgttctcttctgtttagtttagttggcttgctgattagaaagacgaacctgctaccaaacgcttcacctctatgacccaacaactttttgttttcttcttacaaatgcatttactaatatccactcctgagacatggtacaaaaccatgtttaatgttttgatacagataatctcgatcaacaccaccaaaagattgatcaagatttctgcaacagcaaacctggctaagttacatttcgctacaataacatgaatagtctaacgatgcgcttggtcagagttagttgacaagttcctaaacttaacaagaccttgctagctgtatacagtataataaaataaagaacagaatgtcttaacgaaattgctctacccctatgttattatataaagattgaacatatatttcatagactataagaaataaaacaacattgctttagagaaaatataattttacaaaagaaaaaagaaatagactaaacatgaaaacccaaattcggcccccatacattccaatttaaactgcttgaattggagtactcttgccctcgctcaagtctgacccactagccggagcattggaatgaaaagctgactgccttgaaggctctccaagcaattttaaggagagtggcgaaggctccctgtggcctctctcagcctctcctaaactgagttgagacatgccgactagttcgtcaacattaacaggttctttggcgacgattgggattggcttaagaacctgatgctgagttgtttctgcaacactctcttcttccagaggggctgcacccggaggccacaatgaaaaaggaactggcatgtatgctgggaagtatccactcaatccaggaatcataggtgggaacccatttgatccaactataggttcattatcttcttcaacttttgtatcatcagtagcttccattggttcacattctgactgaagagagagatttaatgagggcagtgatttagcattttcatgttctgtttgttgaaaagaaggcagcaaatcttcttctggaactggtggaggatctgagacctgtccaatttagaaataaattaaaccatccagggaacaactaaaccatttaacgctcaaaatcactacagaaaatgacacagggtttgtctatcaacatatgaagataccacagggtttttcacaaccagtgacgatgtactatcaatataagtagtaatctggtttttcatagaaaaatatatataaaaaattgacttccatatctgtttaataaaatgtataaacaggaagcaatatcttgatcaggtcgttactctttagttaagaaaatgtgaaaatgtgaaagacaaaccatatcaggaaccatgtcaaaaaggctggagcgtctctttcttcgggtagcattattttgtcgaataaaatacttctgggcatgacttgccacttgggtaggagttctagaaactacataatttctggctattccacgccagtcccctttccccaatttctggagaccaattaaaaacaatcggtgctcctcttctgtccatgggacacctgaaaaaaggaaatgaaatctgacataagctaaccacatgaatattaacaaaggtatagatcattacaatcaagaattacatactaagctgccactatatgggaggccattttcagaggaaacaaccagaatcccaaaatcacagtcaagcaagccataacaaatcaacatgaaatccagatttgcatcactagtattggactctagtcgaaattggtactttgttggcaacagaagaataatccaagttctaaacaagaataaattcagagctagtgaactacttcaaaaagctagtaaaatagtaacacaaataaattcgaacgaaaatttttggaaaaaaaattaattctctgtcataatgttaaggagatctctttcaaaaatgcagcggggtaaagttcacatctttctccatgagaatcacagcagaacaacaaattttaaacaattcaaagaataaacacaatagttagttctttgacttatacaacaagtacaatttaacttcctgatttcctacatcgtcaacaaacattaattactaggagctgaaattactcagcactatacgatatacatagattacaccatgagaataaaaataaacaaatataaaaaagggcaaaaaaatatcaaatctattatgacagcactcatgttacttaatatgaatgcgtaatttcttttctaattcaagaaatatcgatgtgccagctaattcagtacttctcgtgtcccatatgatcattttttataaaataagcttttttttctttcactaaaatctatcatgtaataatgcacagcatgtagctttattggtagaagaaataaacataagatataatgcaaaatatttacaaatatatatatatatttatatatatactagcaaaaaactacgtgcgaggcacgtatactaaattttatgctaattttttttctatgttatttgaaagttatataattaaaaattaaagaaaaaatattattagttattaggtagattattattatgtgtataggaagaaatcacaaattaattaatcttataatcttaactttaatcaaataaggttctagatatatgaacaataaataatc

SEQ ID NO: 378337 - DNA, 4451 bp, Cannabis indica
gattgttgtgtaatctgaatttttggggtaattattgttggatttttaatgcttgaaatggtgttttaaactccctatataatggttgaaaatctattgatggttttatttggttatgatttggatgtaattttggggttgaaattcgaagttgtagcaggattttctgggtttagaacctagtggtcgcggcccgcccttttgtttctgagcagatccaaattcaaacttcaaatagccataactttgtgatcaggacatcgatttgggagttatacataccattggaaagcgcgttccgagctctatttgattatctgtgttttgaaagccaagtatatatttcataaatgtagaattagggattaaccctatatgtgcaaatccttgaatttgtgactaggattaccggcacttgatcaggagcacctagggatttggaatctccacttttgcaggacatcagataagacagtagattgcacgtagagttaagcgcggtggcgctcatgttttatattgtggttatgagtaatcaagaaccgggattacgttattaccctaaaatgagcggttatatggtctagggttattaccttaatagttaaaagatgttaaatgttaaaataaagaattatgtgtctaaggcataattaaactggactcggtaaactggtaccttgagtttaattttaatgcggtctagggttattaccctagaatattttgaggtaagaaaacgacgatatatggtaatattactaatccagagaagatatgaattagggttaatacccttaatagatgttatttgagtatattgtaatgtattatatgagttgttacttagtatgcaagttagagttattaccctaagattttatatgttatggtatatattgaatgcaggcatgtatattaagagttatgcatataagacataactgggttagacctggtgtgtatcactaggataaaccaccgaaggaacgtaatgtatggattacgtataaatatgaatagggttatgcaagcaaggcataaccagcttaaactcggtaactataactgagataaactctactcaggccttattgtaatgagcgtaacacgtaggtctatgccacatagacatatatgggtgtgtgagtgtaacacgcaggtttatagcaaatagacaaatagtgcggcggcaccattaattatctgttacatatattaaggttaagggttatgcgtacaagagataattaagttgtactcggtaaccagaaccgagatgaaccattctaaggccttattgtacatagacgtgtgagcgtaacacgtaggtctatgccacatagacgtaattaagcgtgtgagcgttacacgcaagtctgtgtcatacagaaaaaaggtgaaatggcattaatacttatgtgatatcttaagtatgttattgatattttatactgtcttgctgggcttggctcaagggtgctctactgtgcaggaaaggttaattctatctctaatcagccatcagtgtaggagttgggcaatgtatgtacatgttcgggccacactagaccaagcgggttggggtctaccagtgatgaattttgtaattttgttttgccgcttaggtcggctattggaaagacttgtaatattttgtaaatcgtttttttgggatcccgagacatgtaacttttgtttgttgtaaagttaaaattattacaagtttattttcattccatttgcaattaaagtttaatttctcgcgcttagtgtattagtaatcccgtctaggggattagggtttcataattatcttaggtagcgtgcctaataagttaaggtgttacaccttacatagataatcacaagtatataaacattcaataattcacaagtacttgtctaatatgacaagtcatatttgttactttataaagtaatgaatttgtcgttgtctaataagacaagcctaatccctaatctgacattcaaatataactgtcgttgtctaataaagacaactctgatacctatcttggcatccatatgtcacttccattacctaatgagataactagcaggttagaaacctagcaaaaatttcaattagagtagtactctttttcacattgttgcctaatgcgataacccatttcaaatttttgcctaatgagacaacccaatagagtaataactcttttcttataaacaataattaccgtatcttattatcgataataatcgattcacagacgataataatcatatcatatcttgtcatgttatatggtatgaatgtactttttttactattaatccaaactcatgcatgttagccaatccaagtgcagaaacacccaacaatcttggccccatgtcagaacaacaataaatcgatcaactactcacaactaaacatgttcacacatgtctaatcataccattcttcactctcgggcactaatacattcttaacccaatatgcattctcgtcccgacacctcgggccatacactactcttagtttatttttggaacaacactaatcttgaaatctaatatgaatctttcacacatgcttggtcctcactcgtacacttcctaagaaaacttcttgagaggtcacccatcctgagattactccaagtaaactacgcttaacttctgagtaagatcatggtgggctacctgaaagataatgtatctttttgttaccaagtgtagaaagtatggtgtaacgtaaaactcatcaagtatttctcgctttaatcttttcatcagatgaaacctaaagtcaatctttgttcctcaatgatctttctctttgatgcactgtattaatcccttctaatacgtatgattttctagtaatgttgattattctttctaattctaaactttattgccatactagacatactcttcgcaaatgataaaaaaattgctccagcccttagctttttaattgccttgacacacagtgaattttttgaattactgtaaaacttagtctgaaattgttttgaaacattacagtaaccttcaaattactgattagtggttagtaaacccagtacgggcagaataatcaacctctacttccactttagaagactttactcacaaaacccttttacgaatctccttctataatatccaactaacctttagaagctctagcttggatagctaattcaaacctcgccaaatttcaaaatacttcaatttgtaccaaatcctccaagttgaggaagtctttgaattccaaaatcatcaaatccataactatcactatggagttaatcaacctaaggtacacttcaagggtaaaattacgtatattgagtactaaaagtagacttgggaaatattcatttcccaatcccacaactgataataatcagatcgaggattgaccttaaggaaaatggtctttccctgaaattgattagttaaatcccctatccttattaaaggatgcttatccttaaaagagtatttattcatcctttggttaatcaatactattctcagtgactcttcctttctcttaacaaataatctgacgtactcgaaatgaattacacagtctagttactgtaaatccaacatatctgcgattgaatcatcaattttatcttaccaactccattcaatatgagtcttagaaactaacttcaccctcgacattacgtcaatcttataatcactctctcgatttaatagcaaccccaatagctttctaaatactcatttagaaatttatgtgcttcttgtacgctctcagtcccacatataacttctttgtataagctaccatactagcttgtaaagagtttctcgttgttagtgtggtagttttgctttacagcttgcactgtgttatcccaaattttgtcaacctgacgtggcatgtccacgtaatccgagacatagtacatgtggagtacaaccttgccaataacaaggtagggtctctatacagggtatggtgaaaccgtcaagcagcaactgaaaggagtgaaaggagccaacaaggagttgtactaaaatgtttggctggccaagagaagctgataggctggcaagggtgagcttgtattgccggccaggatctaggcacaagttggccagccaaaaggtgactttcacaccaagggagcctctgtttgactaagggcacctgacctctacaaggaaaaggtgtaaaaagttggcctccacttgccaaaggctggcctccacattcaaaggttgctctcctcttggtaaagctgaaaggaacatgacttaccaaatcctagcatgaatataacctgttggaccttgacaggagcatggttggcaaggattgacttgactggaacatggctggccaggattgacctgacaggattctttgtatagtctaatacgtggactacaagctacctacaaattgggccctt

SEQ ID NO: 378338 - DNA, 1337 bp, Cannabis indica
aaataaaaaaaaaaagttaatatccttttggctagtcagctttccgagcaaacaaacagagcttaacatgtaaaacaagccgaaattttgaacacccaagcccagaaaaatggtgagacgaagagaaaggaaaaaaaagaacccatttacaataaaagaaatcacagaaaggaaaacccatttttcaattttctgaaatggaagtcaagatcacattgatagacacgcatacatacttggtttggttggtaagaaagtgcaggaaaataaaagcaatcgttttagcaggctttctcgggaacccaaagtgaagaactttaaaagaaaaggggtgagtgaaaatgaaatggaatgggggaggggaaggaagaaggtgatggtgggttttgattttgaagagcagaggtaactaaaaagtgagacaaggaaagagaaagtaggaaatagagtatagaatgggaatggaatggggttatttttgtgaggtcgaagcagatacactgtgactcctgtgatgagtcaacatgatttccactaccccctgtccaaaagcatgtccaggtcttttgtagcttttgagggactttttatgaaattccatttatggacacccactcccatctctctcttttccaacaaactacattttaattcaaatgttgaaatatactaactttttatctacttaataatagtaactatcattcataagcaatcatattcaatatcttttctataataattgttacaaggtactagtagtatctagcatttctcaacatgttgtattgtaattgaatagcgatactccctaaaagttataacattcaattatatgagatctgatatttaattggaccaatagtataacatataagaatgtgttaagtattactggtactttttagcatttctctttctataaactataaaatgctccgatttttatttttagctaacttatcttcaatatgcaactccctccctcatcacacttggctatacaaggctgctcgacaaaatctactacagtcaagatgagagctgaaaagtctctatccaaccagatgttcaaacacggatttgaggagtaagtattattccaaattttatccatctgacgtggtatgtccacgtaaaccaaaactaaggacgtgtggagtacagtcttgttaatagcaggacaaagtcttcttacaaggcatgacagaatcgtaaagcaacaagaaagaggagttaagcaagacattaagaagctgcacaaccatgttcggccggtcaaagagagtacatagtgttgggttttgtgccctaaataaaaccaatttcaatataat

SEQ ID NO: 378339 - DNA, 1657 bp, Cannabis indica
agaaaaacaaaaactttcaccaacctaactgatgagttatgggttactctgccattagtagcttctgctaaaggaatgctttttgtgcctacagaacaagtggaatttgcatattgattgatctctagacgagaaccaactaatggaggagcactaggagtatcagagtctgacaattcatcttccttactcacacccggccgcttaactaaatcatcatgaactttattctgtgatccgtaggagatttccatgtccgaacccgaaccattttcatttcccttcattggctttgtcttaagaatctgacccaaaccagatgaaggaaaatacccagttccaaatttggatgaagaagacaatccaaagcctgttccttcatcccttgagttgacaaacgtagctgatatgggtacatttctttgcttgattccactgatctgttaatcaatcagacaaaaactctcaccaaagtcagcaaagtcatactcatacgacaaagattctaaaaacgacaagttgtacagaaagcagtgatgagattgaaaaaatgtataaatctgattaccttttcagaccatctaaaggcattggactccaacccattattaagaaccatcacaatctctctattctcaccaaaaagaaaaagaaaacaaccgaaatctttgtaatagaattagaagctacaacacttcttctaactggttctcaatctgggtatatagccaaataagaaaagaaaaaacaaaaatcagccaaaaataacataaaaggtaaaattgagacttgcataagagaagtactgaatgtgcttacaatggttgaagagatatagacaaaagtgtgtccgtacttaaagctttctcggcaaccaaacaatgcatattacgagaatcttcaaataaatgtgagttgttatacttaacaccgatcaatccgagaatgaagattcgatcttctaccaatgcaagtatcaatttttagaatcaagtaattatagaaactaaaagaaaacagtgacaaacattaatatgggaagcaaatttccacgtaccaaaaataacagacctcaaaattatggaaattttagagagaggggagagtgtgtgtgtgaaagagaataatgtacataagaatcggaagtgggagagagagagacttgactgcaaaaaaggaagaaaaatatattaatattttattttaattttgttggttttcttctctatgaagtttccaaatcccaattaagaatttgttcacatataaaaaacgttatagcaatgaacgggaagctgacgtggaaaccgggaaagagtagcttagtattaacggttagatgtttcccagtggcgcctggcgcgtgtttactttttcatagtagcttttagttttaagtacaccataattaattaatataataataataataataataataatgataataataatatttttttaaaaaaaaaattgtattgtcttataattatttagaatatatgtaaaaaaaatttaaaaactaaaataatatattttaggttgattctataatataccctattaaaagggatgtactgatgcaccttttacttgtttcggcattcaaaaaaaatttagtttatctttttttcatattcatgtacattatagctat

SEQ ID NO: 378340 - DNA, 3193 bp, Cannabis indica
aaaaattaatgtaatagcggagggtgagtgattcttcggcaaacacttgttctcatcattttattttatttcatgactactctaactcaagtgtaagaaaatatatacataaagagtttcataacactatctatttaagactgaataagtggttaattaactctgctctactgaaaaaactgcttctaaaccttaaacctttaatccattaggactaaggtctttattttgtactaagacaacaaaactacgtatagtatacatcatcatattcataccatgctcgcaaaagtagtgtcatcatcttcttctaaaacattctcacgcttcgagttcttcaagagcggagcagcattgcattcggtcatggagaacttttcatctaaatccatcactggacggctacatctaagcaagagttgtacaacttctttcatggaaggcctccgggaaggcagagtctccgtacatatgatcccgaccttgaagacccaactcatttcttcaacattacatggctcttttacttcaggatccaaagcttccgcaataggcttgtcttcttgagcgtgacgccatgcccattcggcgagggagctgtgctcgtcaccaccgccgttgttcgcctctcttcccgttgccagttccaagagaaccacaccgaaactataaacatcaatcttttcattgactcttactgtatgagcgtactctgcaagtttgaaaattaaatgttaattttattaaacataattaatagagaaattgtagctttgttaataagatttacctggagccatgtagccgaaagaaccagccacggaagacattgtggcaaactctccttgcctgaccaacaacttggctaagccaaagtctgcaattttcgggttgaattccgaatccaataaaatgttgcttgatttaatgtctctgtgaataactggcggcacacaatcatggtgcatatagcagaggccgtgtgcagcgccaactgctatttgtagcctcttgggccaatccaaaacgacaccatggacggaaccgttggctgagtttgagacaacgcgttgattgtttttgccgtgtagccatcggtctaggcttcggttttccatgtactcatagactagaagttttgaactctcacttgagatacaacacatgagtttcactatgttggaatgtctaattaaactcaatatttcaacttccgcaagaaattcttgttcgagcttgtggtcaactttcttgtcgttccatattctttttacggcgacaacatcaccttcacgattcacagggacactgtagaccttaccggagcctccacttccaatcagattatggtctttcaatccagacaggatctttgattctgtgaaagacagtctctggaatgaggtcagcttccatttcgaatcaagtccatttttgctccaacggcctttgattatgaagaataaaaaggacacaactaacaagaagacagctgttgctagtgttattgtcaaagcaagatatggtgttgaaattttgttttgttttctggggaaggagctacagagcttgagttttaaatagttggaacttgtacagagaccaggattgtccaagaagctatcagcatacgcaccgttctctaatgcatgtgggatagttccagtcaacttattggatgcgagattgagataagtgagttttaaaagaccaagttgaaatggaatttggccagaaagttgattatctgaaaggtctaaagaggtgagagtaggcaagaaagaaaggtcagatggaatttgcccagaaagtttgttttcacggagattaagaatgtttagggacttccatgattgaatatgtgatggaagatctcctgtgagttggttctgatcaagggaaagagttgtcaaaagtgaaagagtggttaattcataaggaatggatcctgtgaaacggttattactggccttaaaaaccacaagttttctccaggaagatgaaccaatcggaatgttacctgaaaatttgttgtcattgatttcgagcagagaaagattcgaggccaatttctgaggaagcacaccggtgaatgagttgttgcccaacatcaagtgagtcaagtttaaggattcccataggccactaggaatattccctgaaagtttgttgttcgaaaccttgatcatagtcaaagaactgcacgatcctagtccctccggcagttggccactaagattgttgtcataagccacgactccggtcaatacacccccagaacaaacatgttcaggcaatttgccttcaagcctattggaagaaacctcaaacgttctgagctttgaatacttgcccaaatcaggaggcaaaacgcctgacaaattgttggtataaacactaaaatccaccaaattaggcaatcggcctatgccttctgggattgttccggataattgattcataaataaagccaaaccggtgagcttgcttagtttggcaaagtcttctggtattctccctgttaaattgttctgtgaaacgtcaattaacctcaactctagagcttcaaccacctgaggaatctccccggaaagtctgttcctgtgaagataaagctcacttaagttcttcagcttgaatattccttctgggattttcccactcatgttattctgggataaatccaaagactccaacgctgtcaaatctccaatactttcaggaatttcccccatcaaattggagttagtaatccacaatgttttcaatttcttcaattgggtatagttggaaggcagctttgagggagagagagtttgaatattggacaaccacagaatttcaagattagacaagctaccaaattccgtcgataaagagccattgaataagttggcccctagttcgagtcttctcaattctttaagctgcccgatagccgccgggatgttgccggagaagttattaccggcgagagaaagatttcggagctgaaccattcggctgatgtcactaggaatggttcccacgaagtagttgtcggagaggtataaagattcaagctttgaacagttgaacagagcttttggaaactccccgggaatgtagttgtagccaagattaatgtctgtgaggttgttaaggtcacagacaaaagaaggaactggagtggtgatgtttgcatcataaagat

SEQ ID NO: 378341 - DNA, 2119 bp, Cannabis indica
atatatatatatggtcttataaatgagcttgtatatatcctcatatcgatttgatgatgtggatactctaatatatatggtattagaaatatgaaattaataagtggagtatatctttgtatttgttctttatttatttttttcttcagagtacttatatatatattcttgatgtataatatatgagatattctaatttttttttagtatttattgttgcatgatcatatttgctaagctaatcatgatttaaattaattcattaaaaatatttacaaaacaaataaactaaattataattgatttaattaaattttgtagaaaaaatggacagctccaatcataatcgacgaagttcttgaatacattccagagatagagaaagagattaaacaacttactctcaaaaaggaagatatgttatcaaccattgacaacatgcaatcatttatcaacaaaaataatatgaataatcaatattcagaagttgactttttcactatttcagttaatgaagttaagaagaatcttgagttcatcttacaaattatatgcatgcaaagagatcatggaatgagtttgctctcaggtttattacagagtatggaatatgaaggcttattccttattagtgcttcgactcttcatatttgtgatgagagagtgtgctacaatattcatcttcaggtatttgccctttttttttttcttgtggtatataatagtatatatataggttacctacacacatttaagtatcatatttatcttcaattatcatttagaatagttaaattatttgctaaacagcacgaatagtatccaacgtagaacatgagttgttaaatcattattgcataatttaatattaaattttatatagtttaattaagtaatattaaaattacttattatttataaaatagtgctgatatctaactataatattaaatgttgagagaagtgaggcatattcctgctgtagaccagattgttgattgccttaccaaagccatatccaattcaaagtttcctactttgaggtccaaacccagcagctcctccaatcagagtttgagaggggatgttgagagaaagttagttaaggagcctttagcctatactgttgagtagttagtaactaattttagttagttatattgataacagaaattagtcgaattctgtgaggttgttggtttggtttcatgtacactaactcactctatttataggcttgcactcttctctttcaataatatatatagaatattttttattcttgaatcttgacattaaacacattataaggtatcaaataataatgcactttataataattgtgtatggaaaaatactacaaggtgataattagatgattgataatgtgtgtaaaatatagacatgcatatatatatatgcacgaacattgtttttaagttaataaaattatcagtttaaataagatatcaaacattgatattaggatatgacttgtgagtgtaaatgtatattggtttttgaaccaaatatataaattaaaaaataaaaactttaattactcattagttgttgttgtacaaatattttaagggttaagaaatgttggacaccacaacacgtgaaaaacgtaattactttattattgtaaaagcaattacaccaagacttgaacactttaacttgaccacaatacacaccaagcactcactcttttattttatcactagacacctttactacacacttgtgtataactcacacttttgaaagactttagggacactttagaacacactctcactcttttgaacacactttgaagacactcttgttggatgcacaacttgaagacccatgacccctatttatactactcaaaagaaaccaactataatattctagataattctaactaattgtgttactaaaatattcttgaaacttctaatgactattactctcattctagaaaattctataatattaccaaaatgatagaaagttctagatacttgtagagtaggtgttgatctttaacactccccctcaacaccactcttcatactgagttggtctctcagcttctgaaatctcgttgtgctaagtcctttagtga

SEQ ID NO: 378342 - DNA, 6658 bp, Cannabis indica
ttaggaacggggaaaactttaagcttgatttgtagtgcactgcaatgggtgattgataagaggcaacaacagaattctgagaaaagtgttgaatctgatcagcattgtgggaagaatggtgaattaggctcggatgatgagcctgattggatgagaaattttgtagtaaacaaagacaatcagggcgaagacaagaagataaagaagaagagtaaaactcggttgagaatagggaaaagcaatttcggaaggaaccaccaagcaagttgtagagatttgttgagtggggatgtggagaaagattgttctaacaagaaagagggaaataatgtttcaaacagtgcaatggagttgagtgatgaggaatttttgctggaggattatgaaagcgaggaagaagatcttggtgacggaaagccaaagaggaaaactttgggtgtttctcttagttcatctagtgaggaagagggtgaagatggttccgatggggaggattatgagcaagaagataagctgaaggtttattttgtagtcggactcattcacaactctcacaatttataaaagagttaaggaagacagtgttcactgatgagatgaatgtggcttgtttgggctctagaaagaacttctgcattaatgaaggtatgggaatgaatcatggcttctgtaaattgaagtttccacgtagttatattgtttagggtaacatgttatgtttcagaggttttgaagcttggaaactctactcggattaatgaaaggtgcttggaacttcaaaagaagaaaaatgataaagtctccaaaatgaaggtaataagtgttgtcttttctagttttcattattaggattcatgatcctaatttgatctaaggttttgagtctgctaagctttcaaaatatatccactcacttgttcatcactgaaacttttggacattatttgtatcacaaccacaaactttatatttgatataatcttaaagttttcaaaagtgatattggtctttatactgcagtgcataacgagaacacaatttgatatgaacagttatttaatatttttataggtttctaaatgttgtcctatatcttggtattgtcccttttcttttttagtatgaggttcttagccaatatactgccatttactattatcttttcctacaagcataattcacacattttgtttggagtagcaacgatatctactctttttttttcatggacaatgtatgtcttcctcacttaggcagtgttgatttgtagaacttaggagcaggggggagaataagaagaactaaggcgtcttctggatgcccaatgctaaggaaatataaactacaaaagcaatttaggaatgagataactcaacaaggtgcaatggatattgaagatcttgttcaccttggtagaagcatgaagacttgtccatattatggttctcgaagcctagtccctgcagcagatcttattgtactaccttatcaatctcttttatcaaaatcatctcgtgaatctcttggcctgaatttgaagaataacattgttatcgtggatgaggctcataatttagctgattccctcatcagcatgtatgactcaaaagtcactttgccacaggtaaaccaattattaatgtgatccaactaaacttggaggctggttcgcaataatttatcaacccaatgaatggacaacctaaatatactagaaaatatatggtctttgacttatctgacttctaggattgaaaacgtttcaccgataaattaatgtactttgactttttgattcttctggtttcattacagttggagaatgtgcaacaccacttaaagaagtactttgaaagatttcacaatcttttgggacctgggaatcgaagatatattcaaactctaatagtcatttgccgggtttttctccaaactctgcacaatgtggatgatgcaagttatacagattcatcacaaaatattcctaaggcatctgaagcaaatctttcttcttattcatcgatggccattaatgattttttattttctgttaacatagataatattaacttgatcaagttgcatcagtacttaaaggaaagcaatattatgcacaaggtgaatccttcttgtgatcattcttttattactatttgtgctactatctcattctacatttctgctcctgcattcttttagattgtcatgtgctcagttttctaggtcagtgcatatggagatcgagtatctagcctgcaaaatagtttggcacctaaagggactgttggatattgtgatgatggaagcactctgtccagtttcagggcattagctgatatgctgctatccctgacaaacaaggatggtgatggaaggattatcgtatcaagggaaaggccagcatgctcccaacaaggagggtatttaaaatatgttatgcttactggggaaaagattttctctgaggtttgttacataattcctggatttagtaaattaaattctgctcccaattgtaacgttaactctgaattttatgtagattttggatcaagcacacgctgtgattctggctgggggaactctgcaacctatagaagaaacaagggagcgacttttcccatcattgtcgcctgagaaatttcagtttttctcatgtagtcacattgtccctccagagagcattttgccagttgctgtttctcgtggcccttctggtcagtcttttgattttagctacaactccagaagctcctctaaaatggtgagtacatgacaccatatcttttgttatactattaaaacacatatttgtcttatacaatcaatcattctcttaatttatttggtgaaatacgtcccatgtgcgtgtgtatctatatatttttatatatataataatgttactgggttcaagttcacttgatagattagtattagcaaatattgccataaagctaacggaatgacatgactaatacgctgttggggtttgaatttaaagatacaggagcttgggcttttgctttgcaatttgacgtcggtggttcctgaaggaattgttgtgttcttctcctcatttgattacgaaggactggtttacggtgcctggaaggcttcgggcatccttgagcggattttgaagaaaaagcgggtatttagagaacctagaaaaaatacagaggtggaatctgttctcatggaatacaaggaaacaattgatacattatcaactgggagtctgaaagataatccaactcaaactggtgcaatactttttgctgttgttggtggtaagatatcagaaggaatcaacttaagtgatggcatgggtcgatgtgtagtcatggttggacttccctaccctagtccatcagattttgagttgatggagagggtgaagtttattgaaggactgggtaatacaaattccgtgaaagcttcagatattttggtcagtgatgaaaacaacattagtggagttgtaaaggctgggtttgacatactcagaagttgcaggcgcagaggaaaagattactacgagaatctttgcatgaaagctgtaaatcagtcaattggtacgtgcttcattaattattttatgctaaattttaatgccagaaactatgacaaaactgaagatattggaacctgaaaaatcttatatttggctagtactaagcagttgtctttctctgcctgttcccctctctttcaaattttatacttgtaacccgacctgatgcctaagaccatatgtgattatgcatgcaatgatcatgttttattctcgagttttggtgtgccctgtgagtcacgaatgtcctttcttacaaaccaaacttgtgacctgttgttggactgttctaatgctagagtagactagtttgcggtgagagaatcaagaagttactttatggatgtatggccatacattgcctgcatctgcctatgtttttataggtaaaaaatcacatttaatcatgtgggcattttttattgtttgtttcaggtagagcaattcgacatataaatgattatgcagccattttgctggttgatacgcggtatgcatacacatccgattcctcgaaaagaagcttttcacacccaactagcaagctccctgaatggataaagggtcgtctggtttcatcagataattatggtgacgtccatcggatgctgcatcagttcttcaaatttaacaagaatcatgttagaccttagtttatagctataatggtagataataacatgccttgatcgagtaattcaatatcaacttcgctgttcatcatcccgtgagtgccaacatgaggtctaatcatttttgtataaaatagacttaaaaagtgttaattttctataacgtcacatttgtgtgtaaaagttatagggttagtttatagaataaactaggtaacaatatcgcatttcgagcatttcgagcaactgttcaaatatttatatatatttatttttcagagatattatatattatttagattttatggagttatatcttttattaattttattaacttattctataatgatgtttgtggtagtcataataaattttttaaatatttttataaactttctcaataacttaccgtgttcaagttatggttcaaataatttgttgcacacattttttttttagaagggtggaaaaataattgtattgaatcctaattttcaacactaaattatctagaatttctaaaatatatagtagaaatgtgctataattacaattaatatcattgtaaagaatctaaaatatttatatttaaatacctcaattaaggtcgcatttgtgacatttttcattagcgcatatatttaagtatatgtgtatgtgtgagtttcattctatttttaaatttatgctataaaatttaagaatttaaattgcattacaataaacacatgttaagtatttctttttatttttgaaaaagtctattattattaatgaatagaatcgagaacaataacagaatagattggagaaaggatttcccccaaccaggaacaatcattatccaatcgaagagaaaatttagttaagccatgagcagctttattagtttctcgcttaacatgagaaacaattactctaggaaaataggataataaaagagaaatatcatctatcaaatcacggaaatgagatacacaactagtagaagaaagtttgttaatagtattagccactatgagggagtccgtttcaatggagtggatagccaaccggtttgaaagagcccatttaaaattgtaaataatagaattagcttccatctcttttgtagaatagcagccacgtaatggtttcgaaaaagccacaataacatctccaaaataatctcgaattactgctcctacgtcaataactgatcctttcgcatcatacgtagcatctacattcaatttgtgaaaatcatatgcaggaggaagctatttgacctgaggtgtagtgttgatatcaaccgagtttggagaaactgatttggagcacaagtgtgtatccgctgaagcaaccgtaggtagtactttagcagtataaaattgctcgaggtaaacatctggaaaggaacaaataatacgaggtagtttgggtttagtgccatgtaattccttgtttctttccgtccatatgcaccacattaggcaaaggattttctccaagtctgaatctttataagctgctgctaaagtagagtatatatcatggccattgaggttgttgattttaggagaaaatacctgaaattgagtttgattccaaatttctcttgctctagtacaccgaaataaggcatgtcctaccgattcccaaaccccatcacacaaggtgcatgttgtaaaataggagattttcctgtgcataagatttacagcagttggaatggcatcattgatgactctccactcaaagattttgatcttttttaggtaaattaagagaccaaaatctatcccaccatttgcgaggagaatttgaagatgaagaagtatctttcctttccaagctttcggctaagtgataaccggatttgacattgtaaacccctgagtcataatggtaccaaaatagtttatcctctctaggataataactaagagaaatagcaagaatcctatacacatcgatctgaccaaaatgactctttaaaagacttatatcccattgtctgttgatcaaggctcaaatttgtacattttaagcctttatttatgcatagataattaatatgaattaagtattctatggttttaataataaatttattttagatggaaatattttatttactttaattttttgtgttatttttcagatttaagcaaagtggtatacataaaaattaaatgagaagttcaagatacaacaattacaagataacttccaatccaactcttacaatttctccaatttatgcaagcataatgactttgacgtgggccacgttcatcaactgctcaacaccaatttctcacctttttgagctatctctcccacttatttgtacacgattttatacgcattgagagcaaattggcactataaataggacccaattctaatgtaaaaggcatcagattttagagtagagaaatatattttctcatcttgttctctctt

SEQ ID NO: 378343 - DNA, 2169 bp, Cannabis indica
aaaaaaaaaatagaagaaaaaacaatctttgatattcacgtgttgttctttgaaattttacctgcagagaaaatgattgaaatatggtaacgtataacgttttaaaatgagtatttttttctctgacaaaaaaaattgtgtttttcttttctctctattttgggaattaaaagaggaaaaagaaataaaaaaaaaagttaattcagatttttatcctcaaaactttaatatctaccaaatcatgttctttgaatttttctgacggttaaaaatttcccatgaactattgagattgttagatttaagaacttttgtttaatttcattcaattttactatttcagtaattgtttatatactaaactatgttctccagactttgatatctaccaaatcatgctcctcgaactttgacatatactagatcatacccattgaacttttattcatgttagactattttttactaaaatcagacaaaagttcttaaatttaacaatctcgatagttcaggagtattttaaatgactttaaaagttcaaggagcataatttggtacatgttaaaatttggaggataaaaatcctaattaaccaaaaaaaaaaatggtgtgaactataataataaatttagaataataaaacatttcagatgaggaacaaaatatatgtagaaatagcatagacttagcaaaggttgtgaaatataccaaaaataaatgcatatgaggaagtgaaaaccaatgatgctcacgtaaccgcgtatgtgtaagaatagtatttaattaattatctttaatgagtgtgagctgtttcatatataaaataatacatatttgcctactactgtgttgttctttcttgattggtggttatattaaatgaccacatattcaattttcatccatttgtttttattgccaattcaatgatccatcaactatgttgttagatcctttagataaaaaaaataaaataaaaaactatgttgttagatccaaaattaactattaattattattattattatttttactgttatttgcttttacatttttaaccaatataaaatatattacacaaagaaattaaaataaagatgtaatacatatgttttaaacgtacgtctggctttaaaatatatgatctatttattaaatagtgtccttttatgtattagtaatatttgtagaacctagattatttctccatttgtaattattaaaaaagaaaatgtctccattaattaatgaaaatgttaatggtcacttatgatggatatcacttttgtaattaacgtgtgtaaaggccttttatttttttttaaaaaaaaaattggaccctttattaaaaaaaataaggtatttttaaaaactactaaaatatatatgtataattttaagtaaaaaatattttttggaccctagtttggtgggtgttaggtgctggcttagcccgccttagctcagacctaatcttgcatgtgtaatattattatatatatgtaatttaatattaattaccacttattttactttaataataattataaaaaaaccataattaattatagagcaccacctcataatggtactagacacttgataccctataggatataatcctattgaaaatatatatagaattatgagaaatgctaaaaagcaccagagtgtctagcattgtcctactgttaatatcattatttgtgtaattaagtatcagattttatataatttttaaaatatatagctaactaatcacaaattaatacgtttagtaaatattaaatactattatggaaaagccatcacttgtagagcataaaagcctaaaataggtagtagctcaattttaggtgtggaatttggttaaatgggaggtaagaaagttgaaatggccctgttatcctaatacgttctcatatcacaaaattgattactacaactttaccatatgatattctgttcgtaaatatctatatatttatatataatatcatttaaatccacttataaatattattaaatgtaacgcccgtattttaataataataaactcggaaattaactttaataatttatatattaataaacatatggatcgggatcccgagtatcaaaatttaggttaaaagtactttactattacatatacatatatatattttt

SEQ ID NO: 378344 - DNA, 2835 bp, Cannabis indica
gtaatcacacaagattggtgagtaataattgagactctttaaattaacttcaattacatacttaatgtgtctaattacatggttacaaaacacataaaattacataattaactcaaatttcattcaaatctaaattataaaatggctttccaaacacatttttaaattttttagctaagagaaaattaaatgtggaaaaatatggatgaccttattatagtctaccattaatttattttgtacttaattatcattagataatttcttcattagccaaaaaaaaaaaaacacaggagaagataaccaaatcacaagctgcacatcattaattcatcattagtgattggttaatataagtcttttcgaaagagcacaaattttcaaaagcattaaaaaatccaaaaccatgttttcacatgtacgaataaacaaatatagcatatatagatcacctactttaggattgaacaaccttgaaaatgtgcatcaaataactcactataatgtcaaaatgcaactaaatacttaattaaaaaaaatgactaatagacacaatatttaaatatttatttaattagcattaattttggaataagtgatatgattaatagtggcttcctcgaagcttagcaaatgaagtttatgacaaagctttagcctttaattaaatttaaacaatgagtgtgttaagggctaaatggaattatagtacttaaataattatttaatattattaagtactaaactaatagtgcttaaaataataatttaaataatgatgaacgtcttgtaaattattttaggttttttataataatttttaaattaaaatatataaaatttaatatttaattacatcattaataatgatacaaataggacaattatgattttggtgatgcatttaatttgttgtcttaacttgctagttttccgtttggtggatttataaatgtatgattcacctctaattgaatttttgttatttgtgattaaagtttcttgctattaaatagataaatatatatatatatagaaattccatcaaatataactcataaaaaatccaaatttagaaacatgacaattgtaatacagtgaagtattcttttttaagtctcattaattaactgttcattttttagatatacttaattaagattaatatacatatttgtgcaaatatatataattaattaggtcccttttcaaactttatagcaaaatctttactttatgatcacaagtaaatatcacaaaatcccccatataatatgacagcaatatctcacactttagaatagactaaaatatatggtcataactagatatcaaaaatcaaaataaaaataaactctttaaaattgtacacaaatttattctctctcaaatatgtattcaatattaattatatatctaaagaaatacatataaatattaaaaaattaagccaaaaataaaataaaatacaataatacatataaataagtttttgagatcaagaactttataaataaggttcaaaagaaaataaaatgaaaagagtttaacctatgtgaaaaataaatttgaaagaaaaagaaagaaaaaaattatattcataaaactagattttgacaagaactaaaaaaatatataatttatacatatttttggaaacatgtaagaaaatatttatttttgtcatttagatttttgagtttttatatgtatataatggtgtacattgtaacatggcatattgttgttcgtagatagatattgcactaattttggaaagagaaatgttaaagagatattattggtgtttgatactttttgtctatgttatatagttattgatgtaattaagtattgagtctcatataatttaagaaaataagtattgttattaggtaggtgcctagcgcctctagacatgttgctttgcgattggctaacgatactccctaaaagttattacattaaactatataggacccaataattagttgtaccaatggcgatattaacacataagaaggtgctagacaccacttatattttttagtatttctctaagaaaataatttttaagaaatattactaataaatcgtaaagcgccacctatagaaagtgttgggtaccgtgcccaatagcaatgctcttttaaaaaaaaaatattaaacatggttagaaaactgctaaagaacacatgtggtgtctagtgcaatatcattattagtacaattcaatatcaaatctcacttattttaatttaataaaaattctaaaaactcactaaacatcatctcatcaagtactatgcaccttaatgcctcatatcaatgctttaacttaatccaaatgaactaagaataggatggatccacctaatcctctttttaattatcaagaaaaaaaaaataaaaaaaaaaaccctaagtgataaagaaaatggtaaatattattttggaccctgtgttttgcaaaagttatcgattggaccctgtgttttgttaaatgacaaaatggatcctgtattttctaaaatagtaaaaataggaacttttttttttaaatataatcaacttagaaaacaattcctaatacgaacatatacaaaaaatgtaaataattttgtcataacacttttagatcggattataattaagttttattttgacaaaaaaaatcaatttatggtcctatttgtaccattttagaaaatacagggactatttggtcatttaacaaaataaatagtccaattgataacttttgcaaaacacagagtctaaaatggtatttaccaaaaaaagatggccttttcatgtaatttaggaagaatagaa

SEQ ID NO: 378345 - DNA, 1852 bp, Cannabis indica
taaaacatggttgacataccatcgctacctgggcttttatcaagaatcataaactttaattttgttataacctttgttgcagtaaaaggaagggtaagggtttcattgattcctattgttattatggtgggaatggttgttgtaactagctccaacgcctcgtgatctattgctgaagttgagaaaagatcaataaagtagtctgtaatgattgttgtcattccatcctttgaaataactttggttccattgctatccatgagagatacaattttattccctaccttacgagataaagcatgggcatggaagaacttggtattttgatcgccactttgaagccaatctactcgagactgttactgctatttcatgagtgaagttgttctaacagttgcaatgttcatgcttgtaacttgttgttgtacattggaaatattttttttgaagttaccaaattttgaaacatgccatttatgtaaggaaaaatcacaagcatcaatcttatgcaaaaaaatctccatggcagtactcgaagtaggagtcaatcattgtcgttgaataatggaggaagcttcttcatgctgtagccaaatttattcaaacttgaaccttgtgctactgaagtttaacatttttcgagttgactatgactgcaatagctatatggtctgaggtgtagtagtccaaatgatgagtcatgataggatcaaatttggaggaccaaaagtcattcacaaaacaccaatccaacctctctttaattgtatccatcgaatgtcttccttttatctaggtgatcgagtctccttcaaatagttgttcatttaaatggcatctgtcaatagttcgttgaaaatgatccatttgcgcttcattgcgtagagcacctcccaatttattatcatttgataaaatctcattaaaatctcctattactagccacgaagataaatgtgcaacatccttaagtctatccaagggagtccatgtttgagaacgaagttgagtggaaggagctccgtaaaatgcagtaaaatgccattgtgagtgatttgcaaaggaaatataacaatcaaagacatttttattaaaatttagaagtggtacatctacatcatctttccaaagcaacatcaaaccaccctcaagcctactctagggacttgaagtttattaaaatgtaaaacattacgaaagcaagaaataacattcagacctaacttagtttctttaaaaaagtacatgtggggatttctctttgacaagcaaatggagatgaaaaaatgcgcttatattccccaatccatgtgcattccaattgagaattttcatggttgtttatggggctaagtatcagccgctggtgcattgtcaaaggagccagtagaatccacaagagcagcagaaactatctggttttttttcatcttcagctaacaaagtaggagtgaacatatggagttaattactcctgcacctcttgagggtgtatcgaagtgatcctctctcaggctgtctcttaaagcttcaatttagagagaaattctcctttccatagttccctactcgagtggatacatcaactgatggagaggatgtagcattggaaaaagatacattcaagttggctttgtttttagtcatgatattgtcaagcaagggtggataagtagcaacagtgttaggaccattgcaaagtcctgtcagtggcatataatgcctgataaatcagtatatatatttatatatatatatatatatatatttgattttgagtttgtaaaggtgtcattgttggatatattttaccaggatcaagatttactaacaagtatgtttcattaacatc

SEQ ID NO: 378346 - DNA, 2486 bp, Cannabis indica
gtctttacaaatgaattcttccagaggcattggttctggtcatcttcgcaagaatcccattgcctggtagacattactaagagtaggatctgctatatctgaagcttttgtcgcaccttcagccaaaatttgatccaaataagctgaatcagaaattatttccatgtagcgaacctggatgggatcaagatgatcaaccaaggcatcagttagaaggggtttaaactttccccagctcatatcttgacattcatgggccacttcctctttcgtccttcccgaaacaagctgatatattgaaagaagattgttgcattcaggtctttcaggattatcaaattctaggcctgaaaaagagtccgttttgcagcgctttatcttgttcactataacgtcttttggatcaagaagattgatccgagattgatctgaaggggcagacttggacatcttggaaagaccatccgtcaaagacatgattctagctccagctggtggtataagaggctcaggaaccttaaaaagggaaccccctcgccctcctaatttcttccacttccttcctccatataaatggttcacacgttcagccagctcacgtgttaactctaggtgctgcttctgatcctccccaactgggacaaagtcagactggtataatagaatatcagaagccatcaggacaggataagttaaaagagcaacccctacattttcatctcccgccttgagtgatttctctttaaactgaatcatcctgttcagccacccaacaggtgttgcagaacttaataaccacatcatttcgacatgagctcgaacatgagattgtacaaaaactgaagcctttgatgtgtcaactccgcaagccaaatatatagctgctgtatccctggtggccttagataatttttgtgcatcatacgacaatgtaatcgcatggagatccacaatgaaaaaaagagtatcatatgtattctgaagtgaaatccagttcttaattgcaccaagataattccccaggtggatggatccagtaggctggactccagacacaattcttttcctcagagaactggatggagtttcttcaactgcaggttcagtaggcaaaacactacaaacgcatcgaaaacccttgaaattcctttggcgatgagcaatgatggcaggttctttccagtacttgctttgaaacctaccattgcacagtgaagtagcgaggcaaggagatgaggtagagagattaaggaagtgtgagaaaactgagcgactcatcttcttctccgagtttactacatttatattgaaacaaatttacatcaatcctttccctcttaatccacactcaactagatagccaaacacaaaaacacaaatatcgaatacccaaatgattctgaaaatttaaacatacagatccaaattatttaaaaaacaagacctaaatagtaaaatggaagtttaaacagaaagaattcaagttgagctgaattcccaggatttcaaagcactaggcaaaaataaagggacagaaatctttctacaaacaccaaatgcttgaaaagttaaagaaacatcttctcaagcaagcaacctaactgagtattttcacaattaatttacttgctgatagcaacaaaatttacattcaagaatcaagacagacaataatactatccatgatcatatgtaaaccattttaaaaaaaaatatagttaaattctctatagcagaagaaataagtctcataacctacctgataatgttagttcctgctataaattgaacccaaacaaacaaggctaaaataatatttaaagtgattcgcctattctaatcactctaaagtacaaagaaaatgaaaaaacaagcaatcaatttcatttagatatgaacaagaaagcaaagatagaaaatgtaagaccatcaaagaacagagaaactgaaaaactaaaggaagctttggctttatttgtctttctcttagcatgaaaaaaaaaaatgggatggtgagaggcgtatgatttcttcagtatactgctccataaaactaaaattccaaggcaactacagaacagtaccatgttaaatactaaaagcaatgctgaagagatgcaaatgaataaacctagagaagtagccaaaagagagtgccttaagagacatagagggactgccttgagtagaagagagactagagaggatgagaccttgctgtctgcgtgagtgaagtggaggcgagccttctgtgttggtgttgctgctgcgtgcgtgaagagaaggagagagagaggaggagaatatagtgcagaagaggatgagggagaaagattagtgttcctaggtttttcttttatttatttagttttgggcttctacaatttacaaaagtcacttgaactgttttaaaagagaaatttgataatttatgctaaaaaattagatagggtgtttaattatacccaattattacacataaaaaa

SEQ ID NO: 378347 - DNA, 3960 bp, Cannabis indica
aaaaaaaaaaaaaactctatagtcaggagcctattatggccttaacgatgcaccaatctggtcccccacaattcacaaaggaggcaggcaaagttaacttaaacttggttgcatcatagggaaaaaggcccaatcttgacagggtggcgcaccttccttccctgcaactttcttattagcccaccaatctgagtttatttctgacttctgagactctactgcatctgctgcattgtcaaatttgaattccctggcagaaccagaaccaagagttatggacctatgactctgatcactcgctacctcatccccattttcctccacacaagatggagccttctctggggcgtccttgtttaatgtttcaccaactcggtcatcatcattgtaacaaccattggctgttttgtgttcttctctttccattattgatgtgtctcttagagatgtggatactgctccagccaaggccaaagatttcctctccacacaccttacaacatcttcactagttagctcaaatgagactctatggtcagctacagtttcgccattgcggtatctgaagtgtgaaggcaagtttggtgtagcctcaaatgtatgagttttaaggagataaccatcagtaggtggaggagagggcttcaaggtatctggtgtcaatgagccagagccttgtcttgagccccaatcgaatttggagagcttatcgaggttcagtagctttggaggttcacctgttcggaattcaaggaagtagggaccatttgcagcacaatctctatcagggaaaggagaagatgtgccagaacctgatatgcctgagcttggagatataaggtgaccaactgggcttccaggttggagctgataggattggaattcgttgtggaatatggggaatctctgaccagcttcgccattctgaaattttgggtcaagcaactgagcaaatggaacctcgggagaggaaggcgttgttaaatgcacagattcgggaggtggagtaaagggagcagttgatggttcggttgtgaaagtagagaaaacaggtggtgaaactaactgagtttcgtgtgcataaggaccaattgcgaacattgaagggggccctggagagtacatactggcagatacagaagagagtgatggaaaagcagctggagattgtgtaacagatggaggttctgatagaaaaaaagatgcaggcgaggagggaggagcattgaaaggtgctacaacggtgggtggttgggatatattttcagctcttggagcagtggttcctggttgtgatgtttctggaacaagaacagcatgcccaattctctttctgttgtttctggggaatccaaaacaccaatataggctccagcaactcccccatcttctcttctgtgtgaaacaaaaaatcatgacattagttttagcgcacacataaccaattttctccttagctattgtggaacaaaaatacactaattaatcaagtaacctcatgaatatctataatcaagataaagtctcattatgcgtagaaagacaaaaaaaaaaaggtgacctctataataactatataggaaaacaattcatgttcaaagcaaaagcttatttcactcagaaccatatgtaatcagcatatactttctcttttaataagactttattctataaaaaaaattcccaaaccccatcacaggaattgctagaattctctggtctattacagggcaaagcaaaaacactaattctacatgtggaatacaaggtgcaagctgcaacaacatcagcatttttgaagccgtagactcggaaaatctgcacctcttgccaagtcttttcttacttgccctctaatcaatgttgaatagtgtgtctattccaagttcatacacagcaaaaataaacctttgctaacccttatatgtacttaaagatttatacattcagaatgcacttaaagatgtatacttaacgattcaaattgcggttattaacttgataggttctccccctgtaaagcaatgtccaagaatttcatgtctacagtacttggaatagtactgaaccaaaagactcagcttgaaatcacagcacaacaaggaacagaagtacaaacaagactaaaaacacaaccaaaccagtgattacttaaaactcaattcaaataacctaatcaataaatcatacacgcaataaaaccagtgattacttttaactcagttgaaataaccaaatcaataaatcaaacacggaaggtcataagagaatcgaataactataaccaatgaaattgatctaaaatccactacagtatattgattgccaataccaaatcaagcatttcaatcatgaacttattaacaaacaacataatacgtaaacatctaaccaagtcattatcttcatttataaagaaacataaaaacaaaagagagtaaaggaaaattacgggaacagaggcttgaggagcacgattctcagcaaaggcgatcgcagtggcagcagcgttaatagtttctaaagcgttattcaaagctctggagtctccatcaatagtaatactaccggcacctctcatatcctccgacccttgttttctttctcttcttcctcttcttcaccaccgaaaactttctcgagaaagtatcacaagaattttctcgagaaagaagaaaagaaaaactcaaaaacactgaataaaagacttggagagaagaagaagaaaaagaaccaaaacgacttggattcataaatataaaaatcaaaatcaaaatctcgatctcttaatcagttttataatattattattttctatacataaatatatttttggtgcgaaagggtttaaaggtcaaacacggcaatgacttggctttctttctaggtgatcatatcgaataccctaaagaaactttccaaagatcttcatcttttttctgtgttcttaccaaaacagcctcactttcataataaatggagggtagtttggtcagagtactcgtactaggggaattaagaaatagaattataataattaatgacagaattaattaagaaatagaattaaaatatttaatgagagaggctgtttgtaagtaataattttaaaatgtatggttaaattggtcaaagaacgcacgtgcgggcatccactttggatgacggggttccgtgtagtgtagaggatgttgggcccataattccaatactatccccactttacccgccacttttataaaactaagtttctctcttgcttccttttattttattttaatttaattctaataattcttaaattttataaatattaaaattactccccacactattaaatgtataaaaataaaatgtcatgtataaaatgaattagctatttttttaattgaactgtttttagtttttaaaaataaaatataacttttaaaaattaataaggtgcatttggccaatttttttttaaaaaaatattttttttaaaaaaattgagttataaaaaatagaatgaaggtagactttgaacctcgacccaaagtcagacccagagttagactccgaactttagacctagacctaaatgtgaacgcgaacgcaaagctagaaaaaaaaccctaaattccagacaccctgaccgtgtcctaattctattcctatgaacgaaagaaaaaaaaataatgttagttatgtcatgtagttttattcggagaatattaatgcaatttaattatttaatcataattaaagtaaaattacatgtagttatataatgttgtgtcttaatgtacaaaattttttaaataactacatccaaaaccaatgtatgtgagtgtgattttgttattgggtaaacggcggtaaaactcctaaaatttttattttagtctcactaaccccaaaatttaaatttgaacgggtacacgtggcacaattttattagtccacgtaaaaaaattattt

SEQ ID NO: 378348 - DNA, 1385 bp, Cannabis indica
ccatacataagaatttatgagctgttacagactcctcataagctaggaaagaaaacatccagtgacggagtttcatatggattatgaaattcaaagttcgtcgcactcactggagagtagagacaataaatttatactgatctcaatataatttctacacgtacaaattagcagcttagaatcagaaaaatctacaaacaatgatacaaaacccaatcattactacttccattttacacacaaaccatgagatgagcagacacaaataaaaatgtgtcaaaacgattttagccacagctcaagcgagagtctgcgatccgcatgtttgtctgccgtcgaggaatgccaatttcacaggcattaaccctggaagcaaatcgtagagaacagagcgactccccaactgaagaagaatcgggtgacagattgacaaacataagagtcttggagtcacctcccagacatggctgtttagacaatgaaaattgactgttaataactcaattcaaccatgtaaactacattatgttctttcatgaaagaaaaatctaaatttctactgtatggcaatatctatgtgcaaaggagaaaatattacatacctgaagaagatatgtcagcttagagttcctgaaaggaatgtgatcttcctttttggctaaagagaatataacatcactcaagcaggacaaacttttattgatagcctgttgacaagataaattagtaacaaatcgtttgtgtgtgtgaatataacaactacacatacgagtcaaaaagtaacaagaactacctgagtttcctttaaacgctctccagttgcaccactcttggaaagccgttcacttccggccagatcaataaggtttaggacaccttgaacttgttgttcagtaccctacaaagcattattttattttattttatttaaatatatatatatataaatatattaggaaaataactagaagcaggagtaggtagactgttgaattgcaagagaacaacaaacctcattaacaccagaaattcgcaatgtgaacacaaaatgacttctggatgattgctcattcatttgggtcttgccaacagatctagtgtcatacagataaaaatattaatatatcttgaagaaattaatatacatatgcaaacacatacatatatgtagctataaataaaaatatatacatggtacggatttagttgagaagttgcacaaaatggtaaaagtctgtacggaaaacagaaacaaacatggccttctagtgtaatcaatacctaaattcaagaataatttataaatgaaaaaggtcttatgtttgaacctgctctgtgctgcttgttgtagaagagatgaaatttcttttatgctacatacatca

SEQ ID NO: 378349 - DNA, 3069 bp, Cannabis indica
tctctctctctctctcttcatccatcctcttctcctgctcaaatatatatttatgttgttgtctgtaacaggaggaggattgaccgtaccaagcaatttgaggatattacaatggcaagcttgcaagaagaagcataacaagctggagtttctcattccatggtgggattttcaattgggcatttctgtaaaccagttcttgtcaatatttgcttcttcaaactcagatttcaggtgggtttaaataaagtttctatatttacattacatgcataggaaggaagttcaaagccattgattttctgacaatatctcatttctcttaatcattttcaggcacagggcattctcctttttgttctctgaaggtgaaagtgaggaattgaactcttcgcagacagttgaatctcattcattcccacagccttttgttgaatcaaaagaaaaacttggtcttgctccagcagccattgttgcatctagaagggaatcctttgcctcctcaacttcaatggctttgcagtccttggattctaataggcttaggccacgttctccagcatttggttagtaatattactaagctacttattttgtggcacaaatcacttactttcttaatccttttttaaagtttctatcttttatttgggctgtaacagctgcaagaaattccaaggctagtagttcgaaagaaaatgaaaatccaaattactattcaaacccatatcaatccattgtcatggctagagattcccttaaacagagagaagaaacttcaaagatgcaggcagaaattcagaaacttgataatgaagtaagcgaaatgaggagaaagaatgaagaggaaaaggtgaacattcaagacttggaattggtactgataaaacgtagaagaagggcagagaagtgtaggagactggccgaagcacagtcatcatataggactatgcttgagaaaatgataagagatgctatgcaccagtaagttgattgattataattattaagtgatgagtataacaatatatcaatgattacaacatcacaacaacacaccttgaatagttgatgttgagattctttagagtcctccataacctgcacacaaagagaaaagaagaactaaaggagtacatggggtgtacatgaacactactccccatttctctctctaaaatctcacacacaaccatatttccatgaacataattgacataattgaggcataacccttttgagaaataatgggcttattggcccaattagagagaattagatgtcccgagcttgttagtagttagtactttatatcgattatggcccaatagtaatactatggaatacctataatacagttattttatatgttaaggaatatatatatatgtattccttcatagatgagattacaagttcatatggactgactttttgttttatgtattgtttctttcttgaaggagtgtcatgtataaagaacaggtgagactaaaccaggctgcatcaactgcactcatggcaaggcttgaagctcaaaagtctatctgtgatgcatctgagaaagacctccatagaaaatataaagaaagggatgatcttgagaaacaaataagaccagaatgggagcaagcaaggaagaggtcaagaatgaatgctaatgatgatcttttaattgaagaaagacaccatcataataataagcctatgctgtgtttgcccgaaaccaaaccaaaaacacctttacacaaggaactcagagtttttcttgaggaagagcaaaaagcttctaatgctggattatcactgagtgaagaagaaaagcaatttcgtataggtaaggtgttgaagaaatccgaaaagaatttctccattgacaaacgtggcggggatcagagtaaagccattgttgtattggaggatgacaacatagttgagcccaagtttagtgaatcaaaagaagaaaacaacaaataccaaatgagatttccctctcaagaaccaaaagttgaggaagaagaagatgaggagatcaggaaagaacgtggcaaaggcaatgtagagaaatggctgcagttgctgttagagaatgctcaagaagacttgttggaagctcaacatgaactcgaaaacaaaagaagcaagactaataatggacagcattatcactaaactaaacaacaagtaccctcaaatgaaggaaaagattgcccatgaaaaagataaggataagaagaagggaaagaaaagagaattgaccatgatgatgatgatgatgatgaagtaagaactgtggttgaaggaggagttggtgaaacaagcaaaaaggcttctgaagaaagaggaaggagtcaaagtgttggaaaggaaaggaagcttgtgaggtctgagagtttcagggcttttcggcgaatcccatcatctccatcccttatcttaggcatgaagaaaagtgttgactgcatgggaaagaagcccatggttagtggtgatgatgaagattatgatgtaggaaatagcaatggcttcctcaacctcaagtcatccattaagagtatcaagagagcagtcaaaatatagaatgctcagttggggtttcacattattacatattttttttcttctccttaatactattaagattgttacaatatttttaaaaaaaataactgtgtgtaagttttaggtagtttgtttctttgattgattgctttacattacgtcttttgtttttgtgtataagatttgttgggtcaagtttgtaataacaacttgttgtttgataaaaagattataactgttgtgttctgtttcttccattctctttactccttttaattaatcctgttttagtgttttatacaagggataattgcggcaaaagtccccaaaaagttagggttgatgcagattagtccccaacttcaaaaattggcggtaatagtccctaaggtccccattttcgttagtccgttagtccctctttctaactgatccgttaaactcaaataaaatgccacgtgttaatttttgattggtccaaattataattttaattaaaaattttaa

SEQ ID NO: 378350 - DNA, 5564 bp, Cannabis indica
ttgaaacccctttgcgacaagtcgagccttgtatcggcttacactgttgtctaaattatatttaactcgatacacccatttgttttcaacaacatgcatatgaggtaaccttggaacaattatccaagttccatttttcttaagggcatagtactcttccttcatggcattgttccattttggagaatttaaggcttgttcaagggattctggaaggcaatcggcagtggataaatgagaagtagaggctaagaggatttttggtttaaaaatgccggccttggatcttgtgatcatgggatgagaggacttatttggacaatgggtttcggttgaggtgttgggctgtattggagatgaattaggaatggagatgggcaaatttgtgtcaattgggattgtggagtaagagtttgaagtgtaaggagtcttactttgattattgctggaggcagccttagaaactggtgtaaaaggatgtagagtaggtgttgttgagcaatggtccatttcagcatcattatgtccttcatcatgttcctgttcctgttcaaggttagataaaaaaggcaaccattgactatattgaacttgactaagacatgtgttaatatcagaacttttaaaatgagacacactaaagcctgaagcaaagggaaaatcagattcgttgaaagttacactttggacaatatatactctacctgaaggatgaaggcatttatagcctttgtgattgggactatacccaaggaaaacacactttgttgatcaaaaatctaatttatgttgattgtagtcacgaagatgaggaaaagcggcacaaccgaaaactttgagaaaatgcatatttggtttgactttaaaaagcacttcagtgggtgatttttgatttaatgttggagttgaaagatggtttataagaaaggttaatgtgctgaaggcttcccatcaatagtggagaggaatggaggcttgagtgagcaatgtgagacccatttctactatgtggcggtgttttctttcggattttccattttgaggatgtgtgtgtgggcatggatgcctaaagtggattcctagagaggctagaaaatgggcaaggcttctatattcgcctccccaatctgagtgtagcactttgattttgcactcaaattttctttcatcaaacttttgaaagacaatgaatgtttctttaacatctgattttaattttaatggataaatccatgtaaagttgctaaactcatctatgaaatggacatagtatctatatccatctttagacaatattggtgaagggccccaaacatctgagtgaataatttcaagaggttttgtggctgttttggtagatgaagagtagtgcttgtgttttgatttgcctatatggcatgcatcacagaatttaggctgagactgaaaacaaactttttcattgcttaacatgactttcattacatttaaacttggatgtccaagtctcatgtgccaaatgttgatatcaccactgttactgtttttgaacaaacaaagattgagcaaatttttcatgctcttttgatttaaaaagactcttacaacttgactctaaaacaggactagactctgagataaaactcttcttggaattaggagaaacagaaacataagtattggagcgacttgaaggattggatccgaaacatgatgtaggactatgaagctgatataaaccattgctatgcattccccgagctacctccttcttcgtagccagttccttgacaatgcaacaatcagaataaaactcaacatacacagggttatcatgagttagctgggatatggaaataagatttttagtcatttgagggacacataaaatatttttcaaaagcatagaaacagagtttttgtgagcatgtagaatattatttccaatctcaattataggaagaggttgaccattaccaatcaagagttgagtactacctttgtgctcagatttgttctgcagattgtgagcataagaggtgatatggtttgtggccccactgtctatgtaccaggagttgtcttggttggcttcagcagaggaagagagaaaggcctgttgaccttgtccagattgttgctggtttgtaagattgctttggttgttctggtttgcattaggagttgtggcatgaaagtttatgtcaaaccgatgatagcactttcctgccacatgacccacacggttgcagagttggcaaactggacgatttcctctgcctcctcgacctcgaccacgaccacgagaagggtaaccacggttttgactgccattagaaggtccaccacggccacgaaagtgagctgcaaagttggcaatgggagtgagagtttcacctgcgataggggcattcatttgctctaatcacatttcttggctttgcaagagaaactggactctcttgaagtgttatagggtcagatcgagaggttagagttatgaccacagggtcatagtcatgtcctaggcctcctaggatgtagagtatcagttcttcatctgaaattagttgacctgcaacagagagattttcagccagagtagtcatttttagcatataatcatgaatagataaatttccctttttaagggattgaagttgaaaccggatttggagggtcgagcctttgactgagtggtaaacagacactcaagagtatgccagacttcaaaggaggtggtacacctgactatatggccaaacatagtctctgagattgagttgagtatccaactcataatggcctgatttgttcttctccataaagcatacccaacattgagttgtcgtggttctccagggacaggtcctccgatggtgttgtcaacgaactgagggggacaaactcttgtgccgagaataaacccttcgagatcatgagcacgaagagcgggaaggacttgagacttccagaaagagtagttgcctctgtcgagcttcaaggtgagaggagcaaggttctgaaagattgagactggagcagttgcaggagctgcttgaaccggagcgtgagtttcagcggtggtttgagcagggacgtcttgagcaccaccgatggttgatgaggaatcgtcagggctggccatggatagtaaagaatcggctctgataccaagataaaaaaggagagtattgaggagaaaatttagactatgttattgatattattgactgctcaaacggttacaatttacaattaatgcttggctatttatacacaaattgtgggatacaaaaggaataaaatcaaggaatatacagctgtaccaaatccctgatttcatcatcgtgacattcttctactgcatattcaatatttttaacacaacagaaccaaacactgcattcacacaagcatccacaaataaagtaagtagagtctcattcattggaacacacagcatggtgggggaaggaactaccaacatcctcactccgaaaaggttgtttgaccatatactgaactaaatggcattttattggttgtaatcaatcaaaaatctaattttggaagaaaaaaaaaatctacttttcttcagagtacatttttgaagaaacgtagattatttttcaataagttagaagtaaatttatattttaaatatatatttgaaaactcccgatattgtgaatttttaaagcatatatggtcatatatatttatttaacataaactttaagctaaaggtataaaattgtataaactcataaaatatcgatgaaatgaaactatacacagaccacccccacttcgtctatggaaaataagaacacaattctcgatttatataatgataaaaaaaaaaaaaaaactcaaaatcaaaggtttgtcaattgaaagagaaagtacgtctacatttctaccaaaaatctatttgttgtatcctatcattgaaagagcaaatatattgttccatacatgatacagggtgttatttctgtcattaacaaacaactatatggccatctcctccaacataaatcaagtatgcattcttttatgcttggacgaatttcttaagtttctccaaccacaacaaatattctctactgtctttgttgatcatgtactcatgcaagaagtttgttgtgctgggcttgattcctctaatctccaagtacttgtggaatgacttctgcagattctcatccaaatcactggacacacaagagattcaaatcaattagaaaacaaaattgtattgtattgaaaattaacagctagtgatgctaaacattcaaacattctctacacagacttactggaagtcaggcccttcataggcaatttcatcaccagagttttctggatgtttcacagtcaagctttcaattgcaatttcatcagggtaggcagtgcaactgaactctagtgcaggtccactcttcttggagacatttacaactagtggaatgctagattgaatagatttttcatcatcgtctccatcatcaccatcgtcattttgtccaccagtgactagatcaggcatatgaacttcaacttgaatatcttctccttgatattttctctttagggttatggtttgtagtccaggattatcttgaatttcaaaagggaaaccatttggaacctcttcaacctacaaaataagtaaccgtatttctgagcttgttagcacaaaaggcaaaggaataatttcccctacttcaaaagtttggttagctgacccaagaatgagatatacttgtaatgaactgaaattatatctgagactcaaaaaaagctaacctcacatttcttgccccaaaaaatgcatttaatcaaaaccaaacaacccatcaatgcaatagattaatgtaaagtctcacccggtcctgatcgtcagtttctgtggcgcaatggatttctgactcgattactcggagaagcgactcgtctgagctgggtttctttgactcggtggagtagtgaaaggctggaaccagaggggcgtgagagtgattttgagaaaaatgagtatggtttatggcaaccacaaccaaagactggtaattcctctgagtccggacagcccgaaaagctaatggagccaaggaagacgctgatttgcgaataagggaagtaaaagcagccatttctgtggttgtatgttaatttttcccaagtcggaaagaacagaatgaaggttttagaaaattagaaagaaagggttttagggtttaaggaaacaaagaagcgtgaatgtttatggtttagggcttcttcagagggctcagtgggccacttattgggctggaaatgaatcgtatcatcacaatggcccagtgtcgtttattaaattaaagggaattttacaaaaatactgcttttggaccaaaactttacaattatactgggacacggcaaaaacaacatttttactgccccagcccaatttcattacttttgtactgcccaagcccaacagcataacatttatactgtgtgtgtggggaaacaaccttcttcgtgtgtggggagacgccggagacgggaatcaccaagaaaaaaccattaaa

SEQ ID NO: 378351 - DNA, 1102 bp, Cannabis indica
agctcttccatgtcactggcatttatttttacattgttatagcttcttttattctcttgccggagaaatggcatcggccgcttgcgtcaacaacataggagtttcggctgagaattttctcgactgtccgccgcctacttcttatccttcttatggatggctcagtcctcgtatttctttcagtcgtgaggttcctgatgatgatcttttgggtctttccggtgctggtgttgagaagacgtcggatccgtcgttgacgttagatccggagtcatccgttggtgattttgagtttaggcttcacgatccggttgctatgctccctgctgataagcttttctctgatgggaagcttgttcctctgcaccttgcttcgattaaaccgtcgtgtgttgatgagatgacttctacggtggggattcggtcgccggagactgggaagttttgccggaggaatgatatttctactactgatccgtatttgttttctcccaaggcgccgagatgctcgagccggtggagggagctgttagggttgaagagactctgtaatacgaatcagaaggcggagagtcagaaaacagtgtcgtcttcttcgtcttcatttagctcaagtgctcccaaatcttttaagaatttcctgcaccgtagttcgagatcttcatcgtcgtcgtcttcttcgtctaactctttagagacttctttgtctctgccgttgttgaaggactcggattgcgagtccgtttctatttcgtcacggctctcgctttcttcatcgtcttcgagccacgaacatgatgatcttccaagacactcgctcgactcagacaagccaaatacgaacccgatttcgattcaccggaatccaaacaaccctccaagaatgcgaatggtaaaacctcgacctgcctcggtctcgtcggagagcctcaatcagagaccgttgatagaccatccaacagcagccacgagagtgggacggaccccattgcgtaagtcgacagggggagaatcaaagtggggtgggaagcagcaggggagtttcagtggacagcccgagaatgaactcatctggtaagattgtgtttcaaagcttggagag

SEQ ID NO: 378352 - DNA, 3678 bp, Cannabis indica
agcatgtgaatgtgctcagtgtggtggatgattgtagaatttggaacaaaacccagaaggtgccttttcttgtaaatcagccttttagttggttcacttcaaatccgctccatagtggtttggagtggtctaagattttgtggaaaaagagtgttcctttgaaagtgaaagtttttggttggttaacgacattgggcaaagttagtgttcatgatagagtgcaaaagaaaaggccttatctttccatctctcctggatggtgtgtctgctgtaaaagaagcgaagaagacgtggtgcatctattcttggagtattcttttatcaacaatttatggtttaaagtgctagaggaatttgggttggattgggtcttcccagtttctgtccaaaaaatgataacaagtaagttggttggttgtagacgtaagacaactttggcgaacgatgattttggcaacatttttagctgtttggttggaaagaaatgctagggcctttgaagactgtgaaagttcaggagtgatcctttgggataaaattaaattttggacagccacttgagtttataaatgcaaacactttgaagaactttcctttttagacctgaccagggaatggaaagcactgatgtaaaggaacactttttttaacggttctgtatatttggttttgtgttttgttcctggttaccgtttttagtgtatttcccgctgaaacatatgtacggttttgcttcgccacaagtgagggccttcaatatataacagaggacgggccagtctaagacatagacatgtgatctctttctctttcaaaaaaagtatggtaagtgaccaaagaaaataattttttcgattacgcacacatcagtacatcatacatgaatgtccatgatttttttttttgtacaactgagtatgtacttagataggttcatgattactaagttacctgtggcataataactgaatttataagccttaagtgctagtacaaaagtattcattaagttgatcacaccacatgtatagatattttctatacctagaggttgttagaggtcataaagatttataaggcaaagagtaaatgaaaacaatgttagattaaatccacgatgattttcacaatcttcgcaggattaaaggtcacttggatcgaccgactaaacaaaagaagaaatagttggatgggaaccaagtcccaagcaaataaaggagacaacaattagctctttatgtcgagcatgacatcgattgtcgcctcgttctctccaggaactacgtgaagcacctccccacttgaagggggtctcttggccgagcacctcgctacatggagtacactcaacgataataggacaatcatgatcatagtccttaacctcagacacctcatccagtcaagatctgcaaccagctccctgtggttgcgttcctaacactccctctcaagaatgactttaaagtgctcgggaaagaactcccaattgatatgtgggttatcacacacagatagtacacaacattgaagcacttttgcaggtactcgaccttgtcgaccacaatctgactctgaagagtagcaaggtcactgaagagtagcaaggtcagtcaggagagcgttgcccgtcttatctttgttggcaatggaggaattcttcacctcaatgactctcttaaaagtactcttctcaacaatggaggcattcttcacctcaatgactctcaaaagtactcttcgtatcaccacactccctctaggctagggccaactcggtctttagagtatcctcatgctctaaggatttttgaagggaatcatcaacagtggagagaacgtgcttgcatttagcgatagacttctccaacgcaccgacacttctccattgcactgacttttcctttcttctccactgtgtaggagaagctcatgtaagcctacgtgaccaaacaagagttagataactcataaaccaaaaggaagaaagtaaaaacaaagtgaagaaagtaaaaacaaagtgagtattcacttaccccacgatctatccaaggccctttttcaacacctcctctgctagcttagtcttcagcattgtaatcaactgacaattgtctgccttcgagacgacaatcatctataggaagaaactaaggtgttgcccaacaccttcaagtgagcaatcgcctccagaatctttgaggtctagagctgccacccgacttctttggaacaacgaaagttgggatcatttgaggaaggtgaagctcgcagtcaatcacatttgctttccccctagccgcatccctagctggggacctcttacgctgggatgcctcggcaacatcattcctagcatttcccttgggcttcttcataggaggtgactgatccttaggggctgccttctcacgttctacccttcgaggggatgttggataaaataatgccgttacacaaaaggtggatgagttttttccatcctagaaagttccctgtatatagatcctaagggcttgcttgactacaaactgtaattgttttatttttttaactacattagcaaaaaaaaaaaaaaaagaaattaggaacatggaatatactagaaataaattagaatggaatgggaagggaaaagaaggcgtacagcaaactagcccaacccaaagacactgatgaaaacgtttaaaccttgcatttgtcttgtgtttttgtttcttctaataattatacgtgaattgcttgagctgcttctgatgtaggtttcttcagctacaaacaagacattggatgcattaaatcatgcccaagattcactcaagtctagaaacataagtatctcatcggcagctgcttcaaaccccggcatacctccatcttccttgatgtcttttctgaataaggtttctgttacagtgaactttaaaattattttttggtgttttctcattgcttagttatttttttcttcctctttataccagtgcatagaacaatgacataccattattgtgtataaataacctttatctgtgcaaacgtcttcttacaatatagttgatagtgttgctacatatacctatcattagggtatcctgatacactaatgataggtatatttgatatgaaagaaagaattacaaagatccaggttttcgagacacttggagatctcccagaaagagtccgactctttcaaaattcaacaataatcagatcccttactaagagataaaaacctcccgctcactcaactaaaacttgcataaaccacttggaaaatgaaaactccttacatcaaagaaaatattgatatctaagaaagaattacaaagatccaagttttcaagacacttggagatctcccaaaaagagttttgactctttcaaaattcatcaataatcaaatcccttactaagagataagtacctcccgctcactcaacttaaacaattacataaaccacttagaaaaggacaattccgcacattaatcatgacttatttttattctcggtactaatatttgagtcctaacattacccacaacccaaactgttgtgaaaattctattgctttataattgcgcaagtgtacacaatcacaaacaagtaatacaatgataagtaaacaaagttcgtctccacagggactttttactaaataatgttaaatcaa

SEQ ID NO: 378353 - DNA, 2525 bp, Cannabis indica
aaaaaaaaaaacattacacaaattttcagactttaatgtataaacaataacaacaacacattaagtactttaacatgataccatcaacaagtaatgatgcaatcagaacaaatgcatacaatatctgaataccagccatttataaactcacaagacctccaggtaaacttcacatgatccacaaaaatacttcattggatgattacacacaatcgaaaataaaatgaatcaaagtacttctaattagtgtatgaaaccccaaaatcaagactggaaagttatactcttgaaagtcttcataaactaaacttcatgatgaaaataatgtgctaaaatagtaaccaacaaaagcatagttcactcaatgttaattacccaataattatattgcaaaggcgtctaagtaaaaatagttattcttggacacttcaaaaggcatctaaattaaaatagatatttttggacactaaaaaaggctaccatgtgtaagagaagaatacctggtgcgtgaatctgcgatctgggctcccaaatattcgtgctaaaccaaaatctgccagtttaagctgtccattaggtcctattaataggttgttgggcttcatatccctgaaaggaacacatacagacatttcagaaattatagcaagcatgtgattgagatctcaaatgagcttctgaagacaattctagtacctgtgcaagacccatttcttatgacaaacagccagcccttttaatgtcatttgaaggtaagattttatgtcaccgggtgaaagaaatatgtttcggtctcgaataacagcttcaagatctgtctccataaattcaaacacaagatgcaagtttcctttatgggggaatgcgtcaattaattcaattatgttaggatctttgagctcttttagcagtttaatttctctaagtgctgtaacatttacaccttccttttgctttcccaaacgaattttcttaattgccactgtctgtcctgtctgcaaagtaaccaaaccaagatttaatttgtaaacactaccaagctatgcaacaacaatcaccaaaagctatataagagttgcaagatgacattattagagttatatttattctgccatttagttacctaggaacgtaagaacttcactaaaagcacctctacaaaagccccccaaaacccaaaagaacaagatctttcacaccagacacgacccagatattgcaaccccaaacttaaacaaaatccaataagcaatacctcgaatcctcaaattatttggcaaatagatttaaaaaataataataagaaggccaatatagagatgttgttaagattaccttggtatcgatggctttgtagacgacaccataagtaccctcaccaagaatctcacgcttcaaatatctatcggccactttctttgttagatcaggttctgccatttttttttattattattattctatggaatttgtatacgtatgggctaaaagaattactataaactgttccacttttcagaaaagaggaaaagaaaaaatcaattgtttctataggctgtgtacaggataatttttcagacaaataattttgccgagaaaaattgcacttgtaaaagctatcacccgcgtatgaccattatgcaatcttccactggtttccacaagaacaaaaacctgcaacagaaacgataactatgaatccaaacaaagaaaaagcactttttatccatgtaaggaaaacaaaccaaaaaaaaaagacatgtacgaaaaccacacaagctcacacacccaatcgcccaaaacagattctacagcttcacccgattaaactacgaatgaaattactcatcatacaaattaaatattccacaaatatgaagcaaattaccaaagaaattcggggaagacgctgtagaaccctagagtgtgaaagctatgaaaagggagctgaagagcgcggacagagagagagatagcaatgtgctatgaaattgggattgggatcgagattgagcttggaagagcggatttagccctagaaaaatgaaatgaaaaagatgtaagaagggaaagaaaggttcatagccgtagtgtttagtcggaacggtaaagaaagaccagaaccacttcactcaaaaatctataataatataactagttttattataaaaccaaggtggagctggaaatataatatataatattatttcattgaccaattaaaattttgcttctttttaaaataactaaaatatccctatgacaattgtaacggtatctctgtaaagaattaaacttcgattacagcaattaaaattataggaaatttggcttataaaattgctttgtgtaatttggctcaagctttactgataaattggactcgggcttaagattcaacatttaatcttacagctacattccttacttgatgtcgatggtgctgaaacttaggccaaactagctgaaaacacattgaagattaatgtagatgttgtcattttttcaggaactgcaacttatag

SEQ ID NO: 378354 - DNA, 4334 bp, Cannabis indica
gcaagaattcatgcatacatcttcaagtgattcgcatacaagtaagaagtggcattaataacagtacataaatttatctaaagttacaatcctaaaatatggtgcaaaatgagcaagataggcaacattatcctcaatgtgttttgaaaggatttctttgccgccatgccaatcaatgaaaaccacgtcacgatttaccgatctgttaaatcttcaaaaacagaataaaattgaaacaataagttccaatgatcaaataaatccctaccctaacagagagggaaacctttttaaacacataactttgccaccctcagtgtgcaaaaacaaagggaaaagagaatgtgaagagtgttactcattaccttgcataaacggaacgatcttatgctgattctcaccagaatatgaaacgcccagcaatgtttaaatcccaattccatgcaaaaatatatatataaaaaaaacccttcaagacaaacattctcctctctcttttgtcatgaaaatagcaaatgagtaggcttgttacaaagtgtaataaagattttcaaatgaattcatcaatgaaactgcctgtttaaaacaaaggaataagaaatactgatgaagtatttcatgaagccacaaaattaataacaagcgttctgcttcttaaggtacaattttacagaaaaacgagatttacatatgttgagttgtataatacagctaaaactaagtttcatgcagcaaagcagtgatcagaaatctaatcctaattcaaaattaaatggagcacatcacagaataaacaacaaaaatgtctcatgtcctatattagaaagcaagttttaaaaaatcaaccaaaatgaaaaagttggagtataaatgtggaagagggaagatggatgtatgagttctcacttttcagtctggtaaactcattctcaactatatcccaaaaatattacaaataaaattccctgtaaaagcatatattagtcatacactgttctaagtaaaacttttttcgctaatttcatcatagaaggcattattagtcaaaaaaaatggtgatttttttttaaatgaaattcctagatggcacaaccgtttgtactttgtatgtcatatgttacctgttaaatttattcatatgtgattttacttgttctctaataatatcatgaggtactagagcaagacatgctttttcacctaatttataagtttctaccctaaatataattaatttacaatattaacatcaataaacatatgtaaaccatagttcaaaaactggtaaacataaataaatgaagaaaagaaaaacaagaaatggaaaaggtgagacaattttcttaccaaatgttaatcttccaccagcgttgggtgagtcatccaaagaataatgggggaacatatgagcatttaaaaagaagagaacacctccctgcattatttgagacaagaattttatttccacaggttgtatgctttatatatgcaaacataagaaacaatttttatatatccttatatatacatacatacaaatttatctgattcaaaaaggaatgaaacaaataaggttataaaattcacaacttctacactaaaatgactaggaaggctgttaactgaagctgcaggagtatggaaaacttgaattagcttagaagcaacccaccagagcataaatgttgatcatcagttcataaagtgatctaatgttgatctgaatttggtttaatcgaattcagaaaagcattccacaatcctcttgaagttgccacaaggcagtagtaaacgcgatagggtgactcgaataaagcctgcttaagtatcaagatttgaaagaagaattttataaatggatggtgatcaaactacaaagataacacacagaagatagtcaagagtctgatgcgttcaggagtatgctcaggtgtcatttgtgctgatacattgtgtatacttttgctgcttcagctcgtttaaattatctttcaccagtagtctgcacaagaacaacatccgttttgaaagtgatggaaacgattggcatctctaacaattattatcctgtttgtgagttttgaaatgagtttcacagcagagtggcaatcatcacacattcggaggttcttaatgatacggagaggcgcttcagaaggtgttttcattaggccatatgctatcgccagcttctcactgtgatagctaagatactcttctttctgctcatcctctacatcatgcaacactgcagcaacatccggtacataccccagttgtttgattttgttcaacaactcccctaccttttcataaatctgtctagattctgggtgcaatttatcctctgaaacaaagacatgagtagtattttttatctccacccaactcactccaggttctttcttaatgtttcttcccctcatgagttttcgaatcctcacaactccatcccacctgcttgctttggcatacatatttgataacagtagataagttcctacatcatcaggatccatctttacaacaatctctgcaactcgcttgcctaagccataatttctatgcacataacaagcattcagtaaagtgcgccaggcaactacatcccatttagttgatacagatctcatataattctcagcttcatcaagcattccagccctgctcaaaagcccaacaatgcaggtatagtgctcaactccaggttcaatgccaagttgtttcatcagttggttcaaataatagaacccttgttgaaccagacccaaatgagcacaagcagaaagtacagcaacaaacgttacgtagttaggatagtctccagcagtcatcatatctcgaaacacatttagagcttccttaccaagcccatgatgggaatacccagatatcatagcattccaggtaacagagtttctaaaagtcatgtctaagaatacttcattcgctgcttctatgtggccactcttggcatacatattgatcagtgcatttccaaaaatgatatgatctttaaaacctgacttctcagcacaggcatgtaacagagctccatgtctcagtgctgacaaagatgcacttgagttcaacaacacagcaaatgtgtactcatttggtgcaatattttttgttttcatgtttacaaaatggttcaaagcttcctcaaagtacccattttgaaaataagcagccatgattgttgtccaggagacaacattacgagttaacaagcgttgaaaaatattcactgcatttatgagcttgccacatttcccatacatatccatgatcgcacagttaacaaaggcatcatgctcaatgtcagccttcaacatttggcaatgaacttctagacctaatctcaaagttccaagactagaacaaaggccaaaaacagtaacataagtagcactgtcccatttcagacactcacccaccatcctacttaaaacttgtattgcttcctttagatgaccaagttctagtagcccatgtaataatgaattataagaaaaaatatcattagttggtactgtattgaaaacgcttatagccccttccatatccgaaagccttgagtacatgtgaacaagggaattcttcacatactgatgaaaaatcaacccagactttaaaacataaccatgacactgcttgccttcgtggacattcccaccattagaacaggaagaaagaacagtggtcattacaaactcattaggccgacatatatgatccagagaaaacatacttttgaacaagccaagaacttcgaagtcacgtccattatgcaagtaaccagccattaatgcactccaagaaaccacatttctcacacgcatacaatcgaacagctggcgagcaatctgaatttgaccacatttagcgtagaaattgatcagaaaattcgtgtgaactacaccactaccgttatctaatgcgttgttcggaacaacgacgaaatgggcatggattatttttccgagcttaaagtttttagtatcagtagcaaatttcaggagcctcaccggatcagcaaaggaggttatgtgttctgtagctttgaacagaaaaacaggagagttccttggtgtagctttaagaacggccattgtcgctgcagtagtagttgttcatggcgagtgtgtagatagtcttctattctcattagatggtagatttattattattattattattattattattattggtatgataaatacactatattcttgaaaaaaaatataaactgaaataaattttaaaaattacttttattattttttaattttttcctcacattatttcatgttaatttcaatacttat

SEQ ID NO: 378355 - DNA, 4403 bp, Cannabis indica
tattttttgaacaatgggtttgaaatatggcatgtatggtatgaatattaatatagtttagttatgttattactttgttttctctctcgaattcattttcccgttctatttatgcacattgttaatggtcaatgcttcactttgcaacaaaagctcccaatatttggtcggttgctagaatagaatattgtcacaattccttgaaaatattagagaataaacacaaaacattgtgtatatcgattcggataatattatgatcaaaaaaggttgaagctaagtcacacacattaatagctttgtaggatttccccagctcaatatttctaaacaccatacaaacccagtagagtaattgtaattggaaaattgtattgagataagggattcaaaactttcaatcgacccttgacaatgacaagaagcaaggaaaacataactaagatgacaccctttgcatttagaaatagatccttaacaaagatttgtaaaagcactggcaccatattttgctgaatgtaaaaatggcaaagatctttccggaaacttagtccatacacaagggcaaccagttctaaaacgcgtgctttcgcctgcagaaaacccccctttgaaaacataacttgtaagtgaaaacaattgcccaaattcaaacttgcctgctataatttgccaacacctacatctaactcctttgcctaccaaggaggtagatagttcagcctctcataaaatctgcctactttacaaactacattgtaagttcagccatgccagaaatctgttagttttcacaaaagtctggagttcgaatcccttatagttttctagtccctaaatagttaggcagagagcatagtatcgagactcgaaattagagcatgttttatcttgaaaaatgcagaatgataacacaaacatagccatgttatgttattatgcagttactgttttcacaacacttttttgaatcctagacttaaacgagtatagatgaaaacaggaaaagaactaatgagggcaacaaattgaagcgagcaagaaacttgttattaagataaatacgcaggcagtatgaaattaacagatattataattcgcatctgtctaacacaatctctagaataaggtcacttaaatatcaaacacacgaatattgacgaatcctaactatgcgtttgtaatcacgagaccgcaactgtcgttttcgcctctcactatcccaacaattccaaacccagcaattcctacattacatagaagagtcgttttgtgatttagcgtgtgtcggtgatatagatattcgttgtgtcgtcacgggttgaacggctataaataataatcataaagcggtctagcagatcaaaaagaatttgttaaatcacctgcaaaatcgcataagttcaagttcaacgcttccctcgatgcccgccacctgaccttgcaccaggatagcgagcaaattgcaaccttaaattgaccgaatcacggtcatgctcatcaaatttataacctgcaaaatcgagctcgaccaatttacgctgtaactacaactagccattgttttgaacggtgaatcaggcagatcaagacgtgtatacggttaaatagtcgatatattgaatataaattttactagtaacttaaaaaatgaatatgtagaatcatcactcattagcaaagacagcaggaacaagctttcgattccaaagtcccatcttaacacatgcaaagcttaccaggattcatcatgacccaatacacacagtgaaactgtggcctagcctgtgaaagtaataactttcagaaagaaaggaaaaggattgagcttgccatagatgatggccgaaatattttcagcaacatagtattgttgtccctatcatacgagcttatcgtgcttgccaatttaactaagctactataaaattcatcgagcgctcacgccaccattaaagttagcttgtgcctcacttattaccggataaaggtggatcgaaaatcacaatcatgtcattaatgcaatgaccctgttttataaatattctttactcatttcaacatatctgcatcaactgcctagaagaaatatctgattcaatagctgttttcagtatatgaaaagtcttcattattgcaaagtcaagtgccacatactctataaagcaggttactatagctaacaacttacacattttgacattacacagatcacaaagatctgcagaggaattaataagctcaccttgtagggcatccatagcagtagctgcatgggctggactcacaaaatcaacaaaacaaagaactagcggttctcctccgggctgcataattcaaataacagtaaaaatggaacagagaatattaacatccaaatatacacacaatttaatataaaaacactaaactaactctgcactaaaaggcacagaaggtaaactcacatgtcttgattccttgcttacaagtctcacctctttgtagcctacaaaaggacgaaatatatctttgaacacacaagtcaaggaactaaaattgcaaagatttttcatttttttaaaattggaagccaaaggactgccatgaaatgtcagataaaaaataattatccactactaaaggatacgagctacttcccgccttgtgcagttggctggtaaaccctctacaaatagtgtactagaagcatcaggaggaaggggaacttcaggtcttccacctccatatccaagagtcctatcttttatagttgccccggggtcaacgcccccaatgcccataagacgtggatcatcaactgcacggttaggtattccaccactgatcggtctaggaggctgtcccccggcataagaaggctgctgaaaaattaaattttttaacccttaaacaatttgtacataaaatatgaacagaatgagtatctatagtctcataaaaacattcatattatattaccgtgctgcgcaaatatcgatcataggaagcattaatagattcggtatctcgaacacgaattgttcctctatcatcttcacggggaaaatagttagggagatcatgattgctcagtccatctgcaaaagtacaagaataataaattagcagaacaaacaatagtagtacgcagataatcacattagctataaatagtgaaatgaaatcgaaaacagcagtagtataaaacctaactcaaaatttagacatttactgggactttaaccccacatcagtcacccatctatatggttttgtatatctgatatttcatgtattcgaaattcgaaattaagactacccgaaatcaaaattcaggtggaaataaagataaaaaatatttgacaaaatcatatcccatcaacatatagtaacatattacaacatttaatttggttccccaataattttactgcttttttctctcggtaaccaaacaaaaaatcaaatcttgaaaccctaaaaacataaaagaaataaaattgtaaaatggagaagtaccgtagtcgggacgagagcgcttggcggggatggcggaaggcggctggcgcggatcagtgtacctccaataagagtcggccatacgctaaaggttgaatctttaaggtactaataatgtgaaaatggcagggaaagagggaaatgagaaagaagaaaagggattcctgtttgagtgtttaagacgatgaagaaaggaaaataagacacaactaaaatgcctaaatcaaaataagaattataagtagtgctcaaatatgagaatgagatgaaatttacaacaccacccctaacatataggatcacattttcactcatattttaatgtaggttaattaggatttttgtatttataaatttagattattagatttaataatttttattggatttcatttaattttactaattcgatgattatctatgtactaaatcatgttcttcggactttcgtatttgccaaatcatatcacttattatttgacatatgtcaaataatgccctttgaatttttatctatattatactatttttactaaaattagacaaaaatttttaaatttaacaattcaaatagttcaaaggaaatttttaacagttttcaaaattcaggaggtaaaatttgggtatatgtcaaagtttggaagcaaaagtcctaaatgtatatgtaaagttccatatcaagcacttgagttgacatacagttatgggtgtattttaatgctgaattttacacattttagtttaataaatagagcaatttgcggtgaaactcctttatattttaatttttatacactcaaccccttatttatttttttggtagcaaaactcccttatgttttaacttttatacacttaactcccttatttttttttgtggcaaaaccccattatgttttaat

SEQ ID NO: 378356 - DNA, 1952 bp, Cannabis indica
gaggcaattgtgttttagttcttaacattgattccacgaattattgttgtttattagattaaatcaaagggaattggatagttgggtggaaaaaaatgaaagcaatttataaaggaaaggaggtggaagatcatgaattttttgggaatggaacagttttttgagatttagtttttcagtgtttgatttatataatcagattttgtgtctttatgcatttaaaagaaagttttgatgtgacttaatgtatcacttgtaaacacattaggttaggagctgtaataggttttaaagtagttttgtgaagggtttttgaaaatattcacttgtgtacatactccacttctcctataaagacaataccagagctttatttcccaaattaagaatgaaacaccatgtcaatgtctagcatccccatcaaatccttgtagttattaatgcataatcagaatagatcatgggaaagagatttgttaatcataaaagtcattcttgtgtttttgtatattttctctcctaattttataagttctattggctttttccactaaccctaatctgtttttcatattctatctaagcagacacctatatttttgcacttagatatcttcaaaagattcggcgatgggcaagccaagttcacggtactactattatgacattaaatttctttagcttatgataaataaaattgtgggctttcaaggtacttatttatatggaatgtaggtcggagtccactaaggctgatcgcaagtttgaaaagaagcttgagttttattccagtaagtttggttctatgtagttttatgcaaaccctcttttcaagtcttcttccacattatggattagttttgatgctccagatttcagtgttgagtttgaactgtgttgtcggatgtagtacacaaatattaattatagtttgcttgtgttggattcattgaaccttacttagcagtctcttcctaaattcttaatgcagaggttagggatactgtcgccaccttgagtgcccagaagactattgccaaggtcagaattttgttctaaaggagtcatttgaataccctaattttgttttatacatatacgtatatatatttaatgagaatttctaaaaggtactactgtttagcaccctcatcggtgtcataccactattggtgtatcgggtctcatataacttaagaaaattactttcaaagaatatcgttaattaattccggggcgccacctatagaaggtgttgggcaccattggtgccgaatagtttaagtctatgaccccattttgtttggataacttcagaacttatgttacttttgggattttggaagctatttatgagaaatgtagttgatattttgtcttcttcaggaaatgtaaatagcgtgttgttttttaaatggatctttattggagttgcgacattgtgtttgctgtttgtgctcatttgttctttcaggcattttatattttttcttccttccatcgtatgattgtgttttataacaatacctaggagccatcatccttatttgagaatattagttagtatttagtaccttcactatacagtatattgagatatgttacatgttcttaccagaaaaagaaacttcgaagccgtcagaagaagctgaaaccatatgacctctccgctcttacagagttccttcctgaattgaagaattctcagaaacaaactccagctgagtttaagctaaactgtaaatctaggcaaaagctaatgtcagtatttaaatttgaaggatttgctttccctttcatatagtttttcaaagctttttcatgcttacttgtttgtttcatttcatgttggctctcagctaaaagaagcaaagcaaatgagtacggttcttaaccatcctgcgttccagttggatcccgttggctgctctcgctcaacacttggagagcac

SEQ ID NO: 378357 - DNA, 5272 bp, Cannabis indica
atatatatgtaacattattatgactcgtgatcatgaacattttctttcgctaataacaatattaaggtggtctttagtaatatatacttttgtttttaaatcttttaatcacaaaagtcacagtaaaatttttatttttgaaatttaatttttaaaaaataaaaatatgttctatagctatttttgtttttcaattttaaaaacgaaaaataaaaatgtattctgtaatttttttttttttttgattttatttaattcgggtctgaggccagatctgaggttgggaccgagagcgggtccaagcctgagagcgaacctgggttcgattttcaaagtttaagagttgggatcggaattcaaaatattgattaaaaaagctatttaaaaaattttgaaagtaatttttttttattttacatttttagattattaattaaaaaattaatacagttttatatagaacataattttggataatatttttacatttttaattttaaaaatacaaaattaattaaaaaagtgctaaatgttttaataaatttaaatatacaaaattgcagctgttcagttgtaaggaaccaagtgcagaaattggacatgaaacaacagtgaaaatattgaagaagctacgaagctattcatgggaggcaaagttaacactgacattagccgcttttgctaaggaatttggggagttattaatgcacattggcgaggttcatccacaagatcacctcaccacatcactggccattctcaaaggctctcttattcttcccaccactaccactactcggaaaaatgcactcattcaacttaatgatctcattaaattgacactgcaactcatcgaaataatctttcggtcacacctgctactaaaaccaatacatgtctattggattatcattactgttgttgcttgtgccaataaagtaaatattctcacagctgatgagtaagttctatatatctctattaatttctccttatatatacacaaaattaatttccaatatatttagtcgattataactatctaatttatacacgtacatgtataatatagctattagctagtcaaacatgaatttataaatagtgggaactagttaagtaagtacttattaaatatataatgttattcttattttatttgagtattgttattgggtagctataggtgtcaccttatgattggttagcgatatttcctaaaatttaaattcttaaattatatagacctgctatttaattacacaaataacagtataacactaaagaggatgctaagcacctggggcctttagcaattctatattttatttatatattatattgtttgtatttattgatttcagagagaaggcacacgatttgtacccctactacataataattcgcaaatacaaatctgaacttgaactcacagctgaccgatcgcccaagccaatcggagtgataggtttgctttcttatattttgatattaatatgtacggttagattttagacataaatcttgggttatctctaaaaaaattaaatgtcagctaatcaaacagtacgtgggacttttactattatattactaatatttaattaatataatgtcctacatttttagtttgctttgatcaaattatttggttggttggatttcgaaaaaaaaaaaaacacttaatatatattttgtattttttgaacaatatgaacgaacaactcttaatatatatttaaacctaacaatttgagttctattgttcttacaaacaagtatgtgtgcatatgtttgtatatcgataattataaaataatgaatgtcagcaagcattttattaaatataattatttatattattatattaaaaaataaatttaaacatatgaaaagattacaaaatatgtactgtgacatatgttggaaataaatattatattacttttaatatgtgtttgatatatatatatttcagatgtagagagagattactatgagctgttgaaagtattatgtcaaaataataaggagagcatcgagtttcttagtcgtctgttttcaactagagattcaagccgtggtgtgcagctcattgattgcttttcctatttccgtacggtataatttattctcaactgctttccttctatataaatctttaaatgtagctaacttattttaaatttcatcaattctcattaaaaaaactactttttagtaataagatctcttaattataataattatataaaagttgtcactaagaaattactttaattaaaaaaacaattaatctataatgtatgggtccatgatcacaactttccatggctaattgatgaaacaggttcagattgatgtgctgaggaagaagacagtgttgcttgttttttcacgggtagtaggacgatacgacatcactaccaatgatattaacatactcaaacgcattcaatatgagaaaataaagagagggacgtttgaagagcagtatgcgattgtttgggtgcccattgtggatgagactcatgatcaattaactcagtacagaaaagagatagagtttcagaggctacttgcgtcgaaggacattcaatggtacactgtgaatagtttggctttacacaaaggaagccttaagttcctcaaggaggagtggaaattcgagaccagtcccatttgcgttgtgatggaccttgccctagggagagtccaaaacatcaacgccttctactccatgcgcctttggggattggatgcttttccttttgacaaagaatctgagcacagagttgtacatgaaatgacttggatcaacactgttttttcaagggaattcattgctcggtctcagtcttttagcatctgggtaagtacgtaatataatagctgttagacttaattagttgattctcgatacttacttaacagagcatttgctataacaaccaagaaccaataattgattagtgattttttatatcatctattaaatttaaatatttaggacccaatatatattaaaatagaccaataataatacgccacgtcttatagtgcttagcaccttaaggtaccacttagtatttttctacttaatataatagtacaaaaacaaacagctattaaatggtaactaaaattaaatattaaaaacactaatacaggcttttatagctctgtacgtgcatataaagttttcactttcactcacacgctatggattaaatgacccggtttagcttagcttttgtaaatttttttttttatttgtaagattaaaataattctttgaagagtctttggaaaaaaaaaatatcatttttaattaaagtcctatttttggataagttatatgattttcaaaaaaaaaattttttttgaaaagttatttctaaaattaaattaatttatacaatttttaatatattctcaaaagattatttttttaataacatctaaacacttaaaaataatttttcattaaaaagttatccatatatataaaaaataagttagattaaatgaataatttataatgtttacttctcactttctgcctagctaacattttaggtacgactcgttatatgattgatgcaatttagtatttgtatataatatattttaatttaaattaaaaatatgcatgtgaaatttgctattagtgttttaattcatgttaataactaatttacactgccatattattatagcgcattggtctttctcgaactaagaccccctcttctaaatatatatcacaaattgatcaaaatatatcttatttcaaactttttattttaattttgaaactacaattaaaaatatttgatatatatgttaatgaatctaattaataatatacaggtggagcgcaatgattacatcattatccatggtggtacggacatggcatggagcagagagattcaagacaaaatgagatacatgagaatggaaacaaatattaagattgaactttttaacattaatgaagagagttatgtggagcagttttggagtggagcaaaaaccctagtagaaaagtattataaggtggaatatgctaaacaacaagtccaaagactcaattctttgaagcaagcaaaagggtggtttatgcttaacaaagggtctactacgttggtggtaggatcacgagaaaccctcgtcaaggcagtggaggagctcaacatatggaaggagagtattactgaaaagacctttgaagttgctttcaaagaataccatgagaagatctttattatggttcctcggccgtcagacgacccatgcctcaccattgtgaatccactcaaggaggatggaaagactatgctgaaagagatgaagtgcacaaaatgtggccgagacatggagatgactagtgtcacttttaggtgttgccatgttaataatattccgaaacctaccatttcatcatcgccatacgattactaagtggatttggaaagtggctcgtacttacttaaaatataatatatgttatgtcgatcagtatacaataaaataaaataaaggtcatggtgttgttttaccaatggagagtagatgatctgatgctctactttttatttgtttgtttggatgcatgtttaaatatgagtgtactaataaaacttacatcaaaaaaagattttattaaatatatttaatatgcaatattagttgccaatacaacgtttttagccataattcataaaaattttgaagccttttcactatttgaaagtatactttggaaataaaaaataactaggacgtctgtgtgatagttcaaccattggactgtcgatgggggtgtttatcataaataaaattaaatataccctcatatgcatctcttcatcctcaacaataatgttgtggaatattatggacacgaaatatctttgacatctctatgccaaaaatacctgtttctcatacaatgtcaaaataagattgaagtactatacttcaaatgctatactttaacatttttgtgcaccacttcttggtatgttagagattttattacaatagaagataaatcaagaactatacaactcaattgtaaaaataatacaataacaataaaagagattgattaaatatatgttataatacacatatatacactatatatatcgcagatatatatatatatatgaaaggtagaagaagaagattcaatacatgtaatataatatatgtatatatatatataaacaagagaataatatatatgtatacactcactcac

SEQ ID NO: 378358 - DNA, 6045 bp, Cannabis indica
tatttgataaccaatagttaaggtgagctgtgtcctatagtgattgtgcattttaggcttgaacttcagatgaggcctctgggagcgcagagttggtagagacaggacctcaaaggccagaagagcagagtcatccacgttctcacctgtgggaacaatagttccaggatcaaatacttttatcctttgagctgcttccttagctttatccgcctcctctagtgccaatatcttaggcagcagatattccttatgttcagcatcgaagagatctattacagcttagtcatgctgcctcatggtgtacacataatagacgaatgcctgttctagagccttggtatgctgggcttattattctttcttttctgagatggcctcttaaagatgtccctttaactttgagttttcagcgtttacctcggtgacttttttctgggattcctcacaagccttcatagatgcaaccaatttattctcatcctcctcagccctctgaatagcttttgcctcagcttcctctgccttttattggagctcaagatggtgtttcacctttctctctatagtagtcttgctgataaatttatcttggataatcttagtctgtctatcatactctagagatagggtggtaatctttttgttcttttcttggacatcaagcttggcctatttcaggtcagcttccaactccattattttggtaagagccgtggaatgtaagtccttgtacctgtctccacaatccctctccatctggttgccttcctttcacgggctgaagccttgtccataaaatcaaacaccctttgcttcacagtagcctccatcttagcattagccttagctaaagcattggttgcttcctctcttcttagctcaacattgtcatgttgtaccctcatcacctccaggtcataggtagttaaatgaccatatagtagtttctctctgcgatcaagccaacttgcaaaggagaaaatacaaatgaatcaaacaacggaaaaatacgaagtgtttattcaagtcaatagaaaattaaactacaacattagcttaggtcttcatagcgttagctataaagattggatcccttcttgccatcatgttaaacttatcaggactgagtctaaaacttctagtagcactcaattctaataggtcaacaaaaaatggcaacaaatcagttccaatgcgaggacagagcctctccatcatcttaaccatgttcacaagaggaaggaatgtttcattccatttgtcgtagtcttcaaactcaacattacatttggaggaaaagttgctggtcaacttcttcatctcctcatacttactgtcgtgcctcttttggtagaattgctctacggcttctaggtgagcattatttccttccatcagtgacaagggcttgataggaagagtgaaaggtgctagaggtaatggaggcaattcaatcctttccctgaacaacccagtagaagtggcaggaataattttaggcgatgggggtggtggaggaggatcctggttgtccttgaatgtgttagtgcctcacttaggtggcctttcgccataatatgtgtcaggcccccttctaggaccgagtctttcaggcctgcctccttgaggctgccaactacaagaccttcttgttagcctccaccctcaccttcttgctggcgctactatcagatgaaccaacctacttcttgttgattaggactggcccatcgtaatttgagctatcccctcctgagttctccataggaacctacctcaaaggttccacgaataagaaaagtttggttaagtcaatgatggaagtggaagtggcttccatgcctagagccataggagtagcctccagatttgaggtcaaaggtgttgcttcttagatcttctcccagaagcctggctctttctccctttatctccatcaccttgggcgagttcccaaacctcgtcagaacaggattcgatgttacccaggaacctatttagtagccccatttgtagagtggctggttaatctgcataaaacaaacaaaatattcatcaaacaagaccataagaaaagatatgatctttacaacacatcatcatgcaagacattaagaagatttaaacattaattatagtataatttacttttctcctagcaaaaagagcgatgtcttctcaacctaagttagtctcatattggaagaagcctaggaaagaaattttactaaatgcatccactctaacatgatggtgcacgggtggaatgaagtggttaggacttctgatgatgcaatctactttatctatatacctactacatgaatatttatgaccgtctaaattcaagaaatatggatcgaatccacattgactggcgttcttgaaatcagttatagtgagaaccctaattatatggaagggtgtctcaccactaccggaggtgctcgttctcagagcaccctcattatgcattacctccttgaattggatagtgagttcttcaccatcatttaggcttttcaggaattatctcctccaatctgccagccattgctcatcggccttcattgccttcatttccttcagagcctcttcagcagtaataactgtgatggcctccttaaccttatccaggtccccttgtagagcactctgaactgtatccttcatagaaaggtgggccacatcttggtgtggggcgataagacctacttcctagaggttctccgtggtcacaagcttttccacttgaaactccttggacgagaaggatttgtagaaagatatcctctcttccagctttggagtcaaaggcgactgcggaaggcattctagcaaatgcaaaaaacaagaaattagtacatatcaaacaggaggagaaatagaatcctaaagtctaaataagggaatgatacttacttacaatattaaaatctaaactaagggtaggaaccctcttcagtgggaagctagaggtgaaaaagtagtagtccctaaagtcgtgcatatacttcgtcaaactggtgggccaaggaatactcctagtgtatcgctccaacctgtggaagcccaccttctccttgtggcccctcatgggttgggacttgatcttgtataagtcaagatctcctctaacatcggcacagattttctgtgcttaacacaaaagacgtaccaccctgatagtaagctatacgcctgaggaattagttggaaaggtgatatcccaactacggtgcagaaatttgcaatataacacctcaagggcaggtgtgccctcattttaatatgagcctagctttagacaccaagcctcattctgcacacttgctgggcctctcactgagtacggagagcctattctagaacagtcctagaacacttacaaccactcatagggtctcatacttcctcaaattattgtaattcccgaatatgttgacatgtttgtccaactcccatggactgtccttcatgatcaactttggagcagctccttgctccattacttctttctctgagtcagcctcttcttgacgagttttcttaggtataatttctgtacaaaagaagaaaattcaagcagttagccaccctaactacctagcatagaaaaggagtagggggtcctcccccataaactgcttggagaggtcccaaatagactaactacccataaacgagaacttcaaggagttatttgttctagataggaagtttggaatgatacagaaagagagatgagagaaattaacaacaaactcaaaaccagaagaattttgggcaaaaataaaattccccaaaacttttgctgtaaattgaccaactccaaaaaattttaaacgaaaaatttgaaaaataatgtggtttgtgatgcttaactttacctaagatgacaatcgcacaaaccaaaaaaccctaaatctcattctagaacagagcatgcatatacaatttaaagcaatgaattcaaaaaatacattccatggacaaagaaacaatgtacttgatattagtaatggagatattaagctaatcgtcactggatcaggctgggggagttgatcgcacattttgccaaaaaaaaaagatgctagggcaatgagaaaatcgatctctccattaaaatccagactcgtaatttctcctattgtagaagtccttatcactggaaaaggaaggtgtgggaactctcatgccctaatcctcaacagtagacaaagacaaaaatctacggtatattccaggttgaagaagagagctttgttttgaactcgattcgtagttttgaggactgcaaacaaattcgtgtgctttgaagggttgaaatatttgaaaaagaaaggaaagtggtaattggaagttacaaggggtatttatacccaaaaaggcaatccacgtgaagaggaggtagaaggccacaatcttatctccagaaacacaagctccatcctacgatcagggacttcaacaatctacgtgcatcctcgcaattaatgccctccaaaactgaggtgaaaatcaatgatgaaaatgcttcttttttatttttgcaccaaaaaatgaagagccataaaaaatgtagccatttttggaaagctacacctcgatggtcgtgccctgtccttcatgcgcgactgacacgtagacatgtcatcatcatagatagaagccaacttttgtggtcaaatggcatttgaaatgtcacgattgtattccttaatttccacatgttcaaattaagagggtgatgcaagcttccaccatatgcaacattctggaagcttcaggggtaaatgttgttcatgtttctagcattggacacatggactccaggtcagtaataaagacccatcagtgggaccctcagcaaagacaaaatgagccaagcccatctatatatgtccttctaggaacgtaccttagttccgcactcacaaagccttccgccctcagcaagccgtacccgaaagacatctccagtatcacgagaccgaagagacaagatcgtacattcccagaagacccttccagtttccttttatattcctgcacacaaataaggaaactctagttgtcagatcagaatagagtatcgtataaagattaaggggaaacttcctatgacaaatattgtgcgattaatttagattaattgtccataataaatgtacatggtgttgactagatcaatccaaatctaatacccctagttagcagatcatcttgtccatgagctggacttcatgagaaagcccacgagtattatttattgtttagtgaccagtagagggaaatgggaaacctaattaaattctcaaactactataaataccccacaaatcctatggattaagggttgaactctcttgcaaaattttctcaggcaaacttaagaacatacattctacgtatctctttaggcatttacaagcaaaagacttactgaataatattgactcctagactaaggctagttaatgccccaaccacattaagaactgattgtctcattttataatttctctcttaattatttattcttcagttcttattatttttattctgtttccgaaattctcgataaacagaagtgaacatcactcatgacactcaactgtgcagcaacctaacaacaacacaagaacaataacaaaacaattatcatatgctccaaggcgtggatcggtttcaatacaaaaaatgtagctttaacgttgtttttaagttttgtttatgttgtttaatcttcctaaaaataaaagtaaaatgtataggtgacacaataataacagaaatataacgatgaatgtgataataagatattgcaaatataaagaaaatttacatattctgatgcaataacaacttaatatttgattttgagttgttttgtatgtttgctatatgctgtccatatttttataagcttgacatgtggactctaatccaagaagccaagatgataatcggctggtaaatgcctttaataacagtgtaacaccctaatgctaaggcacgctacagtgctttttcaat

SEQ ID NO: 378359 - DNA, 2191 bp, Cannabis indica
atatataaattattcaatattaagtatcaataatttaacagtcaaccacatataaaatattcaacttcttattataacaaaaaaaatttcacaaacttttcaggacagaaaccttaacaccaccatctagtataacattgaccaaataaacagttaaaataacactaaaaagtacatagaaatatttcaagaattttttaaagactaaagtgagagtgcataaattgtagttttttcacaagcaaaatgacatataaagttccggatattttttcaaaataacaaaataaaataaaatcaaagttaaaagccatttgatcagtcatattgttactaaaaaagagccaccccgacccgacatatgaaaaaaaataataaagaggaaattaaaatcacacagagtccataggagtaggagggtcgacatagttggagatcaacccgttctcgtctttgttcatgcacggaaaaatcattagtctcgacattttggtctgcagcagtcgttgcttgtactctgaaaaactcatttacttatctctttctttctcttttctaagatttttcatgttcatgcttaatctcatagatagccaacaattcaaagttgtagagcaaataaaaaagcaacccttttgaattgacacattctcacattcatcccatttcagcattatatatcaaaacagtggtaaatcttaattctttttcttttgtttttttgcttgaaaagaaagtagattaattggtgcacaccatatccctattaatttccttctacgaggatcgatttgaggagtaggcaagttagtcacgtgtccaaaatttctaaaaaaataagttaattttttttttacatgataaaacttaatcaataataacataaaacaaaagttctttcttgtttctggcccttgggtttgaattccagccacaacttaacactcttttgttttaattttattctccattaaaaattaaaagaaaagatcatgaatggaacccataatttcaaggcaaaatattaggacttttttttactaaactaaacttttttattccaatgagatacttacaaaattttacataaaattattaaggatctcataatccctagagcttatacatattcccttacttacttggttgcaagctaagactcttccacacaagaaattcatgtcttatctaataggacacccttcttttaaggccatgttaaaagtgtcaagaagaggactcaaactcctccataaggcaacaagagcaagcaactttttaacttacaaaaagtgtcccaaccactacacatgcttgcgttaatttttgaaattaacttttttttttaaaaaaaaataataaattgaaaaaaaaatgataaaatatatgcttttattatgagaagcattgacacataacgacgtttagttttttcattagtttaattcaagacttaacaaataaagaaacggaaaactcaggtcaggtgaggataacagggaatggtgccgttgcgatcgaaactcaaaaattgagggggcaatcagcaaaacgaaaagccacaattcagaaattcaaaattcaattcaatctaatcgaaaatcaaaatagtcttctcataattctatttctaattccccaaacccaaaagctatctcccaatcttctttctcttaatttcattcatggaagccatcagaaagcaggctacgaagctaagagaccaggtcgctaagcaacagcaggttcacttctaccccttaccgtacttctttatattaattaattaattacgttcttatgaatcaagaatttagatcactggacactattgactagatcttccgtagatattaattattgttaattactgtgatcgaggagatcaatcaatcaaataagaaattgatcaatttgatggtgacgtgtattgatccgatttcaatactattttagctttctttcaaacttttcatttttaaaaatttattgaattcaattattagtattttggttgaattgccttcttcttcaatttgcaattttttttatttttttcatttatatattggagttaagattatgtttttttttttctttgattgagaatatgacattgaaaggaaaagaaagaaggttttttcttttcttttacttgtgtcagctttttggtcctgcattaataagtagt

SEQ ID NO: 378360 - DNA, 2023 bp, Cannabis indica
aaaatgttaccaatcacctgcaaagcaatagcttacagaaattaattaattttgcctgatattaccttcttcgacggccatgattacatttcttgattgcagcaccatctgaaattgtaggctctccctcctgctgtcgagcctatcaaccaaatctgttgttgacatctccctcaccagttactactgtcgactccaaccccaaaaccagtccacgacgaacctcaccaacgaacccagatctgaccagcctcaccatcaaatctatatcaaaattaggcagtagcaatcctcggacttctttggcttaacactcatactcctctcgcataaacaagaaggtgctggttgtcagtttataatatgtttagttctaagatttatgatatgaatatgtgttaataatcatgcgctctcaaatctttttccatttgaatcgttagggcggctagagccgaagaaactttcataattttctgattttggtggtgacattgagaaacttatctccaaataaaatctgattaatggtgtttctactttctaggcaatttgatttgtaattattttaactactcagtcgcaattaagttacctggaacaatgctgcgtttttcgttggagaggtactttgtagttgtttcaaattttatccggtaatttaaaaggagaagcaaaattggcaatgcttcattgaatagttaccaattaataacctgtacaagttttgaaccaaaatgaacaatgcttcattgaaaagctataacctgtctagtgaagctgtgaacaattgtggtttattcatttgcctctcttcagcattgtggttagtatttgacatgtttatgtgaaaactaacataatttttaaaattagtctgttaagccagttagatagacatttattatatagataagagatattggctattatctttttaaattttgggaattaaggtttcttcttcttattattattattagtttttaatttcgtacttatatcttttgattggaaaattttgatgcaaggttcaattgcaggtgacttagttttgattctattgagttttcataactcttgcaagttgaaagtgaatccttttagttattagttgaagtttttgccgcaaatgtttctcaaattttgtaaaataagaattaagaccataaatgaatttggtaataccattttgagagtgcatgtctaattattggtttagtattatctaggagtttgattacaggttattcaatgtaatatttattttcatgatcatgcctttagtcattgtttacaaattgtaaaatttttaaggtgatcagttatacacgagtgcctttattagtttcagtgggactgacattcatgctttatgcaggttttctatgttctaagtgtcatcacatttttatttggaagaagatcaaagggctttgttttgcattaagaagaacttatcttcatttttgttgaatcttatttctggtggacaatgaattttcttatgcggtctactcagactgcagcagcagcagatcaggtgactgttcgtgaatcaactgcagagacacatcacataccaaaacctacagcttccttggaggctcttatagctgatgatccatatcgacggtattctgcacttgaagatcatgatggagagattgaaaattttggaggtgaaaagggtagcattgcagtttcagatgcaaagaaagactctactgtatcaaagcattctgatgtttccgaagaggaaggatggattacaatcccatacagtatgactctgcctctgcagtcaatttgtctgtgtaggcttaccttttagtagttatcactttcagactgtccatacagatgcacacaatgcatgagattgtcttaataatttgaagtgctgaatttttttaagcatatatttgcgatagctgcacatcttggtctaagttaacaacatttgaaaattatcactttcagattgtccatacagatgcacacaattcatgagattttctaa

SEQ ID NO: 378361 - DNA, 1594 bp, Cannabis indica
tatatatacctggaagaattaagacttgttttctgaatcctgtggcaatgttgttcttgatttgttttgaggtcttctgtaccacaaaatagtaaaccacagagtccttaataaacccccattagcaaaatgtgggataaatatgcgcccccagtacgggtagtgtgggccaggtaatttaagcaaagtgaagaaaatagccatgcaaattagatgccaaggaacttctgcattctgaaattaagccagataagtataggaaccattagaatatacattattttgggcaccatttaagaatactcaggtaagacgaactaagaaaagtataggcagatttgtgtaattatttacagattacgacaagacaagtaaatatcagaccaccctatttggaatttaaactgagcaccacaaatgtcacaagatttggtcaacagtaaaatatgttctacccaaatgaagttcagaataaaccaaacaaatttttgatttttggtaaacatcttaccttgagaagtggggaaatttccaaggctgtctgcctcaagactccagcaagagtaattccgatgaataatggaaaagggacaagtttcagcttcctttcatgtgcacagtaagacatctcgctaagagaggacacagcgagtaaaggtacagataagtatttaaaaactgccaagatgaggtccagggtaagctgaatgaagttgtcaaatgctctgttccaagggaagttcttcactggttgagggaaaccttcccacaatttccttgccttctccatcaactggtcaaactttgttttcccggaatcatttgatgactgccctgccgccatgttcattgcacaatagacctttgacatgggcacagaattttgaagtactccatatgatttgaaaccaaagctgcagctacgtgggaatgatcccagctgcaaccaaaagagaattcaatattcagtacaaaccaaaaataaaaaaaaaacaattcaaatattttatagctctgctctgattactaaaccgaaattagcttaactaaaatcacaaagtcgtttttattcgcaagaaaatcatcgtgtataacaagtcattagcaaagtagctcctatttggttgaaaaattgcgtaagcacaattgtagtcgagataggattaagaaaacgggaaagaaaaaagaagtatttcaactatatgataatttgactccaatttactcattaataaaggttcagattttcagggaaatcaaacatttcaactgcgaggaacaatttttttttatttttaaaagaaaaaaacttcagggaaaccaaacattgcaactgatactacgatgaaaacacacaaaaatatatgcatatataatcaatatctacaattgaaatagccggaaattaatagctttacctgcagaaaaggatgaggggtcttaagggccatctttgaggagatctggagataaacagaagaagatatcaagtgagaggaatatagagacgacattaatgaaaaagcttaaaccctcgtccccaaccagaatcaacaaaagcatctcatctagaatctttcacttcccaaaaccc

SEQ ID NO: 378362 - DNA, 1772 bp, Cannabis indica
aaaaattaaaaatatataaaaaataaaatattatataaaataagtttttatatatttgtgattataataaactaaattataacattatcattatcattataatagatcttaacaactcacagcactttaaaatttataatttaccaaacactcagttgtagttgttttttctcacagcacagctacagctgctttttcccacagcacagctgtgccaaactggccctcagtttttctccgtagctagtttttttttagtatatataaaaaaagaaaagaaattaattagttgggttccaattgattaatgatataagtcttccataaataattaaataagtgttcctcctatagtattatttttctatattatatattgatgagatgacttgaaatttcttttaaatattaattaaagcatgcagcacaatacatggaaatcaacacgttctaataagttaatttaattgttaattttaccattatcatttttttttaaaaaaaaaaaaattgatcatagcaagacacaacccatgttattaattattatatatattagaaagaccagccatagtaaattaagcagttttgagggcatcttgatcttccatatataatttattccaaaagctatcattatcagctgtgtgccaagctcttttttgctcctgtaaaagtttgtacgcactttaaaccgtgtaatgcccaaagtgttccttgcactagtataacctatcatgatcgacattgctactcaaaggaatgcccattatgcattgttgatctctggtgttgaacagatcagctatgaactcagcatcccactctctgactgcccactttcatcaatgaagcaactgttttattctctaaaacatgagagactgtactcacaaaagggttctgtattgagaaaacagagaaaaagtattttatttctatattgtaaaaatattgtatattacaagatgaatgagaagagagtcttaaatacaagactcagctagaggcggttacaaaacagtagagaaagaaaggctaaactactttaactaactaaccactttaagtaaaacctgacatcattcttaatgcttcgaaaacaagaagcaaaactgacaaaagagagaaacagggaaaaaaaatataaagagtattcttctatatttttaatacctcctcctcaaaatggagcgtatatgtcaaaaacggacatcttggagacatgtgagctcaaaataggggaggtaagaggcttggtgaaagcatcggccagttgaagtttgctggatatgagaattagcctcatagtggagttgttgatcttgtctctgatgaagtggcagtcgagttctatgtgtttagttctctcatggaaggttggattgtttgcaatgtggatagctgagttgttgtcacaataaatgaaggcagggtgtggttgaggaatgtggaaatcatgtagaaggtattgtaaccaagttacttcactagttgtcgcagccagggcgcgatattcagcttcggctaaactcttggagatagtaagttgtttctttgtacgccatgatatgagacaatctcctaagaagatacaaaaacctttggtagatcgtcttgtaactgggcaagaggcccagtcagaatctgagaatccgcggaggtgaagtgtagatgtcttcgagtaaaagagtccttgtccagggcttcccttaagatatcgaagaagatgatgcacatcttgtagatgcgttgtgtgaggatttgccatg

SEQ ID NO: 378363 - DNA, 3947 bp, Cannabis indica
aacacattcattgtataggccgaaaatgattgaacaattgatttaataagaacttcctttcttgcacgagataggaagttattgtcccaagactggatccgcttctgcactttgtcttttaaataaccgaaaatgacattattattcctgccaacagtactcggcagcccaagtacttactgtggcccaagtagttatcataaatttagttttaattaattacaattaattgtaactaagaagatgtttagttacacaaaaataaattgttatttgtaactaatattttcaacaatggacattttagtataataacattattttaaccatatattgtaagtgtcatatgtttatgtatctttatctaactatatataatttcatattcatttgttgttccaaataaaagaacaaaaatatattatttgactagtcaatatacgtgaaaagaacccctattatcaaattttttgagaccattatttgatcaactatagccttataattactttcatttttccttttgaaataataaattaagaaaatatagttaaataaatagaagataaaagaaatagaaaagtgcaaacttgataataagtttactattcaatgatcaacattctttgtatttaattttgaatatagctagggtttgaaaattgaactattcaacgttctaatttataatgatcttgaataatcttatcaatcacatgtaagtcgtttatatattatttgttttttatttttattttccagcagtatagtcattttcacagcctcatctctttattaattataatatttataatgtatttttttttagtttcatttgatataaataaatttttattattatcatggaataatcacactacagcaaatattaacaatttggtaaaaagtacaaaccctttttattatttcatgattattctcaaattaatggacgatcaacttggcttaaaagtaaatcaaataagatcaaaccgaatatgtatgatatatatatataaatatttatatttttttattgtaatattgtgagaaaaactttaatggaatcccactttttattatttccctaattgaggttaatacgatgaaagagaccataaataatcaaataaaattacttaaaactattaagatgttgacaaacactaaccctttaggaatattgttttttctttaactatatataattgtcttagtcttgccctagctagtagctataggtatattatatttttgaatggcatatatataattatatatatatatatataaaattagtttgctttaacgtgagaagtcttttttgtccaattgggtatcgaagcttaaaactattggaccccttgagcacatgatatacatagtacatctatatatttataacaacatggtgtctatatattcatataaaattgcaagttggtgtgtttggtaaatgcatggagcctacttaattggttgtataataagttatatatattatttataatattgtacaagaattatttgaggtattgagagagcccaaaagagagggcatagtatagaagttgaaatagactttttattgatggagcccctcaagatccccatgcacatgtgttcaacttgtttatccattttaagatcccttattcaattttatgaccaacatttgtactatacactactaataactttcctccactagtttgatgttctaatattaaatatacattatatatatacatatgattttggaaaattttcattctgatttcagtttatttttttatttatcgtacatgtaataatttattaagatattttctaaaatttcgaaaaatttaacatgttgaaaataattaagatacaaataatatattacaagcataatatttttttttattttattttatatgtgtatgaattaaattatttaaacattactttctatatcataaattattataaattatcttaaacatacatgtccataaaatcaaattagactatgttttttttctaattaccaaaacagaaaaagatacaatagtacacctatttttaagagtgcaccataaaaactcactattcctttttgcatgtaagaatattcaatatatacacataagtttcttaaatactattcaattacatatttatatgtttgatactttactagttgccacacatttgataatgaaacatatatatacatatatataacaccaaacttggatccaagacttggacccggacttgggactcagatccggacccgagctcagacccagaccctggacttgaacctgaacctatatagactcgaacccggactcaaaccaggttccgaactcgggacccaagacctgggacctggacttagacccggatccaggacccgaatcgagatccgagacccagacccggggcccagatccaaagccaaacccggacttagacccgaactcaaacctggacttggacacggggcccaaaactgggacccggattcaaacctggacctgagaccaaaagctaggcttgggacccggaatcgagacccaaacccaagactggacccgagactcgaaccctggaccgaaccaagacccaaacccagacttgagacctgagacctaaacctgggcccagaacttggactcgagacccaaactcggggccagacccgaacctgagacccaaacctaggatcggacctagatccgggacccgaattcgcggcccgaactcgaacccaagacctggacccaaacctagaccccgacccgaacctagctagatccgaacttggaactaggacccgcacctagacctggacctagacccaagaaccagacccgaacttggatctagacccagacccaaacacgggacccgggacctagacacgagacctaggacccgaactggaacccagaccccaacccgacccatagttggtgttggggtcgagtttattaaaaatatattataactttacacaatctattaatacaagttaataccaaacataatattgcataaaataatactaatacaaaattaaatagatataatagtttagatataaaattaaaattctttaaagaaaaaaattgtacaaataggaccctgaactgattttttgttaaaataaaacttaataataatctaatctagagatgtaatgataaaactggttatattttctgtatctgttcgtgttagaaactgtcttcaagttggttatattaaaaaataatttttttaaaaactgatctcggggtcctatttttactattttagaaaatataaggtccattttgtcatttaataaaatagaggatgcaattagtaacttttgcaaaacatagggtttaaaataatatttatccttaattatattgaaattaattgattatttattttcttgccaataatttcattgttgttgaaattatatattgtatatcatatataatcgagtagttgttatacatattatatactagggttgtacataaatttttgtaaaccgcccaacccaaataacctgcccaaagcaaactgagataacccgacgaaaaatataaaccgaaaaacccgacgaaaatataatccgcccaatctatattgggtgggttgaaaataatatcaacccgcccaatcaacccaaactaacccgattaagtgagttttttttttatatatatatatatgtttttattatatataatctatatattatataatttatatattatataatttatatacataattataaaaagtaaaaagttcaaattaactattttatttgtttatggcgaattattttaactttaaatttaatctttatatttatctcattatcacaataactaaaatataatcattgaatgtgaaaaaaaaatagacattagtgctcggtttggacgggt

SEQ ID NO: 378364 - DNA, 6277 bp, Cannabis indica
caaataaaccaaaagaacactaagctaagctttttgctttttgattttgtgttattgattgcattgggcatgagaacttggaaggagagtgtagtattagtataagtgtttggacacgtggcaccctctcagtagatagacccaagtatagtagcattggctgagaagtaattatcttcacactcgtatatgtgtggctataaaataataagataatgataaaaggcctctgtcctcaccaatgataagttatgctgatgaaataaataaataatttgcaattttatttaattaatatgatgaaattctgttgaaaaaaccaacttgtttttttttttgttagtttataagtttttatgggaatgtgtatttgtatacgtatttggctaaggtattttatattgggatgtgtgttgttttaaaaataaatcaatgatagtattaagcaaaagtaaactcaaaagtgaccaatttaattccaagtcaattcacttctatgattttctcattcaatcatttttttctctttaatttttctgccttttttttttatctttgatgggtgttcatattcaaatctaacgacaacaaatgttacaaaaaaacaatatggaatagagaatgaaatattataaatggtacaaaaattaaataatactcaagtttctcaaaattttcaataccaaaaacaatatcatttaaccaatggatcaagtcaacttggcattgattttcttggatttggtacttttagcttttcccttctgttgtttatactcttcataaagcttcaaggaatgttttgtatgatccaactcactcatcaatctttggttctccttaatgtctcgaagaagcgtaaaatgttccgagagtttgtttttcaacatgtcttcatcaacgggagttgtatcgattactgattggactccagccgatttgaaggacccgcttccttttttcttaccggtggatttagaggaatcggttggtggggttagtgactccagctcatgtgacaagtcgttgaaagcttgtattggggaaacattggagaaaaagaactggtcgtgagtaacgttcatgtttgaaattccagtagccattgttgaaacagcaggatgataatgcttcacaagaagattcagttcccaaaggactgaagcaagtgcaccacttaagttggggtctgaagcatatggatggtatttctgtgaacaaaaatgccgttagattttgttgttcaacaccgaaatcccagaaatttgccctcaaaattgttggttattaaaacaaaaagaaaatatacttagaaaccaagcaatctttgcataattgtataacatgagatattaccgcaatggagccggaaaccgagccacccccggcatcattttccaacaaatttcgacacttgacatttttctgaagaagatgcttcagagtgaccaaagctgaaaaagttcccaaaggacatgttatataactttacaatgattcatatcttatggttgatacaaaatgggaaatttcaatataaaaaaggcctacccgccattgcttcggcagagccaaaacataatgagaaagtagccagacgctttacaaatgcagctgccttttgcatgtcatgttgtctatcttcacacaacattatcttcaaagcttcggctaagacttctccctgatctctgttaaggaaacgaaattgaaaaaagactaactaaagaaatacaaacccgacttgacatctcaaaatgcacttgtctcacacacacatatatatattatatatatatacactaaaacaagagagagcactgaccttccaggcctgtattcaaggattatattatacagttggataaagaagtcctgcagatcaacattcaaggcgtcgaggttgctcttcatcactttaaaagcaacaatgcagcattgaaggcgctcagatactgtcaaacttttcccagaggctttttcagaactatcacaaccatatgcaagccttcttagatgacttatgagatcactcatgaaatctaaatctattagatgcgaaaatttccctaaacctctcaaacagggagccagcagagggtgggaaccaccagcatttgcttcagaactaagatacaaaataagaaaagagaaaaagtagtcaaaaatatgtagagagaatttattagatagcagtctatcaaaagtcattctcgaagtgtcaactttccaggattcagatttctgacaaaatatgtggaaaataaaatataacaaggtttcctaaacaatcactactctgctcacccatataaaatatatttatacatatatacactaaaaacatgtaattgaatggttttgataatcaagcacggttttactttccaagaagaaaaaccgcatgaaaattgccgctccccaatctcacttagacaatattttatgtactatgtatctcaacagcaaaattagacaacttaatacactaaaaagctcaggaataattcaagaaaaagccatctgtgagaggcaatgatgtaaataaatatatgtacatacaaccgtttccaacctaatcacccatatgtaaatttgcaaggacaaatagacaatcatatatttgcttcctgtagtatctgttaattcaatgtaaatgagtcttgaacctaatatcacaaagcttttgtgtatctttactaaacaatactacacgacattgcatgttcaggtcaatagaattatacgatgaaaaattatagtgaacctggcaactgttgccactgtatgcttcaagatacgaaaatatgttgcaaacacagcagaaagtgtctctgtctgcatccttctccgctctgtaatatcaggggtgtaagctacagacttgtaatcagcttccacctagtacagcaacatagtgttcccatcaatagaacaaattaagagcaataaaattgtaaaaggtaacagtagttcttttttaatatgtaaaaatctacctcctctcttatctttgacatggtctctcgtttacttctctttttgtcattctctggcaactgacttgcatcatcaaaattctttctcttcctacctctcttgggtttgactctattctttggatcttctttgtgcgacctcccaagatcttcatagaatgacaaagataagaaaacctgagaaagcaatgcaaacaatgttcaggcgaagtttagaaatttaaaacaatttgcgaagttttatccaaatgtgcccatacaaaaaaaaatgtatatataagctgaaagagggcatcacacctcaatggtatcaggatgcaattgacaattataagctttcacatgatctgcaatcaatcgaacagcctcccctgtgagttcgccaccatgtttaccctcatttgtaaaaagtgactttatcgctgaggaacaaagtctcctgttaacaagaaatatacatgtaaacaaaatgtttccattgaaaatacttaaactagatgagccactgcagctatattacaagaaaaagtgtaaattaaccagataagccaaaaccaaattagaattgccccaaaagggaaagcttttttagacttccactccctaagcagattcattcaggtacattaatcatcttcatcttcttaaacaaagttaaacacaaaatccaagaaacattgtactgagattttcaagctcgaaactgtctttagcccctaaaaggaaacttatcaaatcttaaaaagaacaaggaagaaagaatgtagaaacagcaaaaccttacgacgtcatcttgggagcttatgtttctgacaacaacacctaacaagctctcgcgaaagttaaaatgaggtgctgcatcaagcaaagagcagagacatcgaatggccacatgttggaaagagggcacattaacaagtgctgatagtttctgcaagtatgcctgtaaaatcatgcatgaaaaataaaaaattagccgtaatttactgaacttaaaagttattcatgcctgaaaactaaagcaatagtattgaaaagcaaatatcagaacaatttgacaatagattcaaattctcattcaaattggagtaccaaccttgtatgaagataaaagtgttgactcataatatcgcattttcttgacatccttagagactttcatctgaagctccttctcagtaggaagcctgatccggtagctgttgcacaaatggaaaatgtgaaaatctaaactgaatacaaacaccagacaccttctatacaatgaaattattcatacccggggatgatatccttaaaaattgccaacaaagataacagtccaagtttgacaattggatggttatcgtctttacaaagtagtaagaactcatttagagattttatattagactctggatcagaaagcagtgcagttcccagctcagcaatcttacgcttcttattttcaaatgcttcttcagctgtgagatcttctttcacctcagcctaaaagcaaaaggggaaaaaaattatgggacacacaaaaccagagtccaagtattttatctacttggtatcaatggaatccctatatgcaaacattgtgatacaatttaagttgtgtatttgatacagttccaaacaatacgggcatacaacaaaaaatgaaagcatattgttctaaattctaatacatgtcaaattgacaataaatattatgaatactcaatatctcaagtatattccttatatattttatgactaaggttcacatttgttacttaataatcctaacaattacaagtaaaaaaaatatgacataaaacttcagtcatagggaaaacaaagtaaaataagaaacttcaaaatagtaattaccaaagcagctgcttgtggggtttgctccacttcaggtgcgaccaccacttccttcccttgtttctttgcctctttcctaccctttttgagcttcgccctcttctccgcctttgtcaacttaaaaacacctgtaccttccttatcatcttctttctcttcttcttcattaagattgctttcagattgctttgaagcctttggaactataccagacagcatatacaaaaggcatcataattacaacttcaaagactaaataaaagacagcaatgtaagatagtgaaaaactaaaaacctgttctgtagacaagtgtcccatctaaagttttcaccggaagagcatctacacgatccacttcaagcttgtcaacctcttgctctttcagcaattgtttcttctttaatcgcctctcgtatatcgcctccaaagcatcctctttcacatcagcaacacgagtaacatgcctttttgtacgcaaatacaaagttgatcagtagagaaaaatcccacacaaaaaaaaacagcacagaagttaatttgattcactatgacagcaaagacattatcttcttcaatatgaaagttaccattatataatttaaagcaagttcgattcagtttcaatgaaaataagactaaaacacacacacacacacacacgcattatggtataaaaaacttcaaacactaaagaaaatcaacatttccagtacatatttatgaacagagtttgatatagaaactagttgaatgatatcaaattgatcaaatccattaaaatcaatattctgcatagaattaaaggtataaaatacagaaatgggaatgaattaaaatgaaaaaacacgaacttggtgatagattgggtgtccaagcgtgaaacgaagccagcataatctttattgtggtgaacaaactccaagtcctcatcggagacttcaatttcatcatcagcaatctccggtggaaggtcaggtggaagaattatcttctgctttccaccacccttcttcgtcctcgtcctcatcatgagtttggctagggtttcgggtttttgggtttggtggttttagtttgaagctacttctgttacgacctctcttacagggttttagcgatttttttcacttacaattttctcagaaatattatccgttggatggaaggatctaacggctgagatcaatgatgagattatttttattatttattatgagtaattatttgagggtgctaactaaaatacataaacgacattaatcatcaattgtgtaaaacgacattacaaaaattagcttcatttttaccaataatttttctctttttaagtatcaataggaaaatagattattaaagcaaatcattcaagtaaatcaaaccaattataataatgattaaaaggttgtgtttagtaaca

SEQ ID NO: 378365 - DNA, 6275 bp, Cannabis indica
agatgttaatgtagactcacttcagagctattgaagttattacatggaagcaattatttgtttctcgtacataatgtacgagaagcaaatattgttgatatgtatttagaaataaaaagtatcaaatattctgagtaacagtctttcaaacaaaaagaaatgttctgagtaacagtctgcaatgatgcttggctgataactgacaagctataaactagtagataggctatcaggaggagattgtctaagtggtcactatggctatcttatttgtaatttattaatcttttttgtgttttcatctgaagtggttatatgaactttcctagtgtttctgattgtttttgaaacatcttcccataatatatatatatataaatatatatatttatataaattaatgggcatttatgaaaaaaattagtttgaactaccaattaactaattcaagtgaaagggactaatttggagtccttgacatggtctggtgtgcaggtatgaggatcaatgcagagagacttgtatctgaaacatgtactgcaaacatagccagattcagatcagacagccagagagcagtcaaccgaagttctttgtctgagctttttttgtcattccttgcaaaggttgtcattccattttgatgctacaggaattaagaaaagtgaaatgatgaactactcattcattatatttgctgtctttgcactgtggtttcactttaacaacatcgatattccataatttgcagttttctgacataagctcaagggcctcggagttggggatcagtccgtacacaggaaagtgggagcacatagcaagcaatacaagatggttgcctcaaacctatgccttatttgtaattcatctctacctttttctttttttaaaatttatgttccgtctttatgtcaaagttttttttttgtgggcatcttttgcctcttttgacttgctgccattgattattctgatggtttatcagatcgaagatccttttgaacgaccagaaaatagtgcaagggctgtaaacaagagtcaactggctaggatatcagaagcaattcaatcaactcgtaacaggcttatgtcagctaatgtaaacaagacttctgttcttagcacattagtccaacagcaaacgtttcttttacttccaaggaaccaaagatacaatgctgggggatatcagccaaattggcaagcccctgagcatgtacgatcgccaaacacaaggagaggtgggaaccatctccaaccaactcggacacagactgcacattcttacactaatggaaggtcacagatggcacaccattaccctagtgtgaggccacgggcatcgcacccttactcaaatgtgagaccacagacagcacacccttcctctgatgcgaggccgcagatggcaacctcatatttacaagtgcaacctcactaccagagcactatgtcccaaggctattacaacaattcacctacaacaggtttctatgctcccacatattctaatcaaggccagcaatcctggaggcccaaatctgggagataacagatggggtgagctgctgttcaatccacatttgttttctcgtctgttttgtttttgagtaaaatgttttattgcaactgaatcttacacaccatgttgtgattgagctctttgaactttgcattttgtcaaaaatgtgctaagtggatgctctttaatacaatttactgggatgctcgtgattaatgaaagggacattttgttacatagaggaaaaacagcggtgtgatttttcttcacgtataacgatttctaatatgtataagtgtaagaaataaaagaggttgttttgcttgatgaacaatgttatcaactgtaaaaagcaaagcctttttggacttacacgagagaaataggtttaactaggacgacctattttcttagtttaatacagtaactgaggcttttaaagttaaaatggaccacattgattatctgatgaagtgtattcataataggataaataaagtcacttataaaaatgtttatatattctcaagtgaactacatttaacaacaaactttataagcacaaaacaatagggaataatacatacagctcgataaagaagaaagaatgaatatccgattcacttcatcaagaacttaacagaaaaaacttgtattttaaaaaaataaataaaataaaataaaattggagctctagctatcaaacacagttttactaaatgtgtactattttacaagttgcattttttttttcttcacattagatctcacttaatttgactaatagttttaccctttcactaagcattgtctttgcttcgaagcctaagtgtagccaatctcatgctctattgagtataaaaagaaagcggaatttggttccaaactgcttcaacttcaagggcgtaatagccgtttatcagcaacaagcaatctataacttgcatgaggaccctcagcagtgtcacgcagagttacatgccagcccattgcatttccaatctcttgaagctcttccatgacagagagtgagtcacgaatataggctcgtccgccaggtctcaatatccgatccatctcaagcattattgtagatatattgcacctgatatataaaattaaatgaataaaacagagcaagataggattatccacaaatcactatgaaatctctatttgaaattgattacctttttctctcgatagagaagaggctagccgcatgcaataaatcgtatgttctggggtatgtatcaaacggctcacacctgatacatggtatataaatcagatattaaagcattactttgtcctaaaagaaaacagcaaaaaaaaagtaaatatcttttgggaaaatgcaaattacaacggacggaagggagaaaatccaaatttcttttcattagtacaaattcctttgatgggaaagaaaggttagtataaagggaatgatgctgggttttctgattaggaaaaaaaaatgtagaagaaaacaaaagtaataaagaagagagcagtgtaccagtcatgcataactccaataagtccacggtcgtatataacaggcaaggtgttgggcccgctaaccggaactacattcatcacccacgaattcagaccatggtcatttaaggctgcagcaaatctgcatataccaattcataagacaataaatgaagttctctattctgtattcaataaaaaggatagttcacagcagacttatatagtaagagataaatgtaataccctccaaagccagctttcatgtccatgacatttcttagtttaatcttcttccagtgtaaagcacgaacatatccacctataatatccatccagtatttgtattccgccgtgtagagctccttcctagatatatatgcatcaaactgaattgactggagcctatcagggggagtttgcaaacgttgaggccagttggtgacattcgctccatatccattttcaggtagtcgtgtaatgcatggcttgagatcaacatacctaaataatacaaaagataaatgtcaacttgccctgagaagaacataaaacactgcaaaatctcacataatataccaattgtgctcaacccctgtgcaataacacaaagaccgaaactgataagaaaaaaataacagcttagaagataatattatatttattttactggatgagaaaagaaagcaaaaaattaccagactttgtctgggtcatcagtcgtatcacacaaaggaggagtagttccttcttctcgttttaaatagcagtcattgtttactggcttcttccatacagcaatatacccatcctttttcacaaactcccagcatagacgagtagtgaggttcaacatttctaagagggggttaagaacaccacacaaaacaaagggataaaaaaaagttatttcctgtgaacccgtaggtagataatcagcaattgacacgtttcctacatgtctcttctaggaatgacccttttttgagttccaaaaaccagaagtcataaatgaagcttaaaataaagatggactgtgaaaatccccgttagcacctaggatgatactgtttctgggttacaagatgatgatcaggaaatggtcaaactaagtaattcaactcgatcatatttaattataaatatatatatatacacacacacgcaaataatatcagattatacctttccactgctcctctagagcctcttcatgcttatagactggctgtgctgcccaaacaaagtatcctcctgccctgagcatcctattaacctcagcaataaaattccatcttcatcaccaaggattgaaggtgcatcaatggaaaagaaaacgaaattagtaaattctccacaattgtggttaaatatacaaatattttagaattctatattggcataaaattttaaaaaactttgaaacatatactttacatgaacatggcagtcccaccattctttggtcaaagaaaagtgtcaaggattgtccaggaatgaaatattaagtttacaaataaaaaagggtctaccattaaaggtccacttagtaaaacaatctagaacaaaaacatggaaagattaatattttagattgtgtaattttagggggctgaatttaaaagaaagtaatgtctgcaaaatagttctatcttttttctattcttcttcttttcctttcttatatataaaggagaattagaaagtgcatgagaagaattcataccatcacgagtccaattaattctacagcgagaacagtgaattaggtcaaaagcttgactgggatataataagcggtgagttgcaaatgctgccaccattgcaggcacacctcgctcaagagcgaattgaatctgattttcatgtacatctttgggagcaactgacatagtaattacattccgagagagtagataagcaccaaaactcgctacaccacatccgacatccaaaacaactcgagtatgccgaccaaatgcaatttcagggaccatctgcacttggatggttcataatcagggtacattttttaaaagttctgttctataatttagtttaaattcaataaaaaaaagtatgtttaaaattccaaagaatttacttgagaattggggtggacccacctaaattaaggagaaaggaatggaaaagcttctcctatctattttttgttgagaatgacattagtaatggtgctttctttttctatttcatttttaaatattcaaaattaaatacaagtctatccttcgaaaatctatttcatttaataaacaatgcataactaaatgtttttttaagaaaagacaatttggccaaattaaagcattttgattccgtttcttagttatggaaacaaaataaaataatttcaattttagttcagtaaacataataaaataatgtttcagattattttataaattattctctaattacagtttactaaactgtcataagtatatcacaaacaaaaggcagacaatattaattcattaatttcaaggaaagtcacatctaatctttgtaagttttcaaaaactaataccattagttcttcttacaatgttctcctcttttgttgaaaaataaaaaataacattaactatagctgcattaatggctaataaggaaagcagatcaatgtgatcacttccaagttacagtatcaaaacacaaatttgtcaaaattcagaaatctatattatttaacaatctaacggatacaacagtcgctttacatgttcactaggtgaaccttacctctaccattttgttttgttcttcgaaaatatttcatgaaaatgaaatatttgaacaaaaccctactcttcaatctttatatcactttttaaaacaaaaattaagaagacaatgtactaaccttagacatctgatccaagtattcgtttgccccatgtataaattgtgtaccacccccaggaaacttaaatttgttcttcacacgaaagatccagttttgtcctcctttgtcttcagccagacgagtatgaggtacattgctgaaccaaacctgcaaaaggggccatatattgtctttgtgaagagctcaaaaaaaaaaaaaaaaacaaaaaaagcaaaaaaagctcaaacactgtataaacttaaaatgaaaagcaaatgatcgatgttgaaagtttcacacacgcataagcaatgaacatcaaaacctaaccccattaattgataatttcactgaatccatagctatatgcatagcatt

SEQ ID NO: 378366 - DNA, 2130 bp, Cannabis indica
taaataaattaattaaaaaattagaaagcatttacctcacgaatatcagaaacatatgccttctgagatgatatatcctctggcctataaaatctcctcaccttcacctgtgtagatttgatttcagcttctttagctccttttttagtgttaatctccaacacttggcacacaacataagcttttagacccacattcctcccacctttaaaagttccgttctccactctttcctcagagaaataatgggggcttatatacacaaaatcataaacagaatactcagttcctttatagacaaaactactcttggatgaatttaatttataaatttccttttccctctgaacttcatttattcggcaagagtggcagttaccagagcccaggccaatagtatcaggagaaagactacagaaagcacctttttcaggacaatacaagcttttacagaaatattcaactgacaaacccttctttttcctctcatctgctcttgctctatcagctttgtcagcaattgcattatccttccgatgattatggccccatggcattaatctgatagctacaacaacattttgtttacaatcctccagtctcatgtttatgcattcatttgtcaagaatacttctctttcattagcagtgtttccaagaactgtttgagatccccgttgcatcactcttccgtgaagcatctttcttccatctgatgcttcaaacatatactccaccaaatatatatcttgttcatctgagtcctcaacttccaccaaaacagctcccccaacagttattgtttctccacgaaggaaagctcgctgataaagagcttcaccagaagttgttttaccaacaggcttcccatcccaagatacttccttttcagaaaagcaagatttagttttcctagacaatggactgggtttctctgcttgttccaaccctagcaagccctctacagcatcagcatcagcatcatcatcatcaatttcttcttgctcctcaacttcatcctcttcttttgtttcacattcagcttctttatttgaagcttctggagagtaattcgaatagtactctccccaaattctgttgaccagccttgtagtcgtagcttgcatagccttcctcttggataccacaggtgccagtgcagcccttgggttcaaattgagttcacttttctgcagaacttttttctttttcactaaccatttagtatggtgcctctgctccattttatctgcaagacccatcacaaatgcacattttctgatcatatcatctggaaattctgcaaacaattgtagtataatctgaccgtgtaccacaacgtatctctcaatagcagctgcatcagaagaaatgtaagcacgaccatcccttttaaactcggatactctcttgatgacatcagaaaaagaaagccgtgaaattcggctttgttccttcaacaaagtaataatacttattccaagcttggctgtctttaaaactgtttcataccatggtgcatattgctttgacggcttgccaagtctgtacctggaaattttggagaaaagtaacaccaaatgttttagtaacaagcaggtagcaaccatatttgatctcttttagaataattctactgaccctatctgcttgaccacacattaaccgctcatcattattatcataattgcatacaactaaaatttcaaaacgatgtgtgcaatatttacaccacgctctttgcatatgtattaacccaaaacattattccaaaagttgtttcatcctttatcaataaaattcatcattgtttaaaaagaaaagaataagataaattgtaagactaagtagcaagtttccattaaaacgatttaagtcacaggaactaaagttggtaaaaagtgacaatgacaagaaaagaatattaaaaaaaaaataccatgccatatctgttcgattaaaataaaaaccaatgaccgaaccaaattcaatcatccactcctttatagcactacaaatagatcggcatcgccatacaacacgcctgtgtccttaccaacgcttctttagaagatgacgtggtctagatcatcatcgagacagtaactcctacttccatcatcagcagtc

SEQ ID NO: 378367 - DNA, 2128 bp, Cannabis indica
aattaattaatgtattatacattaatgtaattaaatagtactttagacacgtacctgttggcccggtgaagtaagcaatttgtctgattattttttggagaagagaaattttttgcaaattttcacgtgatcagtaattatctagttataataataataataaaaatgcaatataatatatttaagctgcttactcagtcaggaagctgactcgttcggcaagcggagtgagtccaagcaaactcaaagcgaaaatccatggctacgtacgtacgtgtggcacaataaggaagtaatttaataattattaaagataattatataaaaaaaaatatcagttaagaaatgattaattaattaattacttactctaccgaagtgataaaaatcggctgcgacagcaagaggaacggctgggaagagaacagcgagtttggttccaagaataacctcctgcaagtttgtgagaaaggctctaagcatttggaaccgaacgtgggacactaatatggggtctgatttctttcgcagtaaagacgacgacatgttttgcggcgaacgacaaccactcttccctcctaataatccgtaagattctcccttattattattattaccattaataatattttggtggtgatcgtcttcataactactcacaatgccattttccatgtcgtttaatgtactaccctgatcgtttctgccgtgatgattcatgatatgatatatgatcacaatatatatgtgcgataatacacgtatatatagtatagtagtagtaccaagatatatagaggccgttagttattataataatttggccaaagagacgttagaaaagtggaagttatataaggtggtttacatataaatatatagaacaattaataaggggatcgatagtacttcaaagtattgaggttaagagatatatatgtacgtgaggcagcttcgtggaattttcgtgggttttggtcccattattgcatgaaacttggagtttacacgtacttggttttcactgccactaacatgatttgcgtgttgctttgtgactgtgtgcaaagttggcaccataacgtttcctttttctttttggagggtcactgctcaatttatctaatatgcacaatatactaggttattttatatttgtcagtaaatataacatgcatatatataaatatattataacatactttttgtagcatattataaaataattaatataatacaaaataaaataatatggataaaaacatttcttaaattaaacataaattgatcattactgtttatcaagtttaattataattggacaaaaacacttgcctaataattataatgatatgcccatataaattatacacaattttgacatgtagcaaaatattttcccaaacatcttaattaaaacactacaagaaatattatttttgccagcatatttttgtgctggtaaaatagaatttatttctgatgttagcaaaaagggttggcaaatcaacattgggtattagaacttttgccatcacaaaatgaaaagtgctggcaaaaatgacttttcatgacagcgcataaatgcgctggtaaaagttagattttagccactgcaaatatgcgctagctagtaaaactttgacctttttgccagtgcaatttgtgaaatgcactggtgaaagttactttaccagcaaagtagcgaattgtgctagtaaaaatgatatttcttgtaataaaaataagtctcacttgttaaaactgactattaccacataagtgtgtgtggagtttgtgtataatatatatgtgcacatattattgcatacatagaaaatacacacaattttgacacacttggtgactaaatatttttcaatatcttttttaaaatgggtctttcttgttaatagtaacttgccacacatacataagtatgtatggagtttatgtgtaatttatgtgtacatatatgttaagaaatgatcctatttagtattgtttattcaacatttccaagacttatcagcaccctgcatcatactccgcccattgtttctctttgcatcaacttttaggatagtgattagagagttgttggaatttattttaccaggatttagat

SEQ ID NO: 378368 - DNA, 2504 bp, Cannabis indica
gcatttgataattgaaatttgaccctgctttgcataatcttacaactgaagtttgatactcaattaagcccagcatattggtgaggaagatatattatatataaaagaaaattggagattgaaattgaactagtaagaagattctatgttaagtcaaaactggagttgggatttttaagttgttgagatcatttcatgtgtattataacacttgatgaacagaagtttatcttctcttattggttgtttatcgtgcagatccgtgaggaagattgtgaacctggatgatcacattgcattggcatgtgctgggcttaaagccgatgctcgtgtgttgataaacaaggcgagaatcgaatgccaaagccatcgacttactgttgaggatccagcaactgttgagtacataactcgctacattgctgggcttcaacagaagtacacacaaagtggtggtgttagaccgttcggtctatcaactttaatcattggctttgatccctacacaggtgcaccggcactatatcagacagatccttctgggacattttcagcatggaaagcaaatgcaactggaagaaactctaactcattacgtgagtttcttgagaaaaactacaaggagacagctgggcaagaaaccatcaagctcgccattcgtgctttgcttgaggtaagtaattgtggacaatgcatactttatctagttccttaaaataaatgaatcactagcaattatgataacatttattttattttgattaaattaaatcactaaaactgaaccttaaatgcttgcttaaaactaatccctttatttgacagaattacaaatgtaatttatgtagattgtaagctagtcttggcctctaagtctgtattctcactgaaaagcttgataaacattacaatctttctttacaattgaagaagcttcaattcatgagaaagaagaaccattatatttcttctctaaaggctgtttatatacatccaatcatttgtgcacatgctaagacattattaatcacttttcattttattaatgtagtaataatgtcttcttggtttttgcatggtaaataattggcttgtaatttgacatctggattgtgaaaatgatttttaaggttgttgaaagtggaggaaagaacatagaagttgcagttatgacaagggaacaaggtctgcgacaactagaagaagctgaaatcgacgccattgttgccgagatagaagcagagaaagccgctgcagaggctgcaaagaagggcccttcaaccaaagaaacatgatcgatgatttcccgtttcaccttgctactattgtttttttaagaactcgtaaatctggattcccggtgttcttgttataatcagcattttagagggattactatcttagttaaaactgccctttcatacatgttgttggttcttacatctaaatatgcctttgaaattatttttatttatggaatatgagttcaaagacaattttcataatcactgcctctgtttttttgtatgttatgtccatcttaaaaaagagttagaaaaaattaatcatatcatcatgaatctaacaactcttctattttgttagattgattagtttgttacattaacaattatttcaaatagagtcttatacatctaaatatgaaaattttataatagtgaaatcagaacagaagtccgcaagactttctccccggtctggggttagattgttgatttgcttctaaaagtgtctctccttcttagtgcttgggtattcatccaatgcattcttttctatcttgtacccatggaacaccaatccaatctcgatttttgtcaggtgctagtcaaagtagtaagcaagacccgcgagaagtttttgcaccaagctaaagaatgcaaaactcgacttggataggaaggtattgaatataaattcatgtcttttttgccaagcaaagagtaacacacacaggagcgaagcaaaaacaaagcaaggggaaatccttagattgtgtattgaatataaattcatgtcttttttcactagctttcgttattacaatcttattttttaaagtcaaagaccagtaattatgtataaattattatcgaatttcgattttctttatttttgtataagtaacattttttattgctttataaaaaaatgattactatttataagtaaaaaaaaaaatatttaattagatcatactaaaattaacttcgaaaaaaaatggcccatgcaggtctcgaacctgcgaccttcgcgttattagcacgacgctctaaccagctgagctaataggcctttgatgttatagcaattccatttttaatatttattcatatacagacacagttcttcacaagttcaaattcatgttctctctctctcttcattcgctgtagttggttcatagaacaagagtcctgaagtttccgccatgaaagaagattacgaggtttgattctatttctaactgctttaatcttaat

SEQ ID NO: 378369 - DNA, 2077 bp, Cannabis indica
ttttttctttttttttctctagggaccttcgtttgaacacttagttgctccatacaggcctcatattttgcttctcaaggttttcgaagacgtgatgagaggacaaacatgcttttggtaagtctaattttccaattcctgtcacaaatgaaacataaaatagaatttggattctttatttgttacattattatgtttctgcatgtttcgttactagtttttagaaattggatttttctggttcttaagttatggttatttaatgtggctgtattttggatttaatcgtgcagtcattattctccaaccttgataaatatttagcaccaaatcaaccttgtcatagcagcttatggtaagaactcactcctattacaacttagtttgatgaatattacaactctttcttacattcaacttgggtacaatggcagggtgtccatttttgcttttcacatggctctggttgagcagcctcgagattcattggttgttgctgcatttagcttcgcaatttccagtggcggatcactgtcggatgctgtaggagttgcaagaacaatcactcaacctcatgaaacaaggttctatgagatattagaacctgtgaaaacgcgatcaaaaaaagctttggttgatgaagtccttgatcttgcagcatcagtcaaagccgtattacgcaagatgacagaccgtgattatgtttcccaagcaatgatcaagttccccaaagccccacgctcggacatggtgagccccaaaattcgttttggttaaaagtacaagtgaacatagcctgaaacattttcacatataaatttgtttttgcaggtttttatcccaatggcgttatgtttaagagtttgcaagatatttgaatgtaatagaagaggttcagtgcccaaaattggtaaagggattgatttattcttacttggcattaggtagtttgacagaggttcaacatttatttgcaactgttgttattaatacagtcttccctgtaaaccaacaacgttaattattgtttatctcatacaaatgccacccaattctctgtatatactaagtgggattggttaacctttatgtttagctaaatatcatatctcatgcaacttctgaaaaaattatatagctgtattgcagtgaagcaaacacttttagagttaaagcgttagaatggaaaaccataattactacctgcattattaattcatctcacatatttacgttttgagagaaataaaactatgttcggaagagggagagatgggcggatgtggagtgaagaaggaagataggtggagggaatgtctccctccaaactttaaaaattcaattcctctattagaaggatagtaggaaaaaaaattattaattaataaatataataggaaaattttacaatgcaccccttgaaaagggtgtatcgatgcaccttttactgtttcggtatttagaaaaaaaaaattagtttgaattttttcttttatggtcgtataccttgtagtaatttaaaatatcttgtaaaattctgagaagttcagaaaaagttaacatgcctaaattaggattcaaaaggtttgttgcactcgttttttttttatttattttatatgcatgtggaatagacgatttgaaaattgaattttatattgtaaattattatgaatttctcaaaaatttgcaggatgtcttaaataactataacgtatacaactttaaaaaaaaatggattgagttaaaaaaaaatggattgagaaattcttataaatgtcgaaacagttagggattgcattaatacactcattatagtggggtatattgtaaaaaataactagtacaataattatttctctatgtaataaaaatttatatataaggacaattttataattttactaatcatttgtctctctattctttcaactttgcacttatgacacgtttactacacaatatttagaatcggaataaagtaataaagaaatgtaatggaataaatgaagaataatcagaatcatgttataaatattaataattatgtggatgtccaaatcttttatttattacc

SEQ ID NO: 378370 - DNA, 9866 bp, Cannabis indica
aaaaaaaaaaaaaatagtttatatggtaattaataatacgtgtataataccattgtttctcctaaaaatcctctccacccttgtcttgaaattaatcaccaaaaaaaaagactctttcaataacataaaacacccaacctcctacaatccctcactatcgatcttttctcaaataccattgtcaatcccagttgtagcttctgttttgccaaccttaattcttttttggtttgttttcacatctttctcatctgttacaatcattttcttcaaaacccagaatccaaataacattcatctcacctttttttggccactctctcttctctgtccctctttctttcttctatcatgggcaattgttgctctcaaggcaagaccaatgataatggacaggacaccattaaggcaggttcaaccccagaaaacaactcagacgacattaataataataataacaatggtcgtggaaaaaactctaataatgcagggccagctaatggtaataacaaggccaataaccaagcagcctcagcaggttcaaccaagaataattcgaagcctgccccgatcggcgcagtgttggggaggcctatggaagatgttagatcgacatacaacattggtaaggagcttgggcgtggacagtttggggtgacacatttgtgcactcacaaggtgagtggggagcaatttgcttgcaaaacaattgccaaaagaaagcttgtgaataaggaggacgttgaggatgtgaggcgagaggttcagattatgcaccatttgactggtcagcctaacattgttgagcttaaaggagcttatgaggacaagcattctgtccatttggtcatggagctgtgcgccggtggtgagcttttcgatcggattatcgctaagggacactacaccgagcgagctgctgcctctcttctcaggactattgttcagattgttcacacttgtcattccatgggagtcattcatagagatctcaagcctgagaatttccttttgcttaataaggatgagaattctcctcttaaggctacagattttggtctctctgttttttataaacaaggtttggaatttgatcattgtttcattccatttaaaacaacaacacaacaataatgtgtgtttttgtttaccattattattatgacaggagaagtgttcaaagacattgttggtagtgcatattacattgctcctgaagtcttgaagagaagatatgggccagaagttgatatatggagtgttggggtcatgttatatatccttttatgcggtgtcccacctttttgggcaggtatatgtataaaaaaaatacttgtatttgattgcttgattaatagtctagtttttcttttttaattaatatatggttttgatagaatcggaacatgggattttcaatgcaatcttgcgtggtcatattgatttcacaagtgatccatggccttcaatttcaactggagcaaaggatcttgtaaggaaaatgttgcattcagatcccaaacagagattgacagctttccaagttcttagtaagtacattagttcctctattataatgtagatggatacatatgtgtatattaaatctcctttctgcagctcatccatggattaaggaagatggtgaagcaccagatactcctcttgacaatgctgtactcaacaggctcaaacaattcaaagctatgaatcagttcaagaaagttgctttaagggtaatcataagatttatactatctaattataaatcccattattagttaaggtaatctaaatctaatgtcataatctctatacatataggttattgccgggtgtttatcagaagaggaaattatgggattgaaacaaatgtttaaaggaatggatactgacaatagtgggacaataacacttgaggagctcaagcatggattagccaaacaaggaacaaagctttctgaagttgaagttaaacaattaatggaagctgtaataatcctcccctctcacacacactcaagattattataagcacttcttcataagtacatgtaaactgaaaattaatgttgtttgacttaattaattaggctgatgctgatgggaatgggaccatagactatgatgagttcattacagccacaatgcacatgaatcgtatggacagagaagaacatatatatactgctttccaacactttgacaaagataacagcgggtattgataattaacaagaatgatattttgatgtttacttgataaaatcatatacatacattttgtttattttggggtgtgtgtgtgtattgattatgattaaatttaggtacataacgactgaagaactagagcaagctctccgtgaatttggcatgcatgatggaagggacataaaagaaatcatttctgaagttgatgccgataatgtgagtataataagttagtatattgtctcttctgttatacatatccaaaattatattttttcacaatatatatatataaatatatgtgtgtgtgcatgtaggatgggcgaatcaactatgatgaatttgtggctatgatgagaaaaggaaacccagatgctaatccaaagaagagacgtgatgatgtatttgtttgactttgattttatgtgtgtatgtatcatgtatgctgatgcaacttatttatgtagagaaaaagaagtggagggaaaagtgttatatacttcaaagagagaggagagagagataaactcaatatttatacgagctttacaagtggattttatgggtggatcaatgctctatgtacagtactgactattagaaaaacaaaacaaaaaagaaagaaggggaagtataggggtagtggctcaacagaaacataatattggagtttcattcttatttatttattcgatcacataagaaattctttagggttgtaatcatttcctcgtgtgtagtatatgtatatcaactattttcatgtttgtcaaatttttaaccttaaccaaaaatgctcattaaattccaagcaatgagaaaaaaaaaccaagaattcttgaccaaattgcacctacaaaggatgagaaatttagaaatgagagccaatgacacaaatgagggcgcctccaaaaaaattcatatattttagtgatcttccaaaatagagttaagttgaaaaataccctttttattaatcaattaatcaaatttacctctaattttatatttatttgaaacatatctctttttatatgtattgtacccaaaataccctgacataagagagtcacatggatagtaacttgaagtgatagggacaaaattggtacaatgttttaaaaaagaggtaaaaatgatagactttgaaaaagatggtaaaaataaaagaggactatataaaaagggtatagagtgtaatttcctctccaaaatatcacatattatttaatataggtccaataatattttttttctatatgctcacaaaatttcagggtcacctttattaataaagtacaaagattaaagaagaaaccaaagaagaagggatgaaaaagaacaaactcaaggaccttggttagtgtcacagagtcaatattttatttagaatcgtaccctatgatggtttgagtctcactcagccaaccaaaccaacacacccaaagataatgcacacactattgttgaatatagagaagtaaaagaaaagactcattaaattgattgaagaacacgactcttcgtatatagtacagagagttagttagactaaatcacttaactataacatgacagctaagcaactaatctaactaactttaattaactacttaacacccccctcaaactgagctgggataatgaaactaagcttagtttgtctcgtaacagcttgaatcgaggtgcagaaagagctttagttagtatgtctgcaacttggtcttgagcaggggtgtgcttcacatggagttgctgttgcataattctttcacgaacaaaatataaatcgagctcgatgtgtttggttcgtgagtgaagcacatgatttgcagacatgagaactgtactttgattgtcacaccatatggtagggacttatccaagccaacttcagcaagtaatgactgtaaccaaacaacctctgcagtggcattgggaaggctggaatattcatcatcaggatccgaggcccaatcagcatcacaaaaccctgtgagagtcatggtagaacagaatttcaagaggaggccatgatctagagttcattttagatacctaagtatctttttgaccacatatagatgggactcgaggggattatgcatgaactgagagaccttattcactgcataggcaaattatggtcgagttatcacagcatattgtaatgcaccaacaatgatgcgatattgcttgggatcagcaacaagatcactgtcataggctgaaaaattttcaccaccagtcataagagttgatagagagttagcacagtccattttggctctgcaaaacaattctgtgatatatttattttgacataaatgtaaaccaattgaaaactgatgtacttgaatgccaagaaaatagtcaagtgaaccaaggtcttttaatgcaaattgtgcatgtaaatctttgatgagagtagttaggacatttgttgagctacctgtaatgataatatcatccacataaaccaaaataaatgtggtatgacagtctgttattctagaaaagagagagtgatctgcccttgcataagtgaaaccaaacattttgagggcatttctaagtttatcaaaccaggaccttggtgcatgtttgagtccatagatttatttgtttagtttacacacaagatcaggggaatctttgtcaataaatccatgaggttgagtcatataaacctcttcatttcccatttaagaaagcattgttaacatcaaattgcttgattgtccatcctttggataaagcaattgtgagtatcactctaatggtagtaggtttaatgactcaactgaaagtttcagtgaagtcatgaccatattgttgcaaaaaatcctttgcaactaatcttgctttgaattgagctgttgaactatctgtgttttctttttccttgaagacccacttacaaccaatggctttttccctggaggaagaggaaccacgacccaagtcttgtttttctttaaagcatatatttcagtgttcatagtagagttccattggggagatttgagagcagatgccactgtgagaggagtggtagaagctatgagctctttaggcttgtatgtaccaaccttagcacaagttaccataggattattgttggtaactaaaggtggttagacatcttggttgatagcaggtgtgtcttgtattagaggagcaacaaagatgtcaggtgcagatgccagaagatgctcaattgaagagagggaagaattatcctgaggagcagcaggcatctgtgttgacgatggaatagcaggtaaagttgagccatcaaaagcaacattgtgagtaatgggatgttgttgttgtggttgaactgaagtgatagactgttgttgtggtggtgcagtaggatgctactgttgtggaatggattgaagtgcagcaggttgctgctgttgtggtgttgggtgaggagcaataggctgctgttgttgttgagatgtggaagcagcatttgtaatgttggtttggacacgaagttgttgttgagttgttgccggtgaaggtgggtgagatgcttggccaacaagaggtgtgagaattggtgtcatttgggacacaaacacaaggagcagttgcattagtagagatattaaggaaaggaaaatgaaactcatcaaaaataacatctctagaaatataaattcttgccagaagaagcaaggcatttataacctttgtgtttcaaactatagccaataaaagtacatttttttgatctgaattcaagcttatgtttgttatagggtctagtgttggggtaacaagcacagccaaatacttttaaagtagagtaatttggctgtttataaaataacttgttcaaaggggtgtcattggctataactggggtaggaagtctattaataacatagcaagttgttctaacagcttcatcccaaaaagagagaggcatgaaagcttgggcaagtaaggtgacaccagtttctattaggtgtctatgttttctctcagcaacaccattttgttggtgagtggtaggaaaatacagtctatggtttatgccatgtttgattaggtaaggttctaaggcttgccagttagattggacagatagaaggggaaggttcagctctttttctatttgagctctgaagtttataaatatttgtaaagcttcagattttactttgaggagaaacacccatgtgtatctagagtaggcatctataaagtgaatatagtatctatatccacgagaggataacataggtgagggtccccaaatgtcagtatgcacaagctgaagaggtttggtaagaacagtatgagatatgggaaagggaaatttgtgaattttacctttataacaagcatcacaaaaatcactcacagctttatttctatttgaaatgttacatttagccattatggctgttacaactttgacagaagggtgagcaagctttttatgccacaaagaaaaggaagtacactgagaattggaattgaaattgttattacaagtttgaacattatacaaagattttgaattgtttaatctgttggaagatgacatacaaaaatgggttggatctatgacataaagcccatgcttaagatgtccttctagaacagtctccttcgaaacctagtccttaacaaaacatttttgaggatgaaattcaaaggaaagcattattgtcaatagcaaattgagagacagacattaaattcttttgaatgtgtggcacatgcagcattctatttagaaataaggttttatgtgtgtttgtagtatgaatgagggtattaccaatgttttggatagggaagccagcaccatcacccatatgcacatgttcttgtccaaagtaaggctgcttctgtgtgaagttggctgcattagcagtgcagtgagcagtggcttcagaatcagggtaccaggcttcatccacaacactatcagcagtagcaatgttggatgactgttttaggatgtttgttgctcctatgccaagaaagtcatagttgaatctttgataacattttgctgctatgtgaccaattcttgagcagagttgacaaactggtttagagacattggttagagattgatgtaaagaagaattggcaagaggttgaccacgaacctgaccagtatttgtttgaggaaacatattcgatggacaagatttgtttggaacaacataaggattccaagaacctttgccaatgttgttgtgatcattcaagtttgtggtatctgcattgtgagaaaatgatgtagaactttgtggtttttgtcgaaaaccacgattagtagcaagataatagaattaagttctttagtgtgaatatccattctatgttcttaagacaagagtaatgtttcaattttagcaatagagtactcatcatttctagagttaacagaaataacaaaggtatcataaatcgagggcaatcctttaaagatagatgaaacgtgttctttggtggaaattttgtggccaacagactcaagacgatccacaagagtcttgattcaaagtaagtattcattaatagattgagaacctttcttgcaattctaaagttgagtagtataaagatcgattttagctgaggtttgagtaacgaaatatacctctagcattttctagatttgagcagatgtttcagcaccaacaattcgagtgagaacaccattagatatggaggacaacaaccacgagtataatagttgatcctatacttcccagtctgtaaattggggattaatctgatgtcgaacttcatcttcttgagtaagatattttcatagaggttgatgagtgtcagatatgaattgttggagacgatgacctctggtggcagaaagaagttgaggacgccataataggaagttgttatcatcaggtttaactgaaactttataggagaaaacaacaggggtgaaattggtagttgttgaagaagtcatggcagaaagaaaagaaacgaaatgaaaaacagattatggaaacagaaggaaggtctggaatggcagaagcaaaaaaatttgttgtgataccatgttgaatatagagaagtaaaaaaaatcattgaattgattgaagagcacaactctttatgtacaatacaatatagagagttagttaggctaaagcacttaactaacatgatagctaagcaactaatctaactaactttaactaactgcttaacaactatgtgtctcaactttcaccaagcacaattgactctcagtcacctatacactattaatgggagtgattgaaattacttaaatacgtggcaagttattagtggctatcaagaatcttcaatgaaagttaattgggccttggcttttatatatagacaacgtcaagttatttcgagttgggacaagggaaaaagatgagaagaggttatgagatagagtgaagaaatgagagaagaaccaattaagttttgagtgtttcagtattttgtgatctttatgtaagttgagtgttttcactaagagaattgaatgtttcttcatgtgagcctctccaagagagtttagtgttcacccatgcaagtttctcttagagagtttgtgtttctccatgtgagttttgggttccctctaaaggagttgagatgattttgatgtactattatgagctgagtttttaagaactctttgtaactctattcttgaaagttgaaagtaataaagaaaaatgcatagtgcttgttccctcctagagtagactcaattgagttcgaaccacataatatgcatttttcatatctaataccatttgtgtaattcacaatttcatttgacaacaatgtctgtgcttttgttcatttaagcataagtattagttttgaatcttgatttgctttatacttttgattcattctctatttaatttgatgttcttgattagtatgatttgtattaaatcacaacaaatagtatcagagcctaggtgggggttgacttttcaagaaccaaggtggagttttgagagaatttaaagaatcaagaataatttctacaagttttgaggtgaataagttcaattgaaaaaatgtagcctttggaagagaaaaatgacgactttgttagtgcaacaaagaatttcggaagccattgatagcaaggctctttttggtcttggtaagataagaagaaacaacaaaaaatattcaagtcaaagcgtatagtgttattttacctggtccgaattagagtaaaatgatggtttggaaagaaatttgtccataaatcttagaatttgtgaagatgttgcgttcaaagaagatcccacctaagattgcatcttatatgctaaaaatgtggatgaaggtattaaccatgagcaaggaacttgcgacagtggggcggttgccagggattttaaagattaagtgctagtttcataatgttttctatgacaagaattatgaccctgtaagcatcgaccttacggaatggcttcctcctcttttgtggaggattgagaattcgcctattccttgataaaaattaaattatcttaatggaatttatagcacgtttactacatagtattcagaatcgaaataaattaataaaaaaatgtaacaaaataaatgaagaataattgaaattaata

SEQ ID NO: 378371 - DNA, 3027 bp, Cannabis indica
gtaaatgatctaatttataataacagtgattatttctcaaaaaaaaaaaagtaatttaacacgatgcactttgtaactgtctataatttttataactaccattttgattgggaatattatcatattactttactagatattatcttttgaaataaatataaggaaattttatatgttagggaatatagaatgcagtgtggtacgatgcggtttaagcggtttacactattattattatcaaacgttataataaaaatttaaaaataatcaaactaataaaactttaacaatacaaaacaaaaaaaaaatacttattaaaattttaacactatgacatgtataataattattaagtcattatattgaattgtctctaaaggataaagtaatatacacatatattatatatatttgttcttatatgaaaaaaagaataaaaattatattgtaaaaattgataactttgtaatatatagtgcggtgcattttaaaccgtaattattaaatttaaaaactacaaatcgcactgcaccgtgcaatttgacaaaaatgcaaaccacaattgcaccgtaaaagaatttaaatcgtatattttatgcggtgcggtgcggtgcgggcggtttgagcagtttgatgaacacccctatttgtaattacaatataaatttctgtttttgtaatatatcttgcattatatttatttattattatcttaattttaatttgggcctttttcattttttacatttcttaaacattttttttttgtcattttttacgaaattctatatagaaacccctattgcaactagcgctacaacctaaatcgcaacaaaaaaatcgtatagaaactcctattgcaactagcgttgcaaccactttaaaaaacccaaaccataaatttagaaaaaaaaaagttaaaaaaaatagtatatggggtaattccccttttaattttcatattataaatataaatatttaagaaaaaaaaaattaacttttgtcggcgcacaataagtcgccggtaaaactaaattaatattttattatctatgttttgccggcgcagcaaaactttcacagtaaaatgaaaattaggcgccaatttggcgttaaagttttgtcggtgccctacctcgccgacaacaaattgtcggtgatgaacttatgccggcaattgaattcttcggtgtaaatacttttgccggcacaaaatgtcactgaaaaactacgccgacgagatacttttacttttggcggtgacaaaagtgctttttcttgtagtgagtacttctggctgccaatccagttctgcatgctcgaactaaacacaatgaaattgacttgtattttattcgggacaaaatgtgtaacagcaaatacaagtcaaacgtgttttaactcaagcacaaattactgattgtcttactaaatccatatccaatttgaggttcaataatattcgattcaaactcagtgttgcttcaaaatccacactacgtttgagggaggctgtcgaaggtgatcttgagttagtcaatcagttagttaattagttgttgtaactaattctttttattttgtcatccttctaagtgaatattagtagtttgttagagcttattttgctctgatataaaaactttgtattgtaacttgacacaagtaataacttagtcttctttgttatcatcttctctcttcagattgaatcctcacacttataaagtatcattttggtacatttattattaataaatgatgtaaaatttgaattaaatttggctcaaaaattttaatgttatatttaattcaaattttacaacatcacgttcacctcaatacattaagagtaaaattaaccgttcttttaatagaaatgtgtaaatagatgaatgcattaaatttttattggaagtatataaaagttttattaaatatataaataaaatataaaatgatatattaattatttagcggtaaaagagtaaataaaaaagtaatatttattataatttatattttatgctaaatttaacacaaattttagcatctattaaatttagaccaatttatacatcatcattggtgttcactaattttatgaatatctactaaaatatgcatatacatatacactatacttttagtactctattggagatacacatattatgttactttgtattttacaattctatatatttgatatcttaaatcctaaaatttaataaatatcactaaattgtcatcaactaatgtagttgatagcattttttttagtaaggatataacagagagccaattttttttttttcagcaatataactgagagcaatttgaatatgaatatcttagttaaatgttattttagggcactaattatatacaactccaagatacaatttcaaaatattggattgagaattatttaaaacgcagaatagcaaaatgtttagcagggaacaaaaacgaaagggaaattaagaaagaaatactaatgcttctacttacttacgtggacctgataatgcatcaaaaatatatattttttgtgaggtatcaaatatatatctttaatttacttattttgaaaaattaataatagacatcaataggaaacattaatactcggtgcgaaaatttgataaaacatgagttgtaatgctgaaaaaaaaaatcgacaaaaaagtattttttttgaatgaaaataatctttattagatagaaacatccactaacataatggactaaagagcaatgggaacatgaccctcagtaaaatgatggcctgaccaataacaaacaccacgtgccatacagtgcgcgactttattagcaggccgtttaacttgaccaataaaagcattacttaaagaagataaaataaattgacaattatgaacaaatagaccaaaaatagaaggcatagataccgactaagaataggttgaacaactaaaaggcaatccgtctctaaaatgacatttgacttgttattcttctttatccaactaagtgcctctt

SEQ ID NO: 378372 - DNA, 4179 bp, Cannabis indica
tttaggtattaaaaagtaaaaaggacatttgctttattattttaaaaaagagacattaactatctataaagttagaaatagaccatttactagatgttgttattataacaaacataaattttacttattaaaaaaaagtattctttggaactattttctaggcaatattgatactattttctattttctcaaaaacttttttttttccaataaattttctcaacaagttttattataacacattctttgatttaattccaaacaacgatccataatagataataccatgtcaatgtatgtgtgataaatgatagacaagatcaaccagtaactaataatagccatgtatatgattatcattacacagcctaaatttgtatcaaccttactggtttccaccgacacaattcactagttcagagatcaacatctactaatattaaagaattatagtgtgtatatatatattaagaaaaaaaaaggacacccttctataaaacttacttatgagaatattagaaataagctttaggaaaaaggaatagaaaccatagaaaagaagaaaaagttacatattgcacaagaaagaaagagtggtatgaagttattctaggcttgagagtctgggcccgctggttttgaattgagaagcggttgtagggccttcacaacaattgtcatattgggcctgaaatcagcctcgtattgaacacacagtgctgctactgctgctagctgagcccatgcacaacatcacaaacacttcaacttattattttgaatagcttttaaaccagaagactagaatttgtcataataataataattaataataataaataataataataataataataataataataataataataataataaataaataaataaataaactaaaaattagaaattcatgtatagtagattgagaaaattacacaaaatatctaaaattgtaattttttttttttatatatttttacagactttacaatgttatttccatgctatcaaatataatataatattgcagcaacataaaaataacgttttttttagaaccaccaaaaattaacagtttgtatttttgtaaaaaaaatttgtaaaaaagtaaaataaaagtgtaggtcgtaaaaatataaaatgattgtcatttttgggtattaatgaaagggataattgcattataagtatctaaagttttacctttgtaatcgacataaatctaataattttttcttaaagcataagcattcaatattagtataaatgtaattttcgtttatttttcttaatataagctcgttttgaaattattaaaagaaagtttgaaagtaaatgataatatatatttttccttcaaactcaataatttagaatattaatcttgcatctgtcttatttaaaaaattactaaagtctatactggcaaaactttacgaaaattataattttattaacattagatacttacagtgctaagaaaatcattagatttatgttagttacgaagtcatcttgtcaaataacatgatgactttggctcaaaataacaaaaagaatacttgtcaaataatcaaataatgatattgagaagtaaaaggaaaagagaaagagacaataaaatgaagaccttagcaattgcctttggtgggaagtcgttatttagctttggatcaacacattgcttgactttatcttcgctcagtcttggagttgcctgagtatttcatgtcctttattattagagctacaaaaagtagagcatatgggagcagaagagcacaaaaaacactcacaccaaaactagcaacacaacacaacacaaacctacccaagtaacaagactctgttgtcccttaggcatggtgtggtctaccggctttcgacctgttagtagttctaatagaacaactccgaaactgtaaacatcactcttttgagttatctgtcctgtcatggcatacctggacaaaagagtaatgatttttactaatcaaactccaaattcaaggaaaagttactcataattatgtgtttttttgttttggtatgacttactctggggcatggtagccaaatgttcccaagactctagttgaatgtaatctagctgcggtatcagatgactgattagtgagattgaaatctgcaatcttagcaaaatagtcatcaaatagtaggacattgctggatctgacatctcgatgaacaattgatggttgcaccttttcatgcaggaattctaggcctttggctgctccataggctattttaactctttggttccaatttagagcagggccaggttcagccccttgtactccttttctacctgtttgtttattcatatcatccatgaaaacagaaccaaaagagttatttcattatctaaaaagaacataataagcaacaaatcatattatataccatgtaatatgtcatgtaaagaacccaatgttgcatactgatacaccaaaatcctgttgtttccatctaagcaatacccaagcaactccacaaaatgctcatgctttagtcttgacacttgtgataactacatgggccaatttttgttcctttattaaaaacccaaattggaaaaatttaaagctatataagaagaaaggtggtgagaattaatctcattcccactcacctgtgacacaaactcagaatctggttcttgggatgtacttgtatccaactttttaatggctgcaacgagaccattacccaactttgcatagaaaaccctgccataagaaccttctccaatcaaagctttggaaccaaagttactggttgctctattcaattcatccaatgacatggatggtatttcaataggtaacaccttctgtggtgctccacttttgatcgtattggaacccctaggctctcctctttcacctgcttcacacaacaaacatctacatatataaaaccccatattgtaataataataataacaagaagaagaagaagaattaccaccaccataagggttccctctaggaggggcatattgatttgctgggggaccactggtttcctcctctgcacctccacaacagaacatacttctaagaaaaaatctctcttgtttgtagtaccagctatatctcaatgctccatatatctacaaccgatcgatccaacacgatgattttgataattcctctacaatgtacaagaattttctcttctttaataatacattaatgtcatactagagttttggtatatgtcattactttgatctgaaaatcccttttgttacaatgagattagaatgaaaaaccatgcagacaaattattattaatgaattttcactgttaaaaaaaactacaaattcataataataacaaaatgtatgaaattgataataataaaagaatttaacctggaaataatgatccaatgaagctttaaggagagagagaagaaagagaaaattatatgagaagaagaaaggagaggaaataagattaagggagccaaataagagttgcgtgaaattcgcactaacacaaacctcattaatatacttatttataatttatttaataaattaaaataatagttatcaataataacatgcatctattgttacaaaaaaaaaaaacaaaataataataaataactacattccttccacgtcgcacgttcattgttactatttttttaacatgtttgctattattgttatttcttgttactcatgcaaatatatgtatatccttaatatttcaccaaccaaatcgtttgtttctttttttctgattcgaaagaccaaacacattatcatatatatgttgttgaaacaaaaaacagaacaatatattgttaaaaaaaaataaaaaaataacagaacaatgtcatcgtggcttcaactcgtttttggcttttgttgtagagaattaatttcgtttaggagtcaaatagtcaatgattgttgtcttagttacaaaagtagttaatagttatgacttatatgataataatcatcggttgttgtcactacaacatttttgattattaggggcggacctattaccggcggggaaggtctgcccctaataataaggttattaccggcggatgtggaggtcgccggtattaatccaattttttgattttttttttaaaaaataaataaaatactaatt

SEQ ID NO: 378373 - DNA, 3999 bp, Cannabis indica
tttagattgataatatatagaaatagaataaaacttcagtgtatgtttagttgatgtctataaaataaaatgaaaaggaatttattctcattccacttttttatttttttcatcattatttataaatcccttgtttaattgaatatccaattattgaaaagaaatgctaaaggaacctgttattttttcttcacaggtaattcaattaaaagtagctagttgtcagtgatgacttttacactaggggttagttaaaatttattctttggttgtaaagagtcaagtttataaatagacttgactgatatcattcttttaatccctcatgtaacacaattgctaagattaataaaatgctgtaagagcttcaagaattactttgtgttaaaacaccattgaagtgcttgtgtgtgttcaatttctgtgagtgcaattctctgcagtgtgtgtacttactctagagtatgttattgagagtgttccccgtgatcgagatcatggcattatcaacaattggtatcaaagaaacactgtttgaaggtgaatcttaaactttggcggaaggtcttcatctgaagttaaaagattcaagagtctgattgagcagcagaaaggattgggaaatgccaagtatgatcttgagaagtttacaggaaagaatgactgtggtttgtggagtgtcaagattacaacccttttggtttaacaggggttggaatcgaccatcctaggagacgaaaacttacctgaatgattgtctgaaaaagagaagactgaaattcttgataaagcacatagtgctataatgttgagtctaggggataaatttcttagagaaatctcaaaagaaagtacgactattggagtttaggccaaattagagagtccatacatgacaaaatctttggaaaacatgttatttctgaaataaaagttgtactctttaaaaatggtgccggggaaggatgttgaagatcacttagatgatttcaacaaggtgatcctagatttagaaaacattatgatcaaagtagaagatgaggactaggccatcatagttctaaattctcttcccatagagaagtatgaaaattttgtggataccatgatttatggtaaggattctttgacattagagaaagttcattcaacactaatgtctaaagtgatcaagagaaagtcagagatgaaggaggaaagcactgtaaatggtttgctggttagaagaaaacacttcaagaaggtgaacaaaggacaaaactcaacaggaaatgggaaacctggatcgaaattcaaaggaagatgctacatttataattctttcaatcatctcagaaaatattgtccaatcttaaaagactacaatctgaagaaaagtggaaatacagacattgtatcaaacagagaagatagtggttatgacagtgctagtgtaatggtggtatccaagacaagtattcaacaaagctaggttcttgatttagagtgctcttttcacattttccttgatcaagatcagttctgttcttatcaaaaaattataggtggagttgtcgaactgggagataacaggtattgcaagatgattggggttggctcaataagattgaaaattgataatggaagaattactaaacttgataaagttaggcatgtacttgagatcaaaagaaatttgatatcaatattaatgttggatcaagatggttgtgtggtcagagtagaaaaaggcaaactgagagtaattaggggagacaagaccattatagaatggtcaatagtaaatggaatttatgtcctgcaagaaaatacattaaaagatcaagaaaatgtagtgtcaagagatgcagtacacaaaaccatagtctagcatagaagacttggtcacataagctatagaggactcaaggttctcataaaaaatgttgtatttgaaaaggatcagatacaagagataagcttctgtgaacaatgtattcttgtgaggcaactagagcaaagtttggagttggaatccacaggtccaagggaattctagactacttacattgagacctatagggcccttctagaactatgtctcgaggtggaccaaggtgttttctgtctattatagacgattattctagacatctttggatattcatcatgaaaaataagaataactctcttagtaagttcaaggaattaaaaactatgctagaaaattaatctaaaagaaagataaagaagttaaggtttgacaatggtttgcaattttgtgctgatgaattcaacctattttgcaagtccagtggtattgctaaacataagtcggtaccaagaacatccgagtgaaatggtttagtagaaacgatgaatagaaccatccttgaaagggttagatgtatgataattctatcacgaatgccaaagaacttttgggcaaaagcattggttacaccatgctacctcataaatagatgcctttcatcagtaatggattcaaaactctaattggtcaggacacaattcagggtatgagcacctaagagtatttggatgtgtggcttatgcacacataaagtagggaaaatttgaacctagagcaaataaatatatttttctaggatatccaaagggtgtcaaggctacaggttgtgaggcattgagccaaaagaatatcaaaaatattttgtgagaaagggttggaatttttaagaaaataaatactacaaggacacagtaaagaatagctcagaggatgaaggcactcatacggaagaagatttacagtttcatgtggagatgcaagatcaaaacaaccaaaaaggtactactaatccagaaatagcttctaatgaagatgaggtagaaaatgaagaagaagaggaagtggagctagaagatgatgctcaggactatacgttggtaagagatagatgaaccaatgttctatgaagaagccataagttttaataatgcaactaagtggaatcaagcaatgcaagatgaagtcaattttatgaagaaaaataagacttggattttggttagaaatgattgaaatgggagagttattagttgtaaatgggtctatagacacaaggagggaattcctgggattaaggagccaatgttcaaagctagattgttggtaagaggattcacacagagagaaatgattggttacaatgagttctattctcctatggtgaaacacacataaattaggatgttactcattttaattgcaactgaagacaaaaaaacttaaatagttgaatgtcaaaatagcatttttgcatggggatttaaaagagaagatcctaatgaaacaacccagaggctttgaggaaaagggaaaagaagatcatgtttgtttgcttaaaaaatctctctatggattaaaatagtcaccaaggcagtggtacacgagatttcatgagtttgtcattaacacttgtttcaaaagaagcaagtatgacaactgtgtatacatcaaaaacttaagctcagttgtctacctcttgctttatgtagatgacatgttaattgttagcaagaatccagaagagatcaacaatgttaatagactgctgagtagagaattcaaaatgaaggatcttgcttaagctagaagaattttggggattgaaatcactagagacagagccaaaagaacattaatgttgactcagcaactacataacaaagatcttagataggtttagtttctcagactccagacctttttcaacacaaacaacacaacaatttatattgtctaggtcacaggcccctaacattgatgaggaaattaaacatatggaaaagatatttttcggggtttttaccctaaataaaacccatttcaatataatcaaatttactagttaataaggatcagaaaacccatttcaatataatgaaatttactagttaataaagatcagaaatcgtattctatgttgcatggttcacatgatttattttatgattatgtttaatgtataaatt

SEQ ID NO: 378374 - DNA, 4600 bp, Cannabis indica
taagccgagagcatatcatcttcgaaatatacttgtaaaccgtattgcaacaagctataggtctatagtcctttgctgtgttcggatctgacaccttaggaattaaggagatcaccgtttcattcagttcatttggcagatacccagtgtcaaagaaatctaaaatagccttcgagacttcattccctatctcactccacaagtccttgaagaagcttgatccaaaaccgtccaaccccgggcttttggaagaatggatactaaacattgctttcttaacatcccccatagagaaaggccggattagcctaacttgttgttccacattcaagcgattcccctgtttaatgcaatcctcctcaataatggttgaggcagagctcttactacccatgaacttctcaaagtggctaacaaagtggattcaaatattttttaccaaagcctcatatggatgaaagttcagggcatgatttagtatatggaaaatcgtcgcgttagtaaaattgaatggaatatgacaggcgtttttgaatccaataatttcaatagtttggaaaattttttaactgcttgaaaaatttggtgacataatttagggacaaaaatcctaattaactttgacagtgataaacgactgtagagctgctcggccattttctggaagatatttaaaaaatgtgctttcattatatatttgaggtcttgttaggaatttgttttaaatctagattttggttctgaatacagtcaaatgcttctaactaatttagaacctttctgattttcaggtgaggcgacatttgggcaaaactttttatttctaaaaaataatgtcacgttagcacatttggtcaaaactttttattttaaacttgcaactgagctgaatcaatacatagttgttgattttaaaatctgtcacaaaaattgttagcacatttcattactcatatgataatagttctatctaaattagttgctcaagtataataaattagttccaaatatataagaaattgaccagctatttgtgctaatttatttaaatcttagaagaaaaatcaaattttaaaataaaaatattttcttttcaaaaaattatattaagacatttgaaattgaataatattttcttagaaagtgatttttccctactattttttctttggtaaaaggtgtttgtagtaaaagacgtaggtagtttgatgagaacaacactaaattactttttttttttcccttttctgatgaaagacaacattatctaactaaatacatagtattaacatgtaatgatattgtgtgtacgtggaaaatgttggaccaagtgaccccaaactctttggaagagaagttacaagaaccaaccaactaaaccaaaccaaaatccaagtatgacaatggcaatggcactcacttctcactctccaccatctctccaaatcccaagctctataatttctctttcatcaatgtcctattccttatcaagaaaacatatacgattctgggaaaagtccccatttggtagtggcggtaatgaagatcatctcactctgctcaagttgtattgcccaaaaactacgactcattctcataaattcaaatgcttctcccaagacccatctcagtccgaatcccaacaacttcaatttgagaggctcttttctaatctcaaccaagtcaccttcaaaagagaacctggttactctctttcccactcttattattactattgttcttatttttggttcagttctaatgttactggttttctttttttgggcaggaagtttatcgagtgcaatatttcttgtagctggtactacggtaaacaattaatgtatatatatagatacgtatatatatataataggatgtgtcatttgaagcaaaaatttctgtaatgcttgtaagaaactttctttaaagtctgcagcatttccacattccattagagtcccacattaataatgtttagaaatttagtaccatatataagatgcatagtctattcctctcttatataattgtttttcatttttggtttggttgatacaatgtagattttggagggtagttttggttaagtgctacacttttttcccctgttttatatgtttttcttttaatggctattaaatcttatataggtaggtgctgggatccttgcacttcctgctgtgactcaagaatcagggtttctggcctctgccatgacatgcattttcagttgggtttatatggtaatgccaccaagaccaagcttctcttatttttagatatttttcctgttgccaacattttctttagactgatagttgagaacccaagcagaaatacaatagggaaaatgaagatttctattgctgacaaagtaatacaatacaagtagaaaggacagcccaggttcttccaatcagccaaaccattctcctaggctatatgatcctatgaattgtgtcaacccatgtaaacttatccattgataatcttactaaacactgttgcttatttgctttaaaacaagagcagttttgatatcactatacatcctaccattactatacttttattgtctataagtttgagtgtacattgaagtttgctagtgttatcaaaatgctacaggttgttacagggttgttaattgctgaagtaaatgttaacactatgtgcgaactgggttctggaggtgtatccttagtaagttttcatccttttgttcaaatatgtgtgtgcaaatagaaaatggttgctcaaataaatagagcaaatgttctctttttcataagcaagtatgtgagactaagatggaatgagaagtgtttattatcccacgtatctgttggatgggtggaattttataagattaataattcaaagtaaaattataactagaacacaccttaaagtatgtttgtataaaatgggatggagtgttatcttatgagctcgttgggctaatggagtataaattaacaattggatatatataaaaaaaagagacaatgcaatggaattatagttttagtgtcaatagtagctacttttgatttttcatcctatcaaatgcttacttcatatgtggtttgtgtcaataattattgctgacatccggcttctgaaaaatcatatattttagttagttacaatatttatttgttattaaagggttcatgaatagaattatcaattttgtttctattttgattatgaattcaggtatcgatggccatgagaactctggggaaagcaggagtacaagttgtttggtagattgatttcgcaaaaactttttatacatttaatagctggttattgaatcataagtttttcctcaagtatgtctatatatatttaaataaaacaaaaccagaagagacctcattaaattctgctgattggttgagttatgttctgttattagtaggaacaataatagatgaataattagttgagttggataccaatgtaggagtttctgtataaaggaaaagacgatgatgataattcctctgtaacataacagatttttttaacagaaaacatcttgcaaaaattttccctaaatcctaatattactaattgatagttactatgaagtaatttctttttatattacatcacatgtttgatggttatcctttttttattgttgcagttggtcgtacattttcatacactatgctctccttgttgcctatgtctcccgttcttcaaatattttgacaaattatctccatattccacagtacatactatgatatctcttcctagttacccttcgaaaaagaaaaacaaaattttcctttgtagctttctgtgtaggttctttaatgtcaattcaagtgtattctgtgtgtgtcttaggtgttgatggcagcattatggttgcagatgggaaagtgcagccttgttttctttggtccttggaggcatatgctaccttggaaggttggttttgccttctttgaattattagtgtatatctatttatttttgttgaatgtgtgttctttgatttcttttcttatgctttgtatagcaaataatagttagtcttgttccatttaaaataataacaagacttttttctttccccttcaatcctgagtgttattactcatcttttgagaaaaaaatcttggtactgtttaacttgtttgtttggataaaattataaccaaattaaatagtagaattgtgagaattacttaatgagagattcatgttttttcagaaacaatttaagtatatttaggatatttcaaaagtttaagcctgcttgaacaagcgacttgagcttcttaatctttttttatgcatagaagttgttttattgccgggaagcaaggagacaacttttatagttgttaaagagtctcgtattgataatgtgtagtgtagaaaatagtgaatcgaattatatgtgtatttcatagaatagtacatatttatatacaaagctaggagactaggaaataggaaactaccaacaaaataggaaactactaaatacaagttaccctaattcttttacacctaatatacagctaatactctaacactccccctcaagctggagcatagatgt

SEQ ID NO: 378375 - DNA, 2328 bp, Cannabis indica
gaagtaatttagaagatggtgacatagacaccccagctgcgcttgagaagcaagaaattaaggttgaagctcctggaactagtgtgaccgagagtgttcaggacatagttcttgaaggtggtcaccatgtaagtacaactattttctcttgaaaaaacaagatatatatatatatatatacatatatataggcttaaatcttaaataatgccaatttgacaggttgtgagcgatgttgtattgactataaatcaagcaatgggacctgtggagaagggagtaacgaagatccaagagaccttccaccacagatcagatgactccggagaagaagaagagacagagttaaaaattgaggaacatgttgaagaggattagactcaagattatacaagtgttgaaccagtgtcacgaagcctcattttcatttacattacacatctctattacaagtgtaaaaactatttgtaacaataaaataatctgttcggactgaattttctattcgttatcggcacagcataatgaacaacattcaaggcagccaaatattgccagtgcggtacatatctgggctagtacgattgcgcattggtcgttcatcctggaacaacattggatgcagcacatgcagcagcagtgtctaaagatgttgccgcaacaactcgaagctgccttcacgaacatttccgcaacttcaggaagttttgcttcttcacatcctggaggaacgttttcagccgttgcagtcaagtttccaaagccaatacatagacttggcattggtatcaccttctgtttttcagcagctgccttttttgggggtaggcttttctttggtacctgcttgttttttgtatttttgagatggttgggttcattagaaaaagaaaatcaatggtttataacaataataacattgataatagaaattgtaacaaatttattgcatttggtggaaaaccacatagcagtacaaaaaactataattagatattattttgtatagtgtaacaatagttatatgagtacctgttgtagtccatcttgaattttcttccctattgtctcaagtacaatcatccgagtatactcagatactaccccagtttgtatgctcattttggaaatctgtcaaataagaggaacagtatttattttacaggaaatagtgaacttttaaaagcatttcatgccaagtcttctacacacgataaagtaatattgttggtcatgtagatgtggaattagaaaaaaaaatatgacttaaatgttgtaacatcatcaaattattagcaattttttattttttacgtctttacgggttattgttaggatcaagcaacaaaccttatcctcgagttctttattttctgtaaaccatgcccgagcagtaagctgatcaatctgttcttttgcaaatatctattatgaccaaaacaaaacaccaaattactaaacaacgacaattagaaactaaaatatgaaaaaggtggctaaatattagatgccttaccttgttaagtggtacgtcctttgcattatgtattttcaaatctattacaaaactattcaaaccggccaagacacctttagctttacaagagttggggaattttccttgatatctgccaaatacaactagtggatcctcagacgaaaggtctggtattcgagtaggaaacacctaacaaagtgatcgaagggagccagtttttagtcaatatagaacacacagcaggtaagcaagaaccactaaaaagatgtagtgaaacataaacatttgaacaggttgaagcatgatttcgtttttatttaccatggataaaaaaatggaaaatgaaggtcagaatacatacctcaacttcaccaagactatccaatgcgtcaaatgttacatttgaaagaagcaaagatgaagctctagtaaataatttttgtaatcgagcttccaccaaatctgtcagtcaggaaagataatcagcacataaccaaattcggacagatccccggtcttcacttaagaaaaccaacaatcaaagcaacaagcttcatggataattagctttgaaaatgcaccatttgaagtcctgattctttaattcagaacactttaggctttgttcagaactcaattttttcaagaaagtctttggtgagaaaaaatctataagagactttattaaatgttctaatttttataaaattacattgaacttaactctcgaactttctcataacttacttctcgctaaaatccaaatcctaacgagaggtaaaagtttctaagcttactctacatagttaaaaaaagctaaatatagatat

SEQ ID NO: 378376 - DNA, 5672 bp, Cannabis indica
aaattttacacctaacacttgaagactgtatacactaattaatctttcttgttttcttactgttatatttctcgtcttcaattatacaaaataaattgaagagggataaattttcaaagatctctggcttcatatgttgttcctaaaatatgtcatttgcttagattttttttttgaattaaaaaggattttttcctttgaattatgactcttgtggcttgtagagttttggcccttattttttttttgtccccctgcaaatatccccattcaattatattctgctcttttttttacaaaaaaaaaaaacaatttgcttattaggccttgagttacttgcagcatgagagtctatttaactactttaagttatttgaaatttagttcattatcgttaacacataaaaacattttctttaagaatgcatgtgcatattcgcataattcatcattaggctgttatttatatatttatttttttgtctgaatttttgaattgagccagatttacaggttagtaatagatcaacaaattgtctgaaataatgagcagaatataactagaggggatatttacaatgatattatttcaaaaattatagtctttgatattgtttcgaaaggtttgacttacaacggtctcttagacatgggccaagcaatttatgaccctttcatcaatggttgccagtgattcactgtaaatggtaacatgtctaccatttgatcagtggttgccaatgattcatttttcaggcttcaatctcagttatgattattattataaatgagtgatgtcaattgggttattgttttgaagttttgtacagggcaggcctcaaaattttataaaaagccaagcttctatgtattttcttgtctaccaaacacaaatatatgatatactcgttaagcatggttttggttgaaatttccagggaccatgagaggcagtgagaagccgagttgggctgtctcgccttctaatgctggttaccactttggtactagtggactttcggtagcagttgcaacaggaataactcatcctcttgatgtacttaaagttaggctgcagatgcaacttgttggtcagaaaggtcctttggctggaatggtaatcttcattgattttaatgaatgcatcatgatatgatttatcagagtatactcatgaaaaaaaatcatatacaggggcaattatttgttggagtattaaaaactgaaggtcctaaatctttgtatctgggattaacacctgcattgacaaggtcagttctgtatggtggtctacgcttaggcttgtatgaaccctcaaagtatgcttgtaattgggcttttggatctaacaatatctttcttaagattgcatctggcgggtttgctggtgcctttgcaactgctgtgacaaatccaattgaggttttgaaggttcgattgcagatgaatccaaatatgagaaatagaggaccgatagaagaattgcgcagaattgtttcccaagaaggaataatagcactttggaagggggttggccctgcaatggccagagctgctgctttgactgcctcacaactggcaacatatgatgaaaccaagcggatcctgattagtttggcatcatttgaagaaggatttcatttgcatctcatctcgagtgttgttgcaggcacagtcagcaccttcattactgcacccatggacatggtgaaaacccgcctcatgttgcaacgagaatctaaaagagttggtaactataagaatggatttcattgtgcataccaggtcattcgtacagaaggccccaaagccctttacaaggggggttttgcaattttcgcaagattaggtcctcaaactacaatcacatttatactctgcgagaaactacgccaacttgctgggttgaaagcaatctagtacacaaatatttgaattaaattttgcaatggttacaattttggcgttagaatagaagaggggctcaactcaattatttgttcatttatagttttccattttatcctttttccacattcttttcctcaaatctgtaatctgtatccaatgaaatatttaataggaaagaaaccccgttattggtttctgtttttgttttatataatggatgaagttatgatattctactgctttctttttctggtaaaaaaaaacattgttttgaagttttcggtttcagatgacaatctttttaggctatattatactctccagattatgctggttaattagctgaattcataattatgtgattttttcatcttgacaggtgaagttgtgactttacctgatatctcaaagggcaaatggatcttgaagccaaaagctttggacatggtaataggctattctgattatctgatagtttattgtacttgtgtttggtggatttacaattttgaagtaattggtacttgacttatggtccaaacattgaagggtgtgagtttatttgtttgtccaagtttttgtttttgttcttgttgtagttcttcttcttcttgcgtggtgtgggaatgccatttgtgtttgaagtccttatgaatggaggcagttatgtactgtcaatatatctgtattatttataaatatatgcttattgtgtcactgatcagatctctatgtttggagtctttcatggggtttaaacacagtgatataaaaaactgagctgtatacaaacccatttgatcgtgaaatgatcatctggataagtccttggaaggaacttgctcaaacatacgcaattttaatgcttaaatagtaggacgattctattccttaaatttaggatttaaattatggctctgaaatatcattgccatattttctttcgttttattgtttatgctaagatcgaaatggttggaacttggagagctaaattaaacaagtttcatcttgaaccggcttctattatctgctgtgttattgaacattgtcaattatcttgaaccaggtgtaatagtgttaattaaaattatggtactttataaaatctttgaatgattgtcaggtctgcgagaacttggcggtgctgttgatctcataaatcagtacaaacttatgcctcattacgaacttttttgtagaaggtcaattccttcatcaatatctgagacacactatctacatagtgtggttggaaaccttaaaatctgtaaaggggaagggatggagttggaacagctctttcaagatggcaaatttttgcgaaaaagtgatgcatgtattcgtccttttaatctgaatgccttagatgatgcctttcatatgagggatgccacttcagttaacctttctcttgtaagatttatgaattctgtatgtggttttatacttgctattttagtgtatgataattgaaacttattgtaatgttcataggcagagaaagggattcctactactgtggcaaaggttaagagtaagttggaagaaaaggtgacgaaacgcaaaaggctcgatagcaaggataaaacaactaaggagtgtaagaagcagaaatccttacataagaataaaacttttcagaagggaaagaatagcaacttttctagtggctctaatcttgaggacttgaagaaacaaggagaaaaggtatgtaccttttgttgttctttcatattgacttacattctactgaaccttaaccatataatatagggtaaataccattttttattctgtttttgtaaaaattactaattagactctctgttttgttaaatgacaaaatgaacttatattttctaaaatggtaaaaatagaaccttgaacttaatttttaacaatttcattttttaatataatcaactttaagaaaatttctaatacgaaaaatgtaaccaattttatcataacatccctagattagattattattaagttttattttgataaaaaattagtcaggatcctatttgtacaattttagaaaatacaatgtccattttgtcatttaacaaaatataggattcaattaataacttttgcaaaacataaagtccaaaatggtatttaccctataatatatttttggattaaaataacattctttagtccctaatgaaataggcaagggccattcctatatctctagggatatcaaaagtgtaaaaatacaaacaacttattaattgattcatattcattgagtacaactaaaatacctcttagtttaaataatggagaaatttcatttgacatattcatagcaaattaatactatcatcattatatatggtctagttcatcttatatttctttggagataaatatcaagtaattgttttatcataatgtattgaaattgaattccttacttgatatattgatttattattggagctgattttcatcacacttaaatgtagagaggtggacagagagactactggagtcatttgagataaaagttggttcttgttctttaattcgttaaaagagacccattttttttttctttcttttgtctttgtaatcactaatcttttacgtcaaaatttatttccctagtatgccggttttaatatttatttttttccctcatcacttttttttttttttaaggcaacactgcttaaaaattgagaaatgccacttaaatatgtcatattacttctggtgtaattaagtattgaatctcatataatttaatttaatgacttatgaaataattattaaccatttatatagtgccacctataaacagtgttagataccattagtgactaataacaatgctctaaaaacttacaactcaacaagcaaaaaacaaaactcgctaactcatgagctactctattagttgcacgaaaagaaaagaatgaaacaatctcaaagagttggaaaattattatacaactctctaatggactcaatcagcacctgccaattagtgtacaactcttctcccaacccgaaggcattcaacacgacagcacagttggaggtaacaaataaagaaggcaattgtgggaaaccatcaagttcgatggccatttgcactgccaaaactttagccatttaaatagagaagagccctgacttgtacttggtttgagcagcaatcacaaccctttgaaaatcatgggcaaccacactcgaatcacaacccaccaaactcgaaccaatgaaagcatcacagttcagcaaaccaataccagcagtaggagggggaagccaattagctttgagcacaaggcgaactaatgtctcacgattacgcccaccaccactattagagagcgccaaatgaataagttgatcattgtttttaatgtacaacttgtcagaactcgaaatctgatacctttaacaacagtagaggatacaacttgctatgctttcaaatagtatttttatcactagctttttatgaagttattatttattatatgtgtgtttgtgattagaattgattgtaatttagattaattattgggtttgatttgtttgttaaataataatcatgtaattggatgtaatttaaggattttatttactctaattttgacgactttcatgagatttggatgtaaatataaaatattactatttgtagacaatttattattattattattagggtaaatagtgacataagtactcaaagtttaaagtttgtaagcagcataaacccaatgttt

SEQ ID NO: 378377 - DNA, 4279 bp, Cannabis indica
tatcatggtcagtgaagggttttcaactcttgatttttgagaaagaagcaaagattcaagttgttctaccgagtaaactcatctcagcttcagatgaaatcattggtgccatccatcaagaaaatgcatcatattttgaccaagaactgctgcagtattttgctgtttctagagaagatgattgtcattgttgaatttgagtgaaggagaacgattgaacagaaccatactagtattgttgaagttagaagagtagtgacagtagccatggtgcttggaaaactttgttggggcttgttgccaaagctgaaggagtagcttgagtttcttgatagttggtttctgataccatattagcagagaatatttgacggaaagaattgcagttgctttgtattatcgttgataatagacagatgagtcgattgatacatgtacaatcacaagtaacccgtggtaactaacagtttaaacaaccttaactaatcttcctactaatctagtttatctttaataggaccaaatttcccttcgcttctccaaaatttatagatttttctccaaggagtccatctcagtaaagttggtatataacgctttaagtgttgatgctactgtataatctcaatatagatgtcaattgtgaacgtatctttgtggctgccaggtttcagaatttgggtgaaatgatgactctagggagaaacgacgctgcactttctccaagtttcattgaggggctaactctagagggccctattggacataccggtaaagttctgtaaaatgcacccttttggttatgttttttctcatttatatttggtaaaacctaccattataaaaatagactagcatctatttagttatgaaaagatttagtcccaacatggatcagttatgaataggaatactgtaatacatttttaagtatcatactaagaaaatgcacagacaatttactaatgtagtaataattatatatatatatagagtcagatttattgtttatgagataaaaatataattaaaacatattgattttttcaataactctaaaatttaaaccaggatgtcaaaaatctttatatacatattttttaaacaataattattagggattttgagtgttttgattttttttttttttaaccaatacttcatttcagttataacttctccattaatgtatacatgtaatgtatttacgatttgttgttcctttccacagcaaggaaaattgcatacttgattagattgccgaccgatgagcataggcttaaagttgggatgagctggctcacaaagtctgctatagaatccattacatctgtgcaaagcactctatctaaggtactctcgagctcgtgattcaattcattttggaatgtaaagaaacatatatatataagtgtattttgtggttgtaaagttgtgacactgatagttttgcgtctgtctactcatgtatcagttgaatttagtgcctcttaaacctaaggttttttttttcataaatagatatttgttatggttgttttacagatatgagtaataacttttggtatccttttctgctctatctcaattgatccattctctatcaaatacaaatatatttattgatgaatacatttatgtatgcaattactatttagtactgctactggttgaccactattattgtagtacaattatccgtaatatgatatataacactccctcttagaattgttgtgatgaaaactaacatgcaagtattgttttgcaagtataaactcacttgtgtaagattgttccacaagaattgtaattaaataccaagtagttgaatttatatttttatttggcaaacaaaaatttgttgtgaaactaatttaagcaagaataaaataactagcaaatagcaagatttaattaagagatgaaaatagggaaaataatttcaattacttcaattatctatttcaataatgcaaaataattctacttttaaaaaaaaaaactatgttcagacatgtacgttttaaattgtaaggtaaaattctgcatttatgagctatttcgtacacaattcgcattaagcaataatgtcaagtcatacaaatattttcattttgtatcaaaacttgtgtttattttgttgactaagaatttagtcaacttacggcggaactttatttattgttgataatcaccacgtgtaaataataataacaaataataaaagcgacatgggaatttatggtttgacccatttgattagcgggtaatgatctactttctttttaattgtattgattcttgagataataccacacagattagaggtttgaaccttataatatctagctgtgactctattcaatattaaaatagtgagaaattgagtgttaaggattgagaataagtgagactttgtgaagaatttagactaagtgtctagtgagtgaataagggggcataagagaggggagctatgggcgtgagagacttaaagtccatgtccttttctatcttgtctaatgccctttatatagtacagggctcacaaagatcatcattcaaacaagtaaatattcctttaaaataggaaaaataacctctttctaccttatatttaaattaaaaaaaaaaaagtaatatccctaaagaataggttgatactagtttgtggaagaatccctatcttcatgggtagttaaggttgtttcgtaattaaaatttagcttacggaccacatcattaatccagcctctctttgaggctatctacacatgctggtcgcccaactctatttttagggcctagccggcacataggactttattggccagccagggtgtggttcggctagggttctctggctggccattttctccttgcttgatcgccttagaacccttgacaattgacatttcgtgcaaggtgactttgttcggttgttgacagcccgtatgccacacggttttagttttgtctatgtggacatgccacgtcaggtgggcaaaaattgagataacatattcaattagagcattttcaagatttatttttcaaattttatattaaaatcataaatataaaagatggcaatctaaaacatgtaataagtacaaataagaataaatcacacatcaatagaagacactagaatagcataaatctacagatattcttaaacaatctccattagcaacttcatagctgaatcaaaaacaaacaaactagtttgggattgtcacgatttctccaacggttgctctaatcttatttttctaggttttgagaagtccgaatgcctccaatttgtgattctccctgactactacaaagaccaagtgattccccttctaaaatgacaaaaatacccgtaaaattttgatgcatagagacaattgtgttctggcgccagtgtatttgggaattttttgaagttcctgtaaagggtctcaccgcatgtcgcgatccaaattggatttcaaaaatgctcatctcctttgtgaatgagcttgtcgcggccataaaaatgtcagtgtcatggctcagtgggttgtgttgcagatctaatttaatttttgctatactttgtcttaatttacttggtttagcacattctcaccacattcttctccatttgttaaaataaagtgtataaacctgaaattaataaaaactcgcataattctgtatcaaaacatggaaatgtaaagaagagatcaaaacacataaaaagataggctaaatttagcctaacaagtatactcaatttgtttattatcaatactcattaaaaaaatcttactaggtaaaacctaatgggaaaaaaaccttagtaaagaaaaaagagtacaattgaataaattctcccacaatgacattaccagtaacttctcacaaattttacagatgacacattatataaaatcctcattggcatatttgataatcttgccaaaattatgattgtaaattcaaaatatattatgtatggtatgtttgaaaattagttgttacttgttttagtgttaaatgtttttaaaattagaatattctatttatgtaaataaataaattaacttttctataatactttgatatttatatttatggaaaaattctagtttgaattggttgacttaaaattttgttaagaaatcgtgtacaatgtatatattgtttctttatttatttaaggaagttggaattaaatttgggaaatttgattttctatacttaaaaaattaaaatattttattcttaaaccaatacattttaa

SEQ ID NO: 378378 - DNA, 4108 bp, Cannabis indica
agagagagagagagtctgaggaagtgagatttcaagaaagagagagatagtcagggagagaaaagagatagtggtgatggtggtggagccaattgtatgaagaagaagaagaatgaagaacaaatatggaataaaacgaggtgagaagaaaagaaagagaaaggagaaaagaaaagaaaaattaaattttaaattttatgattattttttatttttaaaactaatttattttttaattttatatattttttaatttaacataattttaaataactttgttatgtagacccgtgtaaatgtgtcgcgtgtacaagagtgtacacgttaaaatatcacgtacttacattttgagtggcatggaaatcaggtgttgacctagcactcggtctatcaagccacataggcaaataacagggttaaatgaacaaaatgagattttgctaattgtatcatggttttgggggatttttagttaaaatttgagttttgaggattgttattcgtgtttccaacaaaggacacgtggaatctaggtcagcatcaaaagcccaccagtgggtcccaaggaagacaatttgggccaaccccaagttatataggaccttttaggaacgtatcttagctccgtgatcaaatgatcttccgctagtgacaatttgtatttggaaaaagctctagtaccgtgatgccagaagagtcagatagcgggttcctagaagactagtttgtttccccttttatacaagcgcacgagaaagaaaataaatgctccccggatctcaacagaagatcgtatcatgctaaaagggaaaacttcataaacaaagatcaagcaattaattcacaattaattgcccacgatgataggacatggctttgactgactggacttcacaagatagcccaagttatgtaattcaatgtaaatagaagaaaaaagaaaaccaagtgtaattctcttaacattataaatacccaatgtatccttcaaattaagggttgaactctctgacaatattttcttagaaaacttgagaacctacgctcattgtattccttgagaattttctagcttaagttacacaataacattgactcgtggactaaggttcgttaatgccccaaccacataaaaaatgtttgtgttattcttactttttctctttcagtcttcagttctaattatttataattggttttctgaaaaatctcagtaaatattttggtgcttttattgagagttgaaggaagcagtgataccatctaaaggttacattcagtaatcatggtgctcacccaaaacaaatctagtcttcacttcattgatcctaatgctaaggcaggaaatgcagaagatcaaaacgaggtgaccaacagtcacaaagatcaagttggcaaagacacaaatctggatgctcttgtatttagagatgacgattcagaagaaaagatgttaatgacaatctcaaagagacctcaaaagatgatcctcaagacacgccgaatgatgattatcaagataaacatactaaaagtggtgctagaggaaaggacactcccgacgagtcaaatcttgtggtcgccatggcaaaaaagttccagttaactgaaagtagactatctcattaggatcagttcaacgagatactgctcgagaagatgacagaatagaagtcgtgatgacagccctaataaaagggaacactaatgtgaaaatacctccaacaattgatgctaccaaaagaactgattcaaaatatcttggaacctcaaatcctcgcaaggataaagggaaaatgataataggcgaaactttgaataaaattcttcaactaaacagcaaaagaagtctcaaattaatcaccaactcaacaaaaaaagaaagggaaccatgattcaaggtagggtgaccaaactaattttagaagaagagttgcacaaaaagataagactgatgtcggagtcaagaagtctgcttctaggaaggataagcataatcacaacaattccataagtcaaagcgatgatgtggatgagttgtatccaatctcagacgacaacaatggaagtctttccatgactgatcttcgaagaaaattaaaaagaaaaaaaaataaagcaagaacagaaaaagccaaaccccgtgggaacgatttgagaaatcatatcaatgatcgtgttcatagaaaagaatctttgagtgacaaaactcaatgcttaaaatgcaaattcaaagagttgatgaagctcatagagaagatctctagaaagcgaaatggtaattgtatcagattctaaagaagaagacacaaaatcatgtgtgaaaagaatcatagatgcaccactttcgaagcacttcaaaatgccacaaattgaattgtacgaaggcaggatggatcccagggaccacctttctaagtaaaattgcatgatgcaagtttctaaggccagtgatgatgcaaaatgtctttgcttttcactaactctaagcaagtccgcaaaagactgttggaagaggttatctccgggattgatccacaactggaggggtctacaagcaatgttaaaaagaaatttgtagcatcaaaggcctttgacctggaagctagttccctgacaagtgtcaaacagcaactaggggaaagcttgaagaagtacatccaatgtatgatggatgttgcggctaaaactaaggttactaatgatatgaagatggtggctttaacatcaggattaaccaaaggatccttgctatggggagatctccaacacaaaagagcaaatactttgactgatttcttgacgagagctcaaggattcataaagttagaagaagattatgcttaagcttatggggtagttccagcaccttccacatacataaaaatagcccaaacttcacaaatgactactgcattcattttccctctaggaactgcctttacaattcctaccatttacggaccaagtgcttccacgcagccagttgtacaggctagtttttccagacttggaggggtacaaaccgaatttagtgctgctcctgaacaaatgaaccaaaaagtggaatctctagagtccaatgtaagccaatcacggagcaaaaggagttcaaaaggtctaagccaaaatgattttatgaagaaacgaaagacccaagagttcagatattctgagtacacaagccttgtggatactcgagagaatgtttataaggcaacttgtaatatggtccattataagaagcctccgttgatgcacaagggaaaaagataaaaaagagatctaattaagaggtgtgaataacaaaatgatattgggcacaccaccaatgagtgtgactacgtaagggatgaaattgaaagattgattcgaaatgggcatttgtctaattgggtaagaatactagtcatttatcctagatacggggttgcccatggacaactttttattcctagacaacatggagtcattaatcctctttagggagtaggacatccacaagctcttggaattcaagctttcaacgtataaactcttcaaggagttaaaaatgctccgatagcaaggcatgttgtagctcctagtcctagaaatccatatcctcttggagcagcctagcttgtgctaaatggtcacgtaaccaccattttaggtggaccatacattttcggaagcactctaaatgcacaaaaaaggtacttgaatgagtttgatcaagatgaaacttgcaattggtacaatcacctgctcagcattctcatatgatgaatttgccaatgaatttcacagaagatgatgccaagcttgtgcattttcccacaatgaccctttagtgatataaggtcagattgaaaataaaagattttctagaattcgcctagataatggaagctctgtcaatatcattttcaaagatgccttcaaagccattggtcttgtggaagctaacttattaccttgtccaattcaactataaggcttcaatggagacacgccgatcccaatgggaaaatacaacttccaatgacaataaatggagaagtcactggaagcaatgcagtgtcttctttcaagataagaaactaagaagaaagccaagagaact

SEQ ID NO: 378379 - DNA, 5454 bp, Cannabis indica
ttgtacttttctagctacttttcatttttcatttttagcgtttcgttcttctttaagtagtttcactaactagtttgattttggtttttgttgtaacagaacttgtattttcaggtttcttcaaagcgtaagttcgttcactacttttttttttcttcttgcttactttagatttctaggttttgtttttgaatttaattttgtgggttattcttgcagaaagcacgcattcaaatttggctttttgagcagaaggacctaaggatcgaaggccgtatcattgtaagttctctctttatgcacttggtagtatcttttgtttttcataaacattgctattgaataacgaagtttatttctgttaattttagtgccaagatttctataagtcataggctgaaaagtgaatcaagtttcgattcttgctagactttaagtagacatgtagagcctagaaaaatatttcacaatttagtactcttggacagaaaaatatgccttgaatttaataacttctcgttgtgacttgtgcaaaatatttaacttagaaattgctatagttttctggttcccaaatattgtatggttaggcggggatcctagtttttttttttttttaatatttaacttactaggaaattgttttatggctagacatacattggaatgttagttatagtgtaggtagtttctttttgcactctgaaaattatgatgggcaacctaaaaactcgtcttgagcataatctatcatgcaattctcctgccattttatattctagactataaattattggtgactagttggttgtcaatgcatgatttatatattagtaaatggctgaaagcctgagagacatgttgcaattggcaagcaatgtaacttgtgattttggattttgtagtggttagagtgcctaattttagaaagattacgagaactttatacaacgagttcattttatttataggttatggtttccattgggaaagaagcacaatggtcattgataatttagacatatgagcttgtattagctcatcattaaaaggcaattaaaacaatttagatctgttttaccattactataggtggctcaactttgaggaagttaaattaagctttattttcgtttgttaatttttctacttactctaggtgacaggcagcttgacctttcaaattctcaagattgtcctttttgctgatggaattcctcggtgtatatctttaaatgatcgattagattagcaccaagtagattagaatcagtaacctgtctgttatttttgttaaaaaaaatgtctcttgtttatatgctgaaaatattatttccgtaccaaatgtagactgaagataaataaattgaatttttcctatatgatcaccatgtcaattttccaagccactttctctaattttagttgattttgtctgctgttgcaaatggaccttaaggctatgtttggtaggaaggagggagaataggatggatggagagcttagagaagatggggagtgggagggatggagaggatagttgatttcctttgtgttgtttggtattaggtgtggtgcggaaggatggagagaaaattaattagtaaaattacaaaattatcattttgaacataaatagttattactattaaaagggtaattattgtatttaacaaatttgattttgtatttttctacaatcctccaaaaattggaggaaataaattctctaatgtttggtagatctctcctctcattccttctctccatcttgccaaacaagagatttagtctctccttccatcactctccctccatctttctccatccacccatctctccctcctaccaaacatagggtaaaggaagttaattcaagcttggttgttatattttcaacttattgcaattggcagctttagttctttttgctttctggtttcccttttgtttgttctgtaaaatgatccatattagagtttgataagcaataagtagaattagtaacttctgttttagtaagcaaataattgcatatttcctagttcctacactgtcacaatttcatttatgcatgtcactctaaatttaattgaattagtatgaggaaaaatctcaatggggtttcttattggctttgaattcttgattgtaaattaataattaagactgttatttgcattatgaagtcatcatatgtttcatattctgtaagactcttcctaatattgaaattgaaataatgcattctttattgttttgtactagcatatgcttaatattcctatagtaaataaaatcatgataaggtggattatcaagcaagaattaaaatgttttttcccccttagtcatacataactattctaatcaaacttctatagatgtctgattaactgagtaagtctcaagtataatttggctcatgtctatctcatgtatttttttagatacttcttgtaaatatttgtagtacccttgtgcaaaactttcaaatgatgatctttagagtctttcatttgtggtattagtagggttttgatgagtacatgaatttggttctggatgatgctgaagaagtcaacgtcaagaagaaaagcagcaagacacttgggatgcatttttaatttgttgtccaatgctcttgtgctggttgatatgcgtaggtctgataaattcttttttcttttatcttcagggaggatactattgaaaggagacaacataactctgatgatgaattcgtaagtggacataaaaacagcttatatttgttgtagatactatttaaatctttccttctctcttattggcagtttctttatttttcaggggaaaatgatgatcgtgtcaccgattaaattgatttgggccgccttacattgttgttcccgtagcatgtatgttgagttatatttacagtcactacttcggctgcttggtttaagtacattttggatagcatgtaggagaactcattattgaatgttgattttatgtgcctataagtagataaattgttgcattcacttctcttaattagtatctgctatgctctgattttcatgtttgtgaaatttagtcatctcattcttctcctatgcctgaactatgatgttctagactgaatcatatcccttcataagttcataaccatttcaaacacctctctcttacaaatcatttacatttacctctttgagttcttaaattttaatcacaagaggatgtgattaataatttttacgtctttacaaatgcttgctatattctgaacccaagttccatagagaatctttatatctagatgcaaaaaattggtggtagtaatggaaaagaacaaggagtaatttagttaaataagaatagaatgtatgtgttttgcaatggaatgttataccaatgagttttattctgtctttacactagaagtggcttaccttaaactgtttaaatatatttattttagtccctaccaaaattagaatggaataccaatccacagtgaagttaggcagattaatttaaatgctgagaaagctcatgttatacatataaatacttttatgagtcaactttgggataggagagctagtggcaagtttgatattattgttgatgtcttagatagataaatatttatgtgaaaccatagcaattgcaatgtaactacacaagaggggcttgaaccttggggctcttctgatacagtatcatatcagaagtttctgttaagtgcttgtccaatgattcttcaacttagtttctctataacaaaaccaaaactaaaaatgatagtaaaaaagtaaaaaaaaaatggtggtggggttgagagaaattagtggaaaatgacagtttattctttttttatccactgctggcccccaagggaataggaagagagagagctctctactgtcttttgtgctattgaaatgagtcaaaaaagcaaaagagactgatgaaatgaaagcaacaaaagagagaaatttgagtatccaggtgaatgtgttttggattgttgctggtggagtttatagccaagccaagccagtagtagtagcagtagtagtagtattactattagtactactagtagggttgtaatatggtggtccttattgacaggtgtcatatggtagtttatagtgagtgtactgggtttgtgccatgtgtccacccaaggggaagcaaagtgctcagaccccatttttgtattttcgtaaagaaaataaatcaatgttttgggtcactagtcactacccttataataggcagagccaggcttatactgattactgactcatcttccacaaacttaatattccatttaattacccctttgtcctctcattttcactctcttgctgtatattgcaatttgcttgtacttttctgagacattatttttttggtgaatggtgccaccaatattattgttctcacatagcctgggttgccctttagattctttcagttcacatttgatttaaaatatagttcttgaatcaattatttactttcaaagtagttaggttataaggctgtaaacctaatattgttatttaaggtcgattgattggaagagttggtgaataaactcacattgaaaatttatgattaagctaacttacccacaaaacatacctaagctttatttaatttgctatattactaggttaaagtagccacttgaaattgtttgtgtgctgtatttgtgttcaataatagaagagcctatattacccaaccaggtttagaccttactagagcataaaaaggggtctatctttaggtggggttacaaagatgtgactcgacaatggaaatatgatgtgtcttaatccttttgttgagattcattggacattttcttcatatgaaatataagccaaaattattatcattattacttacactagccaccaaaatcttatgctgtagaacagtattactaactcttttttttattattattcatttttattttttaatttcattcacccaagtggtatgtgatttttatctccatagtgggaaacatttttatgtattattcaacaatatcttagtagtattttagcaaataaaattgacatttcagtagctagttgctgttaaaaagtagtcactcacaaactccaatattatataacacttgggtatttcaaattcaattttatgttcactgaaaacataatttcctaactaaataattaagaaaaagtcgtacactagcaaagtagcaattaaaaccgagtagagacttgatgaccaaatcaataatctgaaatagcaacaaatttttcaagtgtggaaggtaattattacattagataaaattggcatgtatctatataacattattatttcaaatccacatctatatatatatacagatactattaggtagggccgacaaaacgggttagacatgataacacgattcaaaa

SEQ ID NO: 378380 - DNA, 2202 bp, Cannabis indica
tatttttgtaaatttcccaaaaggatgctacctcccacaagataaaaaggcacacgctttagaggaagctgcccaagcgttacgagcacatttattagagttcctagaaatccaaccaaccttagagcaaggacacggcaaagcttcatatatgcagtgatttgcattttgaagttttgtcacggcatattgtatattattattttttttacatatttaattaatatttatattattatatttataaaattaaaaatttatttttggaaaattttataatgcacatttttaaaattaatttacgaatctattcctatttatttcggcacccaacaaatttctttagtttattttttttatatatacttgtatgtttactagttattcaagacatcctttaaaattttgagaacttttgaaaaatttaatacgaaaaaaataatgtacttctttaaaagtggcggactgatatactcatatctgttttggtatttgagatacttatttagtcttttttttttatatagtcgtgtactttatagttatttaatacatcctacaaaattttgaaaaattttaaaaatttaacacgccgaaaataaaatcaaaactttatgtagcgtgattctttcatttagaggggtgcattgtaaaagcgctttataatatatttttttttttttgtaaatttacatgtgaataccttaaatttttttttttcaataattatttaagtaaaaatttattatatgtatatattttatttttttaagaaaattacacaataaaaataatacaaatttaaacacatattaaaattaaaattagacacactagatatcatattcttattaatcgagagtatacataccttatattacacaacaatattataaaattaaagtacaatcaatagtacataatataacaattgtggtgatttttcttaattaatatgatattaattttttttattttataaaaaaactaatataataatgaggaatatttttttagtgtaatttttggtgttgtgttggagtagaaatactttttaacgccaaatttagtgatactgttcaccaaatttaatgtgtacttggagatgctcttaggactaaagacccctaaaacaaagaacaaatttgagagatctgtatgcccccaaacactactaaactaagatcgacgaggtaattttcacttaaagaattagtgcactaaagaatcttcagcgtcatcataaatgatacagttaaattcaccctgtgtttttgcccacaagggagaatatccattccaactttccacagtaacaattttatctattctacaattagagccttctaaattttctgccataaatcatctctaaccccaaatcttggtttaagcaaagatctctaggcttgcttaactgagaatgacccatcaagagcatcgaaagatgaaaagatcctcacaccccaaagggagttactcaatagaagaaaaaagatttgccatctggggtgcgaaccaatctagaagatttatcataacaagcttactcgtttcattaaaagaaggaggaagacaactctcactaggcacttgtattcttagattgaaggcagccacctaatcctccaaagggagccaaggaacccatgcaaagatcataaatcaataacacgactcgtacctacaagccaacacccctcccttctggtaagatcatgagaggccaaaataccacatgccagaaaagatgcattattcggaaggttgaggttctaaataatgttctccttttgcaatactttgcccgaaacactttacaccaaagagtttggtccacctacccaacatccaacccaacttattaatcaaggccatattgaagtaactgaatttcgttatccgtaacccttcaaactctctcagtttacaaattgtgccccaacttgttaaagccaagtatctgttcttatctgaggcctcgatccaatagaattttctgatcactttatccaaataatcaaaaagagatttagggatcataaaagtttacatcgaataaataggggaactcatagcaacatacttaagtagattggtagtccctgcttgccataaaagtttgattgtccacccttcaagttgttggattttatgccctataacacggtagtgcaattgagtgggagcgctaacataaac

SEQ ID NO: 378381 - DNA, 1771 bp, Cannabis indica
aacaaatgcttcttttattatgttggaataagacgagggtagtctgatatgtgcctgataatggtacgatagttcctcattaaatgcatattttattatgtttgaaatggaacgattaatgtctgataggttcctgatagtggtattgtcctctttaaatgcttattttatgatgtttgaaattagacgtattgaggtacgattaaaccgatactaataaatacacagttcatgataaatacgttttttcatgagtagaaataaaagacaacattgttttcccccccaaaaaatacatagttcatgataagttttggtagaataaatctacaccccatccttacctaaacagcgacacgctgtcaccatttacattatcaaatggtaggtctagaatgcttgatatgctttattgcatacattcagcgatccccactacattagtaaataaacaacaatttagtaaattatggtcaatatttatggaaattttaattaagttacttagaaaacgttgtgtcataaaagcacaattattatctcgattttgtctatggtacgacctttttattagggagttcctaagcgaatgatagatgagctttttgctcttctaagagatggtatctggacacttgttctctctactccaaatatgcacatcattgacaataagtgggtgcatagaataaaactcaagacagatggtactttgataagttcaagtctaaaattgtagaccccaggtgttgattatgttgatactttcagcccagttttgaagtcagcaactgtttgaatggtcctcaggtatatcggcgtcctccaattgggatgttaagaaacttgatgtgagtaatacttttcttaatggcacactcaatgatacagtataaatgagacaaccttaaggttttatagatactgaaaaacctgatcatgtgtgccttcttcacaaagctttgtatgttcttaagcaagcccctcaggcctggaatgacaagctaaaacaaactctctgtgcatggggattttaagcctccaagtctgacacctccttattcatctttggtttatttacttgtttatgtagatgatatattggtcactggtccaaatagtgagcttatttcaaaacttattcaagatttgaataataatttctcttaaaagactaggggtctgttcattttttttgggagtggagattttcagagacaacactggaatgtatttaagttagagcaaatacattacatatgtccttgttaaactacacatggaaggctctaaaagttgtccaaatccaacaagcatcactgttaaactgagtctcaaagatggtgaaccttttgaggatgcaactttgtatagaagtatttttggagctttgcaatacttgtcacttactcgaccagatgtggcttttattatcaaaaatctcagccaattcattcatgctccaactgccactcattgggaagcctgtaaacgcttacttcgatatcttaaagggaatctatctaaaggattatggctcaagccatccgattctctaatattacatgattatagtgatgaggattgggctagctgcatagatgatcgacgatccacaggagaatatgttgtgtttttgggtgaaaacttagtacctggtctaccaagaaacaacaagctgtggccagatccagcacagaaagtgaattttgtgctcttgctaatgttgcagctgaaattcaattgttaactttcttgcttacagagttac

SEQ ID NO: 378382 - DNA, 4363 bp, Cannabis indica
aaaaaaatttaacacgccgataagattgttaattttgggcttctgaaggaacagataaggaagcatattcagagttgaggggttgtttcttatctggagcgggaaataaggtttcgcttaaaattgttatgcaagcattacctaattatgcttatggtttttttttttttccatttgagtatgtgtgatgagctagagcgtatgatgggtcgttttgggtcaaaatcttcattttttcaaggcaatcgtatatcttggataagctgtgagaggatgtgtttgcctaaggaacaatgtgtgttgggttttaggtgcttgcatgatttaacttagcattacttggtaaacatgtgtgacgtttttttgattcatccaagcactcttgttgggagactttatcaggctcgttacttccctaatagtatattttgactgttgagcttgggcgaaatcctagttttatttggagaactatttttgaagctatgacatgttagaacttgttttaccaggatcttgatttactaacaagtatgtttgattatataaattataatctaacatcttaaaatatgaaattcataaaacgataaataaacacataaaaggaatagaatcctcacattgattgtagcaaaaattagtgactccttccgtttaatcacacaaacccttgattctcgttctgtagcagggtattgcaaagtgatgaacctagattgctttttaaacctgatgagtgacaattctacacaatcttctacaaaaatatgagtactaccttaaatagcgtgagctagtactcaactcactaatggaacaaaattttatagagaatttgagacatgtagtaccaaattttactataaggaaaaagattttcttgaatcacttagaaaattagggttttctattttcgtgttcaggttaatggagttcttatgcaaagatttatcacttttttttatgtaggctctcagtagggttaggtttagattagatgggctaggaaaaatagaatgaaccttaaaatcaaagccttggccaaattacacataaggcccataaattttgatttttaccgttttgtttcttttaatgaaacaattgttctttttttccaatttcgccactaatctaatctaattatttgaataataatttttataattataaataattatcaagcaaaaatataatttaaatatatttatttattagactcacaaaatatcttagttaacaaataaactcttatttctcttttcttttcaaatttgcccaaatttagtgaaaattctcaataagacataatttatttttgaattttaattgaattattaaatcaattaattgagtctacgaggcagtattatcccagacaatgtgggggccatgagcctataagatcaacctcccaatactaagtaaatttcctaaatcattaattcttcctgactcaactatagatttggaatcacactctcgattacatagaacactttatgtaacaaatatacatatgttatgaattctatattgtttcaatataaataataaatgactctctacaaatgatttacatcaaatagggacaaaattactattttacccttctatgtattttatccttaaaacgcttaggtccttataaatgatatttctgtaaactaatataagtacttaaataagatctcttctatttatattgtttttttctcgattacggagattttattaatttctaggtgtattaaatataatatatatgaattattacgtttttcataatttatgctcggtaatagtgaaatatgatgatttggctattagtgtcacaatgatatgatagagtatcttataattagctaagcaagtgttatagacatttagaattttggaattacgtgggataatatttttagactattttacccctaggcattaagataacttaagtgtaaagtaaaagggtatattggttattttaccctaagatttataatagtgaattagtggaatttttagaattctttctaatcagttatatgttgattatttactttagaataaaataaatatgaagggataaattaagaatcaagagatcaaccttctctcactctttatctctttctctcaaatccaaccccaaggcccaaccaagttttaatcttcacagcaattttaagaagaattcatctaggattctaaggaattggttaggaagacaaccatagcttcttttttcttgatttttgaataaaataaacttgtttgaacttgctattttgagatatagcttctgtccgagcttaggatgtttagggattgttttctgggttaatttgaactatttgggttttttttggttggttttaagtgaatttcttgtgtgttgagcatgcttgagttttgaaactcaaatcttgctcaacaatagtgaaattcactaggactttgatgttataatttctggatgaattgtgtttacattgatgttattatgtgttctagaggttttgacctgaattggggttaagttgaacttgaagtagaggtttttctaatttctgtagaccaaatggtccacaatttcccaagaaacggtgaaccatttctggcaggaccctaggaaacgatccattgtttggggatccagttcaccggttgtggtattttttggggtgccttgatttttgcattttatcaatatttagggtattgatacattatttattgatagggaaatttctaattttgagtttaagtccacgaaagtgatttagcgagtcacttacaaattttacgtaaattgtgacttagggcctctaattgttgagcagcagtttactctcaggttgactgacacatttgaattcagaatcaaggtaagattagtataatgtatatacatgaatgcaagtttagtgtacatgtttagcgtaaatgttttatgattacctattagataacatattagtaagagcggtattggtgtacatagaattgcattagatactgacagatatatgttgggaaatttatcaagtatgaattgatgttatcacatctgtacgactagagtactgagtataggatgatattatagtcaaacatattgtcgttaagaatgttcaagactaatacgcgttggatgcgggttatagagtgtgattaggtgtatgagcgcctagttacagttcaattttatgtttatgttttatacattttttactgagtttgtcgactcacatattatttacatgtgtaggtaaaggcaaaacaaaggccgagcaatagtaagtttggagcttgttgaggattatacatatctggatggtaaagcctagagtgttccgtcttcaagacagtacgggctcatattatgttattcttcgagcgattcttttgtatatgcaatattttggttatggttgtaaaataaaatgggatcccgaaattatgtaatttttatgtatttagttttagttttcaaaagtttatacttatttgaaaattttaattaattatgtttttcaataaactctttgattagcaaatgagcgcacaataatgagaaaacagtgacttgcctaatctagtatggcgttacaatttggtattagagtcaccaggttatcttctaatgatcgttgagatatttacaatcatcatcagaggcaggctcgactcatggttctatatgcctttatgaattttaatagttttaattagttatgcatgattagaaaagcataaaaggaagcatgatagcagattaagagcatgttaagttctagcttgatcactgcctgactgacctgacttgtgatttcgcagacacgtcctatagaatggacacttataaaaacacaagaggttagggcaatatggtcgaggtcaatggcagtcagggagatcagaatccccttcatcctcgtggccacaacaaaggccgtggaaggacttatagaggtggtcataaaaatccatcacatgctccacaagattgagagtaaaggtttgtagaaatataagccaaaattcagcaacaagatgaggaaatttagaggttgaggcaataaggacctcctattgtacctccaccttaggtgccgattgctttagctctagtgttactagtagaatagtttgttattggtaaccgattggagccacttaatgagagattcacatagtagggacctgtagttatactaggaggccctagtgcgatgaaggtcgaacagtggctaaccaccataaacaaagttttgaattttatgggagtaactgacaatgctaaagtgacttgtgaaacttttcaattccaagaggatgccctggtatggtgggacat

SEQ ID NO: 378383 - DNA, 3732 bp, Cannabis indica
tatattttattcagtttttttattttggtgaatgttggttatttataatgttcttttcgcgaatatgtagtctaagactgtcggaaaagcaagctatgctgttaactttgctgggtacgatgaatatgtacccatggttgataaagccgttgatgctgggtggaagaagcagtcccttcaacgatcacaatcttgtaaaggttgtcaccatctgttagaatttgtttttcctagttcattattattatttgctgctgctttatgtgtatgtttatgtgtctgttttgcttgaaccaattgcttgtgcttcgtaagatattttgactgtaatctctccctgatgacctttgagtttcttgtcatgctaatttcataggttatcttatcaactaaatctagcaccataaacattaacaagaaaaaccatgagacttagaacaatgtcatataggttatcaacagggatcataaaaatattgaagctcctcatgagtgtttctgtgactttttgaggaaccaattattcagttgtgtaattggtggtagttgtaggagaggggagatattactaacataaagttggagagttgagtagttttcaacaattaagagagctgtctaaactgggtggacctggatgtatgggacatacaatttcgaagtgcttttcctctgttttttgattgcttgtttgacattttagctaaattgaatttataaatcttaatttaatttttaaatttctgatatctgtgtttaatttgtgggtcatgtttttactttttaactttgtgttctttcatatccctggtgactaaatcaagtgaaatttttgtttccaattcaggaaacctttcccaatctgatacaacaaaaacttcagaaggaattcgttctcacactataatcatgcttactgcattctttatgactctgatcactcttttacgttcaatgacataccgggtaactggaaagattcccaagacattacctaattgtgaccaaaatacttctgaccttactcttaatgcaacatccaaggaagactgtcaacccactcctgcaacgccatcatttaccgaggcagatattctctccacagtactgaaaaggctaggagagcttgaggagaaggttgacacacttcaatcaaagccatctgaaatgccctccgagaaagcggaattgcttaatgccgctgtttgccgtgtggatgccttagaagctgagctaattgctaccaaaaaggtaatattctccacaatctattatttcagaagtagcattcattgggatatgttggaattaggaaagaaatcaggaatataatattactgatttagatttatgtgaaatatattgtataggaaaaccaattatttactttcctttttccaatgtaatttatccctgatttttaggctttgttttcacctagaatatcttgtagttattagcagatttgtactaattttttgtatttgtgtaccttgtgtatttataggttgttttcataacttggctaacttttactctcaactctaattgaatatgtttgcttatgctgtcaattattttttctccaactctcttctgttctaaccagtctttgtctactatgttacataaaatattatactcttaaaatatgttgtctcaatagagtagagtataatattgcctcagatttctcttctctttaggaagaatcatgctaatgttggtgttgtgtttctctgtggtacaggctctttatgaagctttaatgaggcaagaagaactactcgcgtatatagacagacaagaagaagctagactcagggtatgttgatcagacctctaaattaaaatacataaatatataacccctatttgttttaatggatggaatttaacacactttattttgcttcttgctaccagaaaaagaaatcgtgctggtgaagatggagagagactacaagaaggatctcttaaatgtcaattttagtgtgttggatgaaccaaactttgatcttacaaatgaaacatcaatcttaaatgatgtgatctttttaatccaaaaatccaatatgagaaggaatcctaaccttgtatgtgcaatggggttccctttttttcttaaaacaatttgtgtgcagtttgctttgtattttcttcttgccttttaatttttgtgaaagatggactttgataagaaaacaaacactatactaatgagctctattaaagatacactattaagttaaaacttaaaagtataattttaacttttattttcgtttagatattttataatttaacatcattttaggaaatgtggtagtcatgcaatgaatgaaagcttcaaatctagctagctttgatgctcacataactcaaaatatacatataaaatagtagctcactgtttacaagatgaataatgtacagaatacttaacatgaaattaaccaaggcaaatacatacatacatacacaaatcactttgaaatacaattagtggggccgaaaaatcaacatcgccaccggcttcaatcaacggtaaaacagtgttcacaacatatcactcaccagcaaaatgggttctgcaatcaaaaaccaaagaactagaaggtgaaaaatgacatgttagtaaaacaagtaatattacaagttggaaatgtgatgattagaatatatattagttacttacaaacttattcttcttcttcttctttttcttatcaacataagacacaagctcttcttgtttaacaagagcatcttcaagtgcctacacaaaccaaaaaacaccaattgtaatttccaacataaagaaaataaaagcatgtgcttgttgttgttgttgtttttaccttcttggctgctgatagctcttgttccagagcactgactcggtttaaagctgcattcaacatttcctctttctcagcaggcatgactactggtttcatgtttagaacagaaactttctcttctaactcagccatgcgtttcatcatgttcatgtactcggtgtttgagatggctgcaggcgcaggcaactggctgcccttgatcatggcgatctcatcgtagtatacagggctcccatacactgctgcttcagattttctttggcatgtctcttgtgagacggacgacagttacaatccccacaaacgccatgattcccgaaaacagctggttgctcgtcccatttgctgccttgcaggcttcattaaccgcaaaagcttcaagagagaaaagaagaattctgttgtgttaaaacattgtagaaataaataaggaagtaattactattgtgacagttctttgtacctttattgcttccaaatttgttgtttttgactgctttaggccaagatgcatccacaactttgtcaaccatgggagtaaagtcgttgaatttgtagactttggttacaagatcaccctgcaattcaatcatttattcgattttgatgagaatgatcagcatatcaaacaaaaaatgtctaatgaaattgaaaaagattagtgatgttacttacttcatgaacaggacttaatgttggatgctccaaaaaccttcttgaagagtgacacttcaaatctgaagtgtcttgacttgtttccgaattgaaagaatggcatctcttcaaattgtcccagcaataaagttagttgtattgaatagtttgaaagaaaacaagaaaatgtaaccagttttgtcataacatcagt

SEQ ID NO: 378384 - DNA, 5667 bp, Cannabis indica
taatcgaagtcgaaaccgttcttcagactcaggtaattcatcttcctttttcgtttgttttccgagaaaatgagagaattttggaatgtttcttggaattggtcttaaatggtttttgtaaatttgaatacttttttggtgggtatttgtaaatttagtatttttgcttatatatctatacagttcaggagagttgtatctggttttataatggtgattcaagttcttttggtttatatttgatagttcatatgcataaaaagagtacattacgttgttcaatttgaatctgaattatgttgtgggaggattgaaagcttaaatgtagtcaacaattttcttcaacatattctctctaatgtctattagaacatgttgcttaaattacagtaaacatgtggatgctagtgttaatcgaatgacaaggaacacaattttcatcttaggaacctgtaataaaaccgatgtggaatactttcactagtagtgttagcgggatatggaagggagttggagcagtattttcacccatcactgcagagatggagccagttgagattgggagtaagaatgaaaacttgttcgatttctacacgacttctcgaatcgaggccattccatcctcatccttagggaagacatctcagattcagaggaagataaattgggtgactctaaatccttatggggaggtacttgagcatagtggtgatagtgatggagctagagaaggcaaggagggtggtgaagatgtatctgtttccatagggacaatgacaaagtctggtaaatatggagttcttccaaaatttgggtcttatgactttgagaaatgtgatgtgatggaagaagacattatgggaaatgaacctggacttgtttattttgaggtataatattccaccttgtctctctttactaaatttaagactttgttgttctgtgtaatttataagtatttattggttggtttgaactgattctaaagcagataaagcattgtttattctatacttctacaacaacttagaattgatttatttatcccttgtgtttcccttccaggatcttcattactactttaccagattacagttctattttcttgtttgtcttagccactcattttatgcttcataatttacaggatggatcttattcaaggggtcctgttgatatcccagttgctgatgtggatgactcaaactattacctttcaccaactttcaagtttgaacaagtaagttttcacgtaggttgtggcactcaaactattttgaagagactatattaagctatattgatgtaggttgtggcactcaaactattctttccccacatcattcaattttcaatgaatatcaagcttgtattttctccatgtctatgtttttttagtttgtttattgcgcaatcttgcgctcaattaacgaaaccactttccgggtgatattttaatgtgccaatgcttaagtcaagttattttacttttctcatttaaatctgatgattattattgatttggtttctgattttttatcgtttagtgcttggtgaaaggttgccacagagactacggattgttcatactatagaattcagcaatggtggctcagacatacaaatattgagagttgctgtttatgaagaagagtggattagtcctgccaatactcatgacaaaaggtacccttcaatttcgattccattggctctgaggtttgcctatacactatgctgtgtaattcattattatcataactccacaccaaagcagttgaaacacctttatatcaaccactttttaggaaattaactggttctaccatgagccagagggatcgatatttactgtacaattttgatccaggccattgtaacctgtcaaaacgaaggaaatgcaagaactcaattgtggccattagttggctggctcagacacttatgtcagcaacaacgattaatcacaataagtgatgattattacgaaaaaaagaaaagagtaatgagaaatagttggtaaaccgagcaatctcgaatactcttggggtccatccatcatcttagcttgaaggcctagaacctcaatctaccaaatatttctcatcgtcacttattgttctggcttgattattgaactttgttacagacagtgacttagcgttagagtttcttgctcccattcaagctcttatatttcctttgttttgacaagttactagcagcccaaatttttaattgtaggaagagcttacatttatgaaatatctttagccttaacttaaggtgatctttgctatgatatatgcatatacacttgcccttcagttggcttacactgcttagaagcctttagcagcctagaacttgattcttagggaaaacttctgtaatatcatattctttaaaaagatattttctggatactgatattttctttttatccataaacagtgatatggatttcaatgcagtaccattctctcagcgcaaacgaactcagccatcacatctaacggggtcctggaaggtgtttgaggtcaatgctactccagtgttcggtgaggagtcagtcatagaggaaaccaacggctccccatacgtctatctttgcacagagacactaaagaagcggagcttgccagagagtgctatccattttggagaggaagagatactagacatgcaggatgtgagcatgctttggctaccgggtggtgtcactgcgtatgtagacgtaaacaaggatggcactctttgcattggagttgggtggtactcagatgaaggaatcaacctggttatggaaagggattatggtgtagatggaaagctaaaggaggttcggtgtaaatcagaactgaagaggaggtggtctgatccactccctgtatgatttttttttctttctttgcttgttgaattgaaaaactgcttttaagtattgtaagttatatggtgttgtggtagagagcatacacaaatgttcaaggtttgaattctgtatataagagaattctgcagaatacaaaaattaacctcagtgactgatagggtcattattagatatcagattagtcagatttagatcatgtttaaccacagtttgtaactatgttaaaatttaaaataatggtaaaattcaaggagttcataaaatagtcaatccaatccaatttataaagcgtggatatccgtatttgtttagattggattgaaaaatttaaaatctgtacagattggatctgattgatatataagtaaatgatgcaattcaattcacatatttatataaatgtttaaaaaaaaatgatatataattaatgttttaatgtaaaaaataataatttaaaattttaatatatataatataaatatattttaaaacttaatagatcaaatgtatattttgatttcgtgctttattcgaaccaacccgtttttcataaatgggccaatctatttttttatacgggttagaatgtatgctccacttttttattaattatttttacaattaatgagttaatcactaaattatatatatttttcagtgggttgtgtcatgctaatattttaaagggtaagttcgacagggcttgtaagctcatattttgatatcgtgatcggactcgtgtcgtgttttatttgggtcaatttttttataaatgggtcagttcattttcttacacgagtttgagttcaccctccacttttcaactatttatttataattaatgaattaataaattaattactaaattatatatattttttatagttgcaattgttttatataatttttctaataaactttacacataatcataaaaaattaattagaattattaaaatttgaatatttattaataaatacacatccattataattattatcaaattatatgaatttttaacatgttgcaatattagactagtttattcgtgtttacgtgttgtacctttgagattgtcgtgtcgtatcatgtttaactttatttgttcatattgtgtcgtgctaatttataacattgtgtcgtgctaatttataacattatgtcgtatcatgtcgtactaatttgtaatattgtgtcgtatcttgtctaagcccatattttttcgtgtcgtgcttatatcttccaaagtcaagccatatcaaaaaaatctgactagtatttacatcactagtttcaaatacacacatatcattggtttaaaatagcacatttgatttccaggtcctttctatagaatacataatgtcatttgttgggaaatggttgagagaacatattactaatcagtaacggtcttcttttctcactcaacaagcaacattctatttctatgcgcctctcaacttagctgctgagcagttttcgcaaactgccaactaatccaaaataagagcctgaaataccaagatttaaattttgtaatatatactcctaagaaagccactacagtaaaatttctatttaaaaataatttttaatttattatgaaaaaaattaagtctcaattcaaactaattataaataaaaataatctctaaattttaataacaagataataatatctcaacaaaaaatatatgagtagtttataaatttttatttatgtagaattaacaattttattttcaattataatgcatgtataaatattatacttatttgagagtaattttattatgatataatattaaaagaaatttgcgattaaagtccctaaaaatatcgctttgatgcagattagttcccaacctctagaaataacagtgatagtctccaagatcatatttttttgtaagtccgtcaatacctaatttaacagctctattaagtgctaagaagaataccatatgtcaaagattttttagtccacatcataattttaattgaaaataaataaaaataaaaatataaaatataaattattaaaaaaaattaattattttttcttcttcattttcttattcttcttgctgcccaggaaccagtggaccaccacccacgtcccacgatccaaaaaatgaaccagccacaccccaactctgacgacagacaactatgcttcggccaccctcgctccaaatggaccaatactcaattttccccatgcccgagaacacgaaaacctcaaattcttttcaccgccatatatatatctaagaagcattagtcaccagttggagacttactccattttccccatgcccgacacaaggtcacaccaccatcccatcagagacttacttgcgatcaacacactagttaccagttgttggttgagtctctagatggaatcaaagaaatcagagagaaatatgagctccacaaggccgcatatcaccaaagggttgcacagtacttgaactccaaggtgcgcggtaaaaaattcaagctttgaaatatggtactaagatgagtatttccggctactaaggacgcatcagttggagtactcaacccatcttgggaagggccatatgtcatctaagaagcattagaaccctaaacttacaagttaacccactatgactgccacttaaatccaatgttggcaccaaggtattggaactgtaatgttcccgcttcaagcctccgttgggccctacactcacgaaatgatgactcttatacacgagtatgtcactctcgctgc

SEQ ID NO: 378385 - DNA, 2375 bp, Cannabis indica
tatataaataaataaaaaaaaaggtcagtttttcaacaatgcattaagtattttaacccactaaaaaaaatttatgcaataaaatatatatattactttataatgaagataatttaaatgtttgttataatgcgaatttcagtagttcaaatggaccatgctgataattaaatacgaactgatagacagtgaagaatactttgaatgaggaaaccaagctttgcatgcagaggttgtctgttttcaataatatataacaaaaaaattaatatttgttttatttatatatgtataaaatacaaaaaataagaaaagatttcagattaattttatatttgtcaccttgagaaaaattatctacctttggtccctaaatgcatgttccaaagttttgtttgggcttatgtgctggctggtaccatgtggcatgtgctatgttctctcgtgatttttctttcattctactatttcatttataccctaccctactcattaattagtacaagtcacactacaccaatttttcaatattttttcttttattttgataattattgtttcacttccataaataaatatatatatataaactatatagccatatataatatctaataattaagttgaatgtgttgctcacccaaaataagttacaaactcatcatatcacttaattttcaccttgggtatgattagtaataaatcggcatataataattccttcatatacaatatttcctaatagtgcaaattttattaatgctagctaaaaaacacttttgactgtggttctaatatgggtgaccagaattaaatatatgtatatatgtcaaacaaaaaacacaaccatccattaaaatatctctacttttgcatcttaatttcaaattaaactctacacatattattcttttggtgaagtgaaatacacactacgtaaaaataaatagttaaaaaagaaaaacatatcaaatatttcttttaatatataatatatatacgtagataataattaataattggaagagctagggaagaattgaagaaagccccatcttcacgtgaagagggttcttatatatgaccaatcgaaatttgatacctattcagtgcacctttcgcggcatgtttctttcttttgtctctccccacaaaaacaaatattcaaaaagatgagtttgtataataatatatatataaaccctaaaacagtgggacataatggctcgaatatatattgtgattgactccaaccctttgagtataaataaggacaaattaacttatccacaccactgccatagtccatagtccataccttaatacctcttcaaaattaatggtaccattattatttgttccgcttttgttttattattattatttgttccttttaaaattacagatattgttgtattgttttgttttgcttaaattgaaaatcaataatctttgtcacagaaaaatatctgtttctttttatatacatatatatcattaattagagctatatatatatgcttgtttctgtaattgtttaattaaatagccacggtgtcggtgtacatatatgcatagtagaatgaagtattgattaagcaacaaataaattaattaaaatccaatttctttttgtcccacttattataaaaagaaccaaaatagagtttaagcctgtacgtggcagttatgtactagctagtatagtcaactttattttctctttttcttttttacactaattattattgctggtcctactataacctaattttggattttcacatatgattcttgtggatcgtcgtcgatccaaattaattatttttaaaacttaaccttctctttgtttagacttaacaacaaaaaagaaaaaaattatgtacacataaatatatgtaaataatgtctcttatataccttcccctctaccttttcctacttggtttacctaatctagatcaatacgatcattattaaaatagagtagatcacgtacaacaactttaatttaaacacactaggctagcatatgaattcgttgtgattatgtaaattattatgataacgtaacagatacctctactcttttcaacaatttttgtgtacctactttcgtgtcataatagactcatatatatatatgtatgtattattaaatgcgctgtaataatgtatatattatcgatgttatatatgtatattataataatgatgataatgttaaaaataatttttaaaaaattaataatattattattagtagagaaatatatattaaaagatgttagtggtgtctagtatctttatatgtattaatattaatattaatttaattaaatatcgagttttatataatttactataataatttt

SEQ ID NO: 378386 - DNA, 3011 bp, Cannabis indica
ggtagaagagagagagagaagagagagagagagagagagaagatgcttcctttttcaagaattttccaatttttaaaataaatgaataaataattttgttttaataaaaaaaactcagcttatttactaataaatttgtttaaaatcaattaaaaatttcactaaaggacaaaagtcattttaggccaaaatgaccattttgcccttcccacacaatacatcaaagaaggtcacttagcggtattttggtcacttctaaaatctcgactatttttgacattcccaatgtctaactatactgcccccctatactaaaaatactaagatgtgattctaatagccaaatgccgcattccaatgttgtcgggtacaaaacatgcaaaaatataaaaattctatatataacatataaaatgcactctgaattcaaataaatcatcgtaaattaataattcacaactaatatgcaaatttcataattaaatcctaattatctgctaatttctaaattaaagctaagcggcctttacacccaatggggacctgaagaatactaaagacaatatcactgtcaaaatattgtgagagcctatttaaatcccattggaaatttcgattaataaagaaattaaccctttcaaaaggaggtgtattattgtctttataattaaggtatttaacattaggaacccagtagtcatgcaaagtacggatggtagcaccatcactaactttccaaataagtcatttattaaaaagatctctaccccaaagcaaactggtccaagtaaaagaaggagaatggctttttttagcttctaagaaagaattgtacttaaaatatttcgctttaaggatcctggataagagggaatcaggatttgagaaaatttctccaagcttgcttggccaaaagggcttgattatgatggaccaaagatcgaaaacccaatcctccaaagaatttagaattacaaagacaagaccgtgatttccggtggattttaacagagttccctagagaaccccaccaaaactgagccatgagctttttgattttttgacaaatatacacagggagtttaaaacaagtcatgacgtaagaggaaatagcctggaaaacagctttcaagagaacttccctacccaccttagagaaaaacctattgttccaagcatttatgtgcgaactaaccctctcaagaatgaagttaaaattagttttcttagaacgacccaaacactgaggaactcccagatatttactaacaaaaggtttattatctaatcctagagtattatgaaaatactcagagacagatgaaggtgtattaggggagaataagatagaggacttcccaaagttaacctgttgactagtggcaaggttataaagctgaagagcctccttcagaccatcatatgacgcaaaagatgcatcagtgaataaaagtgtattatcggcaaaaagaaaatgagagatagaggggcaaattgagcaatggaaatacccctaagattgcctaatctttcttcaatccttagggcagaagagagccctatagcacaaagaaggaataagtagggagaaagagaatctccctgccttatacctttggaggggaaaattttcttagacacctgaccattaatactaaatctgacagaaaccgaggataaataattattgataagattgacgattctattaggaaaattgagtttattgagcacagcctggataaaactctattcaacccgatcaaaagctttctctatgtctagcttaagaccagttcaaccaagcctcccttgcttcctatgagtaatggcatgaatcatctcgttcgcaatgtatatattatcaaagatgagtctatcagacagaaatgtgctttgggtaggggatataatatcacacaaaaacaccttaggcctattagctatagctttggcaacgatcttgtacaaagtggtgcataaactaataagcctaaaatctttaagagaggtagcattagtttttttttaagaatgagaacaataagagtgttgttgataggggatatacttgcattattattgagaatgtgaagtataactttgccaagatcctcccctaaaatattccagttcttttgataaaagtaggcattgaaaccatctaaactaggagatttatccccaaaaagttgaaacaaagcatctcggaccccgtcacgagtgaaaggggcatctaattatgtataatgctgatcattcaggcttttatccacaacagagagagtcaagtcaatagcctccctattaatattgtgagaagtgaaaaaggtggaaaaataatggcagacacattctccatgtcatcgacagtggaagctatgctgccatcttccaggtgaagatatctaatgtatttggctctttttctagtggaggccttattatcgaagtacttagcatttttattcccaactctcaaccaatgcactttggatctctgttttcaaaaaatttcctgcttatacaggaggctatccaattgagattggagattagaggcctcatttaaaacctcattagagacaaggagggaagaaaagatattattgagacttttatcgatactactaatcctactagcactactgttataagacttattccaattttgaatagctttaacaaattattttgtttagtaagaaagctttgtacagagtagtcatagcttgtgttgttattgcacaaggactcacagactgtatggaaaaaagagttttcagttagccaataattttcaaacataaaccttttgcacttaatcttattcatactctcatcttttagaactagctttaaaactctatgatttgagccataaaagttaagatgatacaaggtttgcggttttgaattgttaatatgcggttcaaaccgcaccgcaccgcatattataaaaatgccaacttttatatttatttaggtccaatatgtgaatgtccaaccca

SEQ ID NO: 378387 - DNA, 4147 bp, Cannabis indica
ctatcgggggaattgggaatgtgttggatgaagggagtaaaaagcaacattcaacactcctcgaagcacctgatatctgctgagatatcctcggacccgccaggaatttcttggctgcttttgggtatttacggaccccataacaagtcggataaagagaggttctggatccatgtcagtgacttagtgcttaatgcaacatcccctatcctgcttctgggtgatatgaacggtacgctccatgacagtgaatgttgcaattacaatggaaatgtagcccgttactcattcgattttaggcgtatggtgcatcgagcgggtttgatagaccttggctttcaaggccctattttcacttgggtaaagggtggtaatagttcgaatgggattcagaagatgaagagggcaaggttagaccgaggaatggcttccactgattggagaattctatttcccaatgcggtagtcaatcacttgtcggtctcggaatcggaccatagacctttgctacttgatactatggctggagttaactgcaagcgtcgtcaagtcaagtacgaaaacatgtgggcgagggatccgagatctttctgggttgtcaaagaagcttggaagagaaggttacactccaatcccatgattaatttccaccgcaaagttaaagagacttgtaagaagcttcaacgatggaacaaaactcagtttcttcacttgtctcagcaagtccagagagcaaaagttcaaattcaggaggctgaaatgaaaaataaggataactttgatgaagttgatagagctaaagccaagctttccgaagctcttttgagggaggagattcattggaaacaaaagttccgagtccaatggctacaggaaggggatagctgctccaaattctttatggcctccaccatcgttcgcagacgaaggaactacatccaatgcattaaagactccccgggtagtgaatggattatggaccaaacgctgattgcccaatgcttcatcagaaaattcaaagagcttttcaggaaagataactctagccttactcctcttaaggcgggcacaatggtgaatctaatatccaaccatgataatgttaccttgaatgctatcccgaatgctgaggaagtcaaagaggccgtttggaatatgggaagtgacaaggctcctggtccggatggactccccccgagcttctactttcaccattggggaacggttcatgaggatcttgtcgacatggtaattcatttcttcacgcacttggagttaccaagttacataaacgacacctcaattgtattgatcccaaagaaagagtctccctcattggtaaccgactaccgccctattgcgctgtgtaatgttgcttacaaagtaatctctaagatcattgcctcaagactccgccctttgcttcacaatatcatatccccgaatcaagcagcgttcatcaaaggaagacacatagctgagaacactatgattgctagagagatcgtccattcaatgagcaaaagaagaggcaagaggggtgttatgttgatcaagctagacctcgaaaaagcttacgacaaacttgattggggttttgtgcattcggttctactacaatatgggttcaccagcccattcactgagtggattgatgcgtgtatcaaggttcaagaaatcaagttacttctcaatggttcaattgtggggaagttcaggccggaaaggggattaaggcaaggtgaccctttatcgcctaccctctatataatggcagtcgaagtcttatctcggattattaatgaaaaagagcggcaggggtgcattaaaggttttaaactggctcgtaatgggacaccgataactcacttaatgttcgcagatgatgtcatcctttttggtcaagccacaatccgagaggcaaaagggttcatggagtgtctcaactactactgcaattgttcgggacaatctattaatcttcaaaaatcgtcggtcttcttctccaaaggagtaccaagtcggaaggcccaattgattgtaaacatactcggcatgcagagaatgaataataaggcaacttacctgggtctctcgttgtttcgatctataaaaagaacggaagataccaagtacctagtggagcgggtcctaaaaagaatacagggatggaaaatgaagcttctttctagcgcggggaagacttgtttgatcaaggctgtgggatcaagcttatccaattatgttgcctcttcagatgttattccgatagcaacagccaataagatcgacaaactgcttcgcaacttctggtggggagataccgaagaaaaaaagagaatgcatacaatagcttgggaacgactgtgcagaccaaaagtggggggaggtcttggatttagagtaacagaaaccatgaacaaggcgttcctcatgaagtgggcgtggaaagtcttaacggaggagaggggtttatggtgtcaactgatgaaggaaaaatacactaagaaccaaaactttctcgacttggaggcaaaaccaactgatacaattctgtggaaggctattctccgagcccgcgaggagctaacgaaaaacctttgccgcaaaattggaaatggccagtccacatccatctggtttgatcaatgggtgccggggaacaacagacagcccattcctcgagttcttgctgcggacaatgttagcttggttagtactttcatccaagataaccaatggaatactgatatggttaacaggtggttccagtgagaggatgcaaggagaattctcaacatttctctccccaacacgccagcagctgactcttggctttggctaccagaggcaaacggtcaattcacagtaaaatcagcttataggactctaaaaaactatgactctaacccggaagcagagaagaaatggagaatgatttgggggtcaaacattcactctaggcttaagatgatgtggtggaaagtgctatccaatttccttccaaccaaggagaaacttagttcgttcattacattatctgatcctagctgccctttctgcgacattcaatatgagaatagcctccatttgttttggaattgcaactttgcaagagctatatggttcggatgcatttggggagttagaggtaatgccaccaacctccaaagctgggacgagtggctgttctggtttgcaaacgtgaacaatagaccacccagaatcaattccacgcaattcttggaaggagcagccacaatttttgaacacatatggatggagagaaaccgtaaggtgcatgaggggcacttcacctctgctgtacatctgattaagctgatcaacaatagattttctgaaatggattccatacgcacttcagctgaaagaaggcattcagagtggaagccgccgccacagggttggatctcctgcaccacggatgttgctattagccgatcacagtcagcaggggctgcgatcatccaagatcataacggaaccattattaaaattctcacatttcagacaaaccattatgaggcgcttactggggagacgtttgcagtgtgtaaaggggttgaattaatggcccaattgggatacaagaacgttgtcttccagtgcgactcctcaaatgcggttgcagctctgaagtccaaaccagcagctgtccataatctgcatttcaatatacaggagctggttaaatatttccttgctttgactggtaacctcaacctgtgggagatacattggattcctagagggtgtaacggtgtagcccatgcggtggctagatgggcaaatcgaaacagcagctttggtctaatcgatttgcccaattttgacgatttcctgctacaggtcgatgcagatggtcgtgtggactcttctattagcctcggatagttttctttgtctgtagtttttcgtttttcaggaggattagcctctttcgtttgttagtttttatgttcaatttgttcctgtttttcagccattgtctgctttctactttggcaagttagtgcctgttttgttttccctgcttcagcaggttggtgttttgttgtttggtgttgcggttcttggaaccattatcaaaaaaaaaaaaatgcaaaaaaaggccaaccttatcata

SEQ ID NO: 378388 - DNA, 2941 bp, Cannabis indica
ttgatacatgtcaaaattcagaaagtaaaactcctaattaaccttataaatatattcattaaaaatatataaataaaatatccaaacaaaaagttgttgaccagctcagccattttcgaattggaggccatgggtaaggttaataaggttaatacttaatagtataaatactataacagaagcagcttaactatactattctcctatgtataaaactgggagtttggaagtgaatgaaacacacactcaattcaactttttatgcccaggcagttacaagatgaggacctactcgtggaagaacacatgagtaagtaacatacttcacgctgtctataagcacaactacaaagatcctagaaagagactttggcttcatcataccatcaacatcaccactgccaccctctcgcggatcaacaagtacagacacaaccatagaagaaacagatctgttaccttgaaactcatctttcccagaatttttagtcacatgctcttctgttatgttataattggacccagcaagggaaattgcaaccctgtgtaggatccttctgttgccgcccttgaggcgtgttgtattctgcctagaattctgatgatgtttcgttgatacattggaaactgaggatgcaggaactatagctcctgatgcagaagcaggtgacacatcaaactgaaagacttctgtacacatccctgaactcaacaatggccctgcaagaccctcacggaaccactgttgtagtcttccatcagctgcatttgactgtaaacggtcctttctagtattagtactagcaccagaaccaagagccttgtggcgttctgtaggatttctgtatataggagcatgtccccctcggttaccagcttcaggagcagtgtatggagccagatctttagagatggccaaactagtctccctattactcttttccgaatgagcaagtgatgccttagttttttcgctagctaagacagagtgtattatcaagttcccatcaatcttgactagcttatcatttcttggaacgtacaaggaagcagcaagaggttcactttcatttcgcagacgaacaaattcaccataacctggtttagactgagagcctctttcttggtgcacaaactctaccgtttctctaaaaccatcagattttgcacctgatatccctactcctttattttctccagatccattcatatgtgaatcaattgataaaaactggtaatcgggcccaacaggagctttgtcccttaaaccaccgaagctaacatccaccacaggaactaatccaccaaatagcaagatgaaaaacaacaaacccaaaaactaatgctagccaccttcttagctctaccctcagtcttcttctctgattttttcaccttaggggttgacactgtgtgttggggtttcaatctaggaatgggaaccaaagggacctgagacccttgtggtttcaaaacatatggcggacctggcatccaaggataacccatgggtgccattggaggatgcgggtacatccccggaggaggtggcgggcacattccaccaccaccacccaattgctgcctcaaagaggcgttctctgccataatataagatattttactattcaaatcggttatggtagaatgcatattcctaaccttgtcttccagctcctcaacgtaatgcttcttcctctgcctagagagctgtgcgctttccctattcctaatcagcctagccttcttcttgtcgtcctcttcattaacgggagtcaaattagactgcgaatgtgattgagaattctccaccagcgttgacgacctcctaaatttggaggttctcgactccccattcccttcttcagtttcctttttcctctttgacatgcaatttttctcggtctccaacttcaccttcagattactaaaaccattatccgaattcacaggcgaattcacgccttctgaaacagcagaaccgcaattccctgagccgtgagatgaagccggcccaccggataactcatgatcatcaggagacgcaacagacatagctccagcaacatcatagctaccagactctgacgattgacaattgagataacctgcaacatcataatccttacccccagaaacagtagaggtatccgaatccgtagacgctgacttcgaacctacagcggcttccgaagtagtcgggttgacccctcgatccgtatccaagccgggggctttatcaaacccatccgtagttagaaaatcgtcggtatcagaaggcaggtaaagatcttcgatgtcgtcaaaagtcagttcatactcacaattatccggaaaccctaaccctagatctgagaagaaattgtcggaaggtgcattgtctgaggaagagaaaaactgatgatcgaagggtgggatgggaagagagtccatatcggccgagaaatgaccgtcggtggggtgcatcggtaggtcagcgaccaccgggtcaaccattgtccactctttctaggccttaccacaagagagagaaagatgaaatgacaaagtcaccctttttggatcagaaacaaaggaaacgatttcctttgcgtgcttttttttacctttttccctttgctggttttgatttgaactgagaagggatgaagaacttctttttcttcttgtttgggtttgtttcgtggacttgggcttttttttactatagggccaatccttttaaaacaagatataggcccaatccttcgtagagaaaaaagacaaaaacaaaaaaaaattacataaagtaccattttttataaaataaattacatttttacgtttatagaatttttttttacaattttacagttttctatagaaacaacataaaaactacataaaaataacatcaaaacaacaacaaaaaataatatacatataacaaaaaaatcaacaa

SEQ ID NO: 378389 - DNA, 7093 bp, Cannabis indica
gatataatgaaattttgtaattgaatttgtatattattcaaataattattaacaattatttaaaagaaaaaaaaaaatatttgtacttatgctccttacaaattcttcaagttttttttttttgataaaaaactatttggaaacaaatgccttttaaaattttacttttacagggtttgttttctaattttaatcctacttcttttcttaactaatatcattatattaccactattatataaatcatatgtttctctcattaatatttactttatttattattcatcatatttcgcggtcaataatatttttttttatttgttaatataattatattataatatataaaattcaaaacatcaataaaataatttttcatggaattatacaaattaattaaaacaaaattttggaaggggaagagatttggaaaatcaaagagcacgtttcaattttaattgagccaaaaaacgacgtcgtactataagcagtgagcttcttcttccttcccgcgcacgcagtaagacgaaaaatggaagatccgagaaaatccgccatgaatttcttctccgatcaagaactctgctacgccgatatcctacctccttctcaggtgactaacttaacatctcaaatcttcatcttcatcatcaccgtgactgttttctccttcttcttcttcgtctccgcaggtcttgccgagaatcgaagttgcggttctcaattttctcagaatcttaacttctcctgctccggcaatctcaggccttccactggtattaaatttctgttctactaatctcttcaattttcaaggccatcaaacaacacagaaattaagttagctttcatatgtatagatttgtagaaattcgagcaatggccgagtgaatcaaggaatttcaacagaagttccattgattttcctttctcgatctctctgcaataggtctctaatgcgatccaccgctaccaaagcctttatcagaggtttttactttctttctcttttcaatgatttagtatttttgcttttcttataaaagaaattgtttctgtaataataacagtgtggaaggtaatggaaatgtgctataaaattttagcacaagagaagcgagtaacgcagagggagctcttctataagttgatctgcgattctcctgattacttctcgtctcagctggagactaacagaaccattcaaggtacgtatgtatttttactcaaaacttttgactgattttcatttgaattttcttgcgaaatgtgtaaaagaaaattctgtgttggcgtagatgttgtggcattgctgaggtgtagccggtacagtcttggaatcatggcatcgagcagaggacttgttgcaggccgtctgttgttgcaggtatttcaacctgttccttttcatttttcttggtttattcctgtgacgaaatgtagtgggattaggattcaatgaattgatttgttgcagtgttcatattatatatcctttggttcattatgtaggataagcacttttgtttttaactaatattgttttaaaattttgagctatttatgactaattattatttttgtcaacaaaatttttacatgtattgaattatgtcttaacttttaaggcagttaaaaatttctttgaactattaagattgttaaattcaatgagttttgttcaattttactaacaaagtgtgacgtgaaagaagattaaggtttatgatttggtaccaatcaaaattcgagagacatcatttattatatgttcaatcactacgttaataaaaattttattaacagaattggagggaagtctttgaattcaataatctcaatagtttaggaaaaattgttaatagtgtaaaaaaattttagagacataatttagtatatgtcaaagttcgtaggaaaaaatttgaagctgaaaattaataatgtcaaaccgtactagaatttatattgaattgatgagttgtagttctcaaagtattactattatcaaatcgtttttcgaattagatggagtgataaaaatttgatagttgtaatagttgagaaaattttaatagtagttatagttttgggacaaaagttaagatagtagtcatatttatttacttttagttcataacatagttttctggagagaactgtgttgtggtaactcgatggttttttctctgttttatttttgtaggagcctaaccaagaggaggtggactgttctgtgtgtggatcttctgggcatgctatttctggtgacttgaatcttttggatcagctaataatgaaaacagatgcacgctacataatagtagtggaaaaggtactatatatttgaatgtattcaggcattgctagctaccccaattcccatgtaccttgccatctgactactcggccattttatttatttagcatgcaatattccagcgtctagcagaggatcgatttttcaatcaaattccaagcattctaatcacagctaaaggctatccagatattgccacaaggtgaacttcacaggtcacccaagaacagagtttaattgcttattacattttgttttcaaccaaacaatgtctaatatgggcacactttgaacattgattactgacataggtttctccttcaccgaatgagccgggttttccatgatttaccaattctggcattggttgactggtatagacaaaatcattttactatgcaatgaaacagtattttgctagtttgaattgaacctaacatcacagaatgaaaaaacaaaaaataggaacccagctggattggctattttatgcacattcaagtatggaagtttcggcatgggattggaggcttaccgatacggtaactattttcttgccttaaattgtcatttacttgtacaaacataccaatgcaaatgtaaaaatgggggcagcttgcaatgtaaaatggttgggactgcgaggcgatgatatagagctcatacttgaagaatctttagttccattgaaaccgaaagatctgcaaatcgctaaaagcttgatgtcatcagatatcttgcaggtgatttacctagcaactcaaactttcaaccaaatggagactcaatgacaataatattttgatatccaaaataaataagatgaacaaatgccttgcaggaagaatacaaagaagagctagcacaaatggttcagcgtgggcagagagctgaaattgaagctctgtattgtaacgggtatgattttctagtgaagttcattgcgaaaaaaattgtacaagccagttatatctaggaacaaaacccaaaaataatgcttataagaaaattaaaaaaaccccatcattctaataaatgcaaatagttttaacatttgttactataagaacaatgcccaagccaactacatttaaacagtattcattgaagaatgcctttctaagcacaatcgtctacaataatcacatccctccaacgagaagggatttatacttttcgtaatatatattgaaattgctaattttgcactatctactaattactacaacagatcaagcaacacaaaattgtatgtaggaagatttgaatatgaattggactgatactgcactgcaatgtacagatccagctacagacaatctcaaaaatcttagataaaataaataatggcacctcaaaatttctaccaaaattgttttagttcctccttgatgcgagtctcactcttttgccttcaatcgcaaacttctacttccactcagctgcacaaaccaacaagatgatattataagaaacatgtaatgcatcttcagaatttcaaatcagaaccttgccattctcccagaaacagaaaataataccttctgttttaagtaagaaagagcttcttttttagaagagaagtctgaaaaaacagcagatgaattttcatcgatcaaggtttttagatccttcagctttattgactcgccaggtacctaaacaagacagtgagtaagttccataaatatattatgaaagaatgctataacatgcaattttggtggactcacctgacgaagaagcttcttgcaaagctttttcaacttaatttttggttcctttgtcttttccatttctaaagagacatcaagtttttcggtttctgaacaatcaggatcggaagattcttcatcatcattgtcactaaatgatgtcttcttcccctgaaagtaacaaccagctatcttcttggtccggtctttgattcctagcccttgctttccggtcgtggcattatcctgaaaattgaaaattataagtgacagcaggaaaaggcaacaagtgtacaatatttgttcagcaaagcttgagtaaaaatcttacttgaacaagattgtaaagattctcctgatcatcctcgtgaaatgcagttcttgtctttgacttttcactttgtaactttcttctagattccgctcctagaagacccccagaggtaaacccaagtttaaagccccaccaatctggagagatctcttccagcatgttacctgttaccatatcaagcaaaattgactaagaacaagttcgttcaattcaagataatgcaaaaaaaaacgaaagggctgtaaaagcagtaaaaatctgcaccccaagttgctgcatgcacatgtgtataattacatatgtcattaaaagaagtgattaaatgtaatgtaaattaactcttcactgttttctatctgattattaccttcagcaaatataatatgacattcagcttcagatgccttctccaactccttcacttgaccactgagactaggatttgttgcagtaggctcctcgacctttgcctgttgtggacactaactttgtaaagatgttgtaatataacacaaaaatatatattcgacatgttccaaaacatgagagaacacatcaaaatcaaatttcacaactttatgtgactcaacacacaacttgacttgcactatgaatctgacaaaatttaattttgtggtacttatatacacacacaacatgaaaaattatcataaattcgcaataccaatatataagcataagctttacaattccccaccagcctttttagaggcaagtggagtaaatgaaattttgaacattataacttctcttgcacaatttttatcagaacatgtaaacattcaaattttctttctcaaaaaacactaacaagaggcacttttatagtgaaacccccatgaaggacctcaaaagtaaataaaaagaaaaagaataaacttttttaaaataaaatatgtaaagaaaaatgagctatgtgttagacacagagacatgagctgaaaaacatgcaacgctatgatatttttttaagaggtaaaaaattgagggtatatgcaaattttgtaacactctgaacttacaaggatgccttcaagatcctttgccgaataggaatgaacaagctttgctctctctcttctcatatatctaattatgacgataaatgaaaataagtcaaggtaataaatcataatgctgcagtaaaagttgataaccaatagaatatcgctaagttgcaccaatagtgcctaacaccactttaaacggcaaactgtcattagtgcaattcagcatcagaaccacattttgttaatttaaaatataatacgtgagactgctataaattgcacccgtcatggtgttgggcaccaggagtgccatataaggaatgcgataatcaataccaatgtgaattacacaatactaaccttccctgtggtcgagtaaccttggcaactttctcctcaatttgcttttgcacttctgcctcttcttctgattctgattctgactcatcttcaacttctgttttctttgcatcaggttgtgcagtttgctgcaaaaccaaattaaacaaaatgaatgagcaaagaaaccccaccaataaataaagcaatttttaacacaacacaccaattgtgaattaaaagagaaaatataataataaaactcaccactttcaatcttttcagaataccatcaaattgagtggtgtcaaatgcccaagcattaggcttctctaaaccaatgcctacaccaaactcgaaaaaaaaaaaatcattcataaacctcaagtatgggaaatttgccaaactaacaacttcaaattgtaaaatttacaaaataatgacattgaatttacactgtggcatgattgcaaaacgaccattatagtcgtttaatggtaatatcaaacatggttattttgctaataaaattttcataaagactatttttacaaaacacacataaattattcatcaaaatccaacatttcacatcatttttataattgagctataaaaaaattccttttcttttttgtttttttccaaagaaaaccaaaacagaatcaaataaacaaaccagtagtatcttgtttgtttttgactcgaacgtgtcctttgattccttgtttgtctttcccgagtccttctccttcttcccacccctaaacaacatttcaaaatcatatgaaattcaacctccataacataacaatccaaaaagttttgatgaagagagagagagagagtataccatttgtttcatgaggcggaaagcagcagattgtctggcaacgccgacatagcagagaggagcttcaggtgccgccatggccgctgtatcgttttctcgccgacgatacgaacagcctgaagctcgaagtgagagagagagagattcaaagctcgaagaggaagggttttaagacctagaaagagaaaagttacggtgtttcgcggagtatcgttatttctgtggggacccaaatttctaaacgggctttgtggatcaattgggccttgctgactaataacgggcctaaccacacctattaacttggaaatttggatttttactagggtaagttgaaaaatggcacttttattaatcaattaatcaaatttacctctatttttatatttatttggaacatacctctttttatgtgtattgtacccaaaataccctggcataagagagtcacatggagagtatcttgaagtgacagcggcaaaattggtataatctttgaaaaaa

SEQ ID NO: 378390 - DNA, 6278 bp, Cannabis indica
taattataaaaatccaaaaaacatttcaaatgtaggcattgttcgtggtctacccaaattgggtaaagaaagtgttgataagtgtgaaccttgtaaacttggcaagcaattgaaaatcacccacaaaagtgtatctgatataaataccacaaaagtattggaattgcttcacatggatcttatgggtccaattcaagttgaaagtctgaatggtaagcgatatatttttgtatgtgtttatgatttctcacgatttacttgggtagatttttgaagagaaaaatctgacacatttgatgcttttaaaactatgtgtttgaaattaaaagttgaaaaaggatgtaacattggtaaaattatttgaatttggagtgatcatggaaaggagtttgagaacactgtttatgatgaattctgtaagtctacaggtataactcatgaattctcagctcccaaaactccccaacaaaatggagttgttgagagaaagaatcgatcttgcaggagatggcaagagtgatgttaaatagcaagaagctgacaaaacggttaattatattctcttccattctcttttttaaacaagcatagaagtaagtcatattttcgtaacctttcttaagctaggtaactttacttctatgagtcagaaaactttgcagtatcttttcctgaatgcaaaactcgttagcagcaaacctttatctctcaatcaaattcacatccccatagttagcttgagcacacatcttagcttcttggtattgacttttctaaaattccatatcagcatttctcatcacattattgttgaaagctttaagcacatgcttcaatcgaagagtcttgaaatataaagctgacaaaccagtatttctcaaaggcttaacccaattttccaaaagaactctcttaaactctttatgttctacctatgaagggtttaattccaatatcatacatgacaatagaggagactattacaaaacaatgatccgataccgtttcccaaaaaaaagtagcacttgaatttggaaatagatctagccaatactcattcttaaaaacatggtctattttagaataaattctattaagacccttttgattattaaaccacgtataataaggccccatcctcttcaaaacatccatagaaagacacgcattagagtcttcaagatctgaagcagacacaaatttcccctcaactttgtcattatagtgaaatatggcattaaaatcacctaatattgtcgaaggctaaaaaggataccttaaattttcaaggcctctctataacatcttcttatcctcttgaccattcataccataaacaaaagtagcacaaaaagcttctttgtgcctagctaattttacataacaatgaacatattgagtagtttcttctatcactatcacctagcaaacactttcttcaaaataagcaaaattatcccttctatagtagagctggagtaaaagtcctagccaagaaacttattaaaaaccatttcctacacttttattccctcttattttggtctcaagaagagcgccaacacccaatttctttattctataaacttctaaaatggcctcttgtttattagtactattaaggactttaacattccaactcaaaatgttacaataattcataacaaagaattgatagaaggcttaccaatttttgaacctccatcttttccttgcaacacctcaaaatgattcttcatgttttgatccccaacttgactaataaccccctcatctctttgcttagcttcaagcagttgagaccttctaggagtctgacaaatcacccatagattccttcaaaccattacccctagcatacttaacaattccaggagtccctttagtcacctgacctaaaccagcaacaatttcctcatagttgctacaacagacaacatcttcaccctccagatcatcttcaatagcaagtttaccctcttcaatccatatagctaccaaagtttcactttcagacttctgaccaatcttagcaggctcttcttgaacttttttaactttccgagtaccccttcttccttcttaacccattgcgcttctttacctttcctacaattcgccatactatgaccaaagcatccacaattcttacatttgacagggagccactcatagtcctatcccctttcaacaatgctcccatgatcattgatataatgaatcattcttgaaggagagtcagcaatgtccatctccactaaaacttgaggaaacttaaccatcgacctttcctttgtcactttatcaaccattactgatttcctaatggtactaactaaagcactcaaacacttacttccccaatagtgaagcccaagatcatgtaatctaatctagagagggacaaacttaactaaccttagaacatccaaattggtagtccaaggcctagtactaactagcttccgttcgaactaaataactccatgctcaagagtgtgatctcttgtagccacatcattgaattttactatcgtgaagccttcattcattcacacaatctgatctacgcccgaatttccccactttctttgaattaatccttcgaagacaataaaaggaggattggcccctaagaccatacaaatcacaactaaacttcaattaactgcctacaatcgaatttccttaacatccaattgagtgatcttcaacccttctttaatcgtagtctcctcatattacaaattagcttctcaaaattagaatttacctttcgtgaaattcttccagtggctcttagattgagcctagaaatcctcattatccactttatctgcccatgattaagtttcaacacccatcttttcatctgtcatacccagaactttctctgattgcatcttaaaatcaactaagatatcccatggttgtaatgcttcagcaataaactcaattcccttaatgttttcctgattagaacgagcctcatcctcatcattatcaactgaatccatgctcatcgatcataaaactagcttctagacacccttttcttcttcaccatggaagagagctagagagaccacacacacctttattgaaggcttttcaaaattatattaaaccctttgattagtaaaggttagcacaataattaagaaaatatagtagcatgcctatactggtaggtgttacaatccttatcaataatcctaatagttatcaaattgtattaacgttcttcatcttttatcatttgtgaagctggcctatccccactcctcatgaaatcaaattcttatgtgatttgaaaaggagtgctgctctgaaggaggaaggcttttaccatattcatcagtttagtgtgtatatagataacatcattaaaagtaattgtagcctctatcatgaaaaatatatctatactctcattataacctcaaggtatgttaccttccaaaaggctaaccctttcaaaagacccactctgttgattgacatgaaatggagagcgaatgccatgtttagtaagattaaaatatgggagagagatggaaagattttgctctctaatagcaaccttcgttgtgttgggctgatagtgacttgtcagcgactttatgttaatgctcgctttgctgatgattcttggatcatgccccttgataatgaagaaagcagacatcatggcactgtaattagattcgaagtgatgttagaagatgaatgctctttttgtaatgacttagaatattatgagagaatatccatatctcttaatagaactagtgaaggcattggttctggagatgaagccaatacaaggcttccagatcacaatgaggatcgtgggcctgaagcagttggtgaatcagtaggttgctagttcgccactcattgaagcaactgacaactagattgcttacctcttcttactttttgtatttttcttacgtcctaaccctttgttcttcttttttgttttgcagacaaaactgagattccttgatgccatgtctacttgttctaaatgaaagaaacctgccaccaaggtcgatgaaccacttatttaagaggttgtgcaagccattcctgttgcttcttctattccttaaaagaagtcaaagaagagaagtaagccactatgactgaagcttctttgctagtcagggtcttgcgtaaagggaaagagaaggttattgaaattgagcaagaccttcctacttctcccgatactgcttcaccagaataaatagacgttgctaagccgagtacccaacttcaggtgagtcaaaacttatggaaaacctcatgcaaaggacactaaaactagcaaagacctaatttcttccaagacaaaaaacaaatttttggggaagttggtatcttctaaacctccttgtgtcattgctcagaagggcttcaatgatatctttagggtgattattcatgcttttgatttcatctttcctttctttttaatgacatcctctgactttgttatgtcatttgtaggcttgcatggtgctttgcttatgctatggaaaatgagcataagaaaatttttgaactcacgaaaaagctatcgtccactgaacaaagggcttctgatgctaaaaagaaggtgactgacctagagaacttagtcagttagtttgaggtcagtgtttctaaccttcaagatgcagtaaatagtgcgaaagaccaagaggacactctaaaggaattagggcatcaaggagaaaggcttttgatgtggaagagtctctctgcaagtctcttgattagaagaccttaagtattgctaaattggaaggtcaagttcaccgtctggaggaaaaaatggtgaccctagaagagaaaactactacagacatcgtaacctatgatggttactgttttgatgccatttacaactcttgttcgaccaatggagatgtggctggcttcaactgggtagctttcccaaaggatcaagtcaagtttctctctagttgatgtgagcaatgtgaaaatgagaaaatactctgtgatatcaactttgacttgaatgctgatgctctagatgttggggatgctacaagggttgaaggctacaaccgtgagcacactgactttttcatattagaagatgcaccaggagagaacgcaatgcaagtcgaagagctattacagacttagatagttgatagcttcttaaggacgttattttagtccttttttctttggtatttagttttggtgtgttagttgggggccttttaagtggggatatgccttagtaaaaacttttatcaaaatttgctccaatttaattagactttattccgatttttattatatatatattttacttaaccattactgcatgacctctaacacttgcaaagtatttcatgtcttaagtaaactagtcactgggagtaaatcaacatttcttgatatatctttaaaccatgaaagtactacacaggtgtgcaaattttttaaatacccatgtaaacacactagggtgtatatgcccccaagtgatcaaagaagtgccttcattagtcacttgccataccaaatctcattgggctttcttgatcatgagtcttgaggagttgttacatgttgagcactcatccatttagcttggagatttttcgtttggcagtgtttacctacactaaagaaataaccaaagttacctcaagaccaaccctagaagttttactcagcgcttgagagcattgtcatgtttgtgagttatagttgattaataacaatgaagtaccaaaaaactttactcaatgtttttattcattagaaattacatacaattacatacgtagcttatttgaataagaaagaaattgcatttacaaatatacatttttatcaaaaaatctaagttgatccccattacactgatgccctgttggactaaccgtgtaggggacgtaacttggcgatggacctctcaacctatagatggacttcatcgcatcttttttcctcgagagtcgatcaattcacttgcacatggtaaagtgaatcttgtgaagcgagttgtttgaagacagttgctttattagtaatattatcttagatgctccccattccagtaccttggtattggcactagattcaagtggtagtcataacaagccatcttgtatgttccaggttctagtgcttttatgacgttatatggcccttcataggaggggtcgagtactcctgttgttgcatcatttgtatctaggaatactcatcgcaacaccatatct

SEQ ID NO: 378391 - DNA, 3501 bp, Cannabis indica
taatattaataatcaatagacaatacacgaatattaattaaatactaacctcaaaaaaaaaaaaaaaaactaacgaataataataataataataataataataataataataataataataataggacaagagatctaattaaaccaaaccgaaccaatttcatgaaattacaaaaaaaaatatatatctaattataattagattggattggatttaatcttaaaatttgatacaattcaattaataattaatatatattaaaatattatttatatataataaaaatatttttaaaaaatagtttaattaatattttttaggctttctccttatttactaatacattttaattaattaactactccctaaaaaataatttaattacacctaaaactaaaaaaaatagcatacttgacttattgtgtttttctaaacacatgtatagtcttaaattcataggagaaaacctaatagctccttcattaatccttaaatcattttcaatatcaattagattttatgtaattttttttcatttttttaaatttatatataatatttggtgtgtaattgaacatctaattataagactgatttagtccaattaataattaaattgaattaaatttgattagattttaagtgattttataaatctaattactaattaattagataatgagaaaaatattagattggattagatctagggtctaacaatttacttgaatttagatataagaagggtcaaaatattctccacacaagtatcttaagtatcctcctcttgatacttagattggatttccattttaatttacaggcaatgatggagtcaaggggccggaggtttcccaatttttgaattagaaattaaaatacatattttttttatttttatatttattaaccccaataaatttttgacctagctagcctcgtcattgtcgacaggggatatttatcttcattaatttataaccctacaaaaaataataataattagaaaaaaaaaaaagacgttttgttataaagtgatcatcatgtatagtaatcacgtggccaaatatatatacacatgttgttattagttttggatatcaatttctgacaatgtatattatatataatttgataatatgtacgtggatatgattttgtcccgtgatgtacttttataaaatgtattcatagaatgtatttcataatgtacggcagtcgttagatgaggagttatttgatctgagagttgggattgatcaaggagtaattagagttaaaaaatattaacttaccctgagatccatttaatgtattctgagatccatttaatgtaccacaaaatacattccatgaaagtatatcacaacaaccaacatatatatatatttacatgtatgtggcacccaattaaagataagtaacactgttttgtctttttttctttaaatagctagctagtatgttttaatttagaaaaatcatgtaattattatcagttgaaaatagtacagtaatttcattactcatagatttgatagagcatagtacatatggtatatatagagagagagagagagcatattgttatattctgtaaatatagatataattatcaaattaaataataaatatttgatatttcattacacgaataataatataataggttaaataatattataggtatagaactgtatcttttaacatttttgatgtaataaataatgaaataggaaggaagctagggttgaagaatattatgcatgcatggtcatggagtagtgttggatttttcaaagcaaactaaagggcatgcaattaaaccgtgtcggtgtcggtgtgtcagctgcagtaccatagaaattaatatatctcagaagagataatacagtacagataacaaaatctcagctgaaattggatagcctctctacataataatatatatatatatatataataccctatcacaacacaaccccccatgtcccacacacacttgttatggttctatatatataatatatctacatatgtctattttgtatatatataggtccgcatcaaatcctctgtacactgtactcttataagaataaaagatcttctcttagcatataaacattatagatgtatgggtgatttgaaaaaaaaatgcatatttttattattacttcaaaaacaatattatcttatatattcatacatgccatatatgttttcttggtgaggttgccataaaaattatggaaataagaaaactcagcaaatattcttcatttggccaaattttaatgtatgttttctattatttttattagaaaaatatagatgagtttggaagaggaaccaaatactctcaattctagctagcatacaattgatcatttttatttggcacttaatagtgttcaacactatacgacgtgatatcctataattggtttattttattaaatcaaaatatgtagacttgatattaaaatactccaataataatatgttactttttgtagtgcttgacctcttagcggtatgctcattgagaaatggtaagggtataatcttatggtgtcaagcaccataagaagcgttttattattgatattttgatattgggttctacatgttttgagttaataaatattatatgaaaccgataactaactatagaatcacaacatcaatatgttattaggcattttaaagtatcaaatagcaatagtctacacaacatcattatacactatttagctgttgcctaaaatttctcccaaaatacgtggcaattcaggatcgagctaggtggcaatgggactcacgttacaagatacgccaccttaattactcctggagtctattattttaaaggagcaatgatagattagtcatctttgggagggtctagctggacaacatatatatctcttgtcttttaaggggtatgacacattattaccaagtacgggatacaaagtgcatatacaacactcagttgtactcgaggtgcgattcaaccctaccaacactagcatgggacgaacacttagtgcatgtggtatagaggtcatacttctgttaagattattcttgttcatctgataagccttgcagttaggtgtatgggcgcctagcggcatgtcagttttgtgtttatatattttatgttttttttactgagtctatcacttcacaaatatacttgcatgtgtaggttttggtcgagactgaactgagaatgagtttagagctctatgaagattgtacatatcaaggtggttagacctcgagagttcggttctttgggacagcatgggctcaattgtattagtcgctagacgacaatgtgaactaatgtattttgggtcattttgtacatagatcgggatcacaaagtttgtaaacttttgtaaaacatatttagtaaattaagttagtatttatttattgttataaatattaataattatgtggatgtccaaatcttttatttatta

SEQ ID NO: 378392 - DNA, 1913 bp, Cannabis indica
tttctatctgcctttgtagaaattggactttattcactaatcacctccttttgtattacattcatacccatattagccatgattccagttcattccacaatggttccttataaattgctggaattcttcctgaggacccaatcactttcttatctttattgttttcattatttttagttgctaagtcctcttgcctaactcattccacaattttttcacattacaaataatgtcttctaggtctttactctcataatttgaacactcatcattgtcttcttcaaaagagcaactatcttaactatagtccactatatcctctcctcttgggtcttcttcttcttccatctcttcagggtgaaatacccttgatttcccaattgtttctcttgctagtgacttcctcttctttctcttctatatcatcttcctctgagttgtgcaaaattgagaccttcaccttgctttctttaccatattcttcccaaaattgaattattgtcgtctttaaactctctcttatcttcaacctgatgaatagcaatcaacctttctaaaaaaaatcctttacggctctgattggatcgttcaccttaatcaattcgttattttaacaaccctctagcccaacacaatagctcccactttccaacccaccgtattccaaaagccccatatgctgacccataatctccagcccaccatacccaaaagcttatttatcttctacaaaactcccaaccaaccaataaccaaaagcccaatgctttgacttttgatatttggctccaaaggataactttgagattccacaggcccaaaacattttccgcccatcattcctatggagctccaaatggttaaactaaattttctgttgttgtgacacatgccttttaagttcaaacaaatcctaggctttgggtctttgatgatgcttctctaagtctttgatgatgctcgacccacacaatatctcaaatagctgctagaatattctttaaaggcttatcgactaaccctcgttcacctccagtgttttggaactcgcaccatttggcgtctcataacattaccaatgcgacaatcaaccttgagatctgcacttgcattaatggccaataattgctcccctcaaaaacatttgtgtcctttatctccatcaatcaaaggttttgtcgccattcccagtctcttctgtcgataattgcacatccttcgccagagcacttattccaatcattgcctcctcctcccctccgttgagtggcatcacactatcattagagcatccttctaattcttcgaattcttttccttcctctgatccttctgcttctttcattttacacaaagtcatatcttgataccacaatgagttgaaaactccaataaattcctagcttcgaccatttagcttaaaagttctaatctaatttttgaactttcaagtggcaataaatgagatacaaagccctgagaatcaccctccatttttaatcttaaatgagacaaaaaaaattcatctcaatagtttccttgtgaacatccaatagtcccatacaaaactccaattttcctcagagttttcatgtttcataagttcaaaggaaagtcctttgacaccgatccatgaccctctacaatcaaccttgaggtcatttaattgattttcccaagaccaatgaacgaatgataccactgtattatttgttcctagaactttcatttgatttatcttcatgttacgccaaattattattctatcatcaaacatttggctaacctccagtttctttcccagttctcttgacagttgttaaaaataacactccaaggaatgttattctgaggtgccgtatcaacacaagaagtttcatgaagcatgccattagaggtcatataagattgaa

SEQ ID NO: 378393 - DNA, 1620 bp, Cannabis indica
atgtgggactaactcttaatagttggggctacgcctaaggttttaatgagcgatagatacgattgacatagctctctcataacatgctcaacacaagcaatacccgtactaacatgttaaaattttcaatgggaacaaatctcatacgaaaacttcaactaaatccaatagttgcactaataatttaatattcaatgtgtgtgacataaactaagcttcttttatgaataggaaaatgacaaatcaattactacaatgaaaacctcttaaaattacgattaaatacttcaaataaatcatgatccactaattgttggagttttatgccctaaataaaagtcaatttcaatataatcttatttaatatcaataaaagatcaaagatcattttggactattgtctattgctttgtttacatatttatttcatgattaattatttgatatacataaattatgctaaatctcaaacacatatatagtctacaattatagtgttgtcactacattagaaaataattgtgattatatacttcaaattattaagtctcaagatttatcggtgcattgaatttacactgatgtgataatcaacgatgtggtttgcttacacttagacaagtagaatatcttttccaatacattagcaaagtaaacttgtctcaaatatatagtgtttacatcagactggactgatattgacagtgtaaaaatatcataaacttatcgttatatcttttctaagtaaatatcacttgatcttaaatcaatttgatctcaatcctgagatagttaagctttaaacaaattgtatttcttgagttttttaacttgttcgttaccagcttacccgttggtatatcccatacttacatcttgggaactcgatatttcaattgagtgggggtgttaaccatagatatgtacatctaacttatatgtttacttagaagtgaaacaataatttctttttagcttggctaaataagttaaatggtggagtactcattttcccatatttagggtaattaagtttttatgccatatatatcaaaacatatctttattttctcatatttttataaatagcccttttaaaaatgtcttattttgattcatatcagtttgttaatttatattagtatatattataggaaaattctaatcctaaaaagattgcacccatttattctttttatattttttgatattctgatagttttaattttaaaatgtacaacataactatttaagacatcttggaattttttcgtaaaattttgaaaatttagtgtacgaaaataaggttaaaataattttttgtacatatatcttttttgttttataaaaataggctttttaaattctattttttgtattataaattattcaaaatcttataaaatactaccatataaaaaatttaatattaaaaacacgtagcacaatgttttttggatgctggtagaattatatatatgaatttgtggattgtttaaataaataaataaagggaatcttacaaaaatattagaatatgggataacttttacaaaaatactcacacagaaatattttcaaaaataatgtgtttttataaaacaccagtagaacacaaaa

SEQ ID NO: 378394 - DNA, 2925 bp, Cannabis indica
tcaactctcacacttacacccaaaaatctgcttcatctacagaagattcttcatataaatcccaaactcaatctctctcttttctctctcaaagtctcaatcccaatctgaactgagctctcaatgtcatgtctcgaaataacaagttaaggtgatatttataggcttatgatcaagatcctaaagtcagtggctgcaagaaatgagattgttaagttggttagaaataactaagttaaccaacttctttttgaacgaagtcttcacgtcagcttaagtatcagagcctcagagaacatatatgagcttccagactcactgaccaatgacactcgctaatgacgcttccagataggataaagcctattcgagtcgactatccagaactaccattccaggttggacaactagccaacaggagctccatcctagagagaggctagttcttcctgatgctttttcccaaaaggacaagggagccttaggaagaacaataagcaatcctgaagacccttcccggagggacatgactgtcttctaggattggtttccacgagtgaacaactttccatgaataatgtttgcgaagaccttttcctttagaggaacaatataccacatttgggttattaaagaatcacaaaattacaaccctaaatcataaaaatggaagaacaacacctatatttttttttccagatttttagaaaccaccaaatttctagaacacgaaccttaaattctcaaaaaatcaatcaaatgtgactctaatactacttgttagaattctttattacttataaaatatatatcaaaatttaaccgtataaacttaaatctaaatatatctttgttgattcaaagagaaaaactcaaacagcgaaagcgtacctgaatctataaatagtgatgattttaatccatttaatatagataatttttgtagtgtttttaggtaacgatttttcaagaaaataagacttagaattattttttttttaattttctctcttgatgaggaaaaatgagaatagaattgactcaagaaaattttgaaatgtgaccaaatcaaaaaatcataaacaatttaaatttatcaaactatttacaccaaatttatttggtccagattaaaataatttggtggtttaagtttgaaagagagagaaatggtatgaagagcttagaaatgatgtatgaataaagcattattattgttaagcttcttttttagttgggcattattggtaagttaggggaaggaaacatcgtgtagtcttctaagcacgtgcaaatcgttgttattataaaataaataatattctttgcacagtccacaatccgaagcaatttttaactgacaatgtacctaaataaactaacatgttttaagcaaaagataagagtgttgaatcagaggttttccactttgatttagaaaaacttgtctttatcatcataaaactacaactacaccttaatattttattagctacgtttctcggatacgagtcatttgattattctttacaattttgtaatgaagtaaacatgtgcatttgtctggaaaaagcaaaactctctttgtttaatacgctaattgtacccccaaatggccagagagaaacatcctcgatcattcattctacactctccaccacgtgtacactacttatataaatatatgagaattgttaaaatgtattactcttaacatctttttcggtattatattactattagtgtaaagttgtataaaatttaagaaaataactttaaaaaaatatcataactaattataaaaagttacttatagaaagtgttagatattacttgtgcctatctatatatcatttgagcattgttattgggtattagtagtggactagtaataccttctatacgtgttgtattgcgattgactagtaatatttcttaaaaattattatattaaattatatgagacccgtggactaataacgatattaacacgtaggagggtgctaaacatcactatgttttttaccatttctcaaatatatatagggaaatgctgaagggtatgatgcttaacattcttgtgaggtgtaatattgttatttgtacaactcaatatcggatccgatttgttttattttaataaatattataaaaaattactattcaactataaaaacgacatttcattgtagtacttagcactataagtatctcatagaaatgctcaagttaatactaataatactacaaatcctttattattagtgggttgccgtttctggtttcatgaccaaacaactaaaccattatgatttaatattcaagataaaaaaacagattcttcataaaaaggaaaatcagtatatatttccagtataaatatttattttttctttataattgtactgtttaactgctaataaaagttgtataacaaacaccaaaaataataaactgtaatatttttggtatgtttatatatttatacttttgacagtttttctataatgatctaaacttgtattttctatatagagcttgatattcacattaatttcattgattttttttaggcaaaaatatctaatttaaattatcatataaaatgatcatttattatgtttcgtttattaattcaacccaaaaaatttagagcactttcctaatagaaaaagtaactagcaatatatttattttggaaatggaaatagaattaatgtgtggtgaaatctataaataggaaactactaatttatttattttcttaaggaaaaattatttgaaagttaagaattcaaattattattattttttttgtgaaagtaaagaattcaaatgacaattaaataaaataaaatccaacaaccaactttttttttttaaagtaaaaaaaaaaaaaagaagagagtagagagtcaaatgcct

SEQ ID NO: 378395 - DNA, 3038 bp, Cannabis indica
tattacaattgtttcatcataaagctctcttattgcattttttaccctagctttgttgtggataatgttgaatgattaggtggttattcgtgtaataatttatgtatagatagattgactattttcttttcctcttgaacttcttgtttatgcttaaagatggtggtggtggcaaaggaacttgggggaaactgcttgacactgacggtgaatcccatcttgataggaatgatcctaactatgacagtggggaggtattttccgctccagcctaatttatatattctgccagtcatctgtgtgttattatacaggtggattgtgtgtatatccaatattttgaccagcagattaatgtagataaacatttttttgagcaatttttttaggtttatgtacgtttatgctttttgaagttaatccacatgattaatgtattgttttgcctgttaatctttcctcaacaggaaccatatcagcttgttgggtcaactgtttcagacccattggatgattataagaaagctgtggtctccattatagaagaatacttcagcactggtgatgttgatttggctgcatctgacctcagagaactcggctcaagtgagtatctcccttactttatcaagcggcttgtgtccatggccatggacaggcatgacaaggagaaggaaatggcttcagttctgctttcagccttgtatgcggatgttattagcccatcccagattagggatggtttcttcatgcttcttgaatctgttgacgatcttgtagtggacatactggatgcagttgacattcttgctttgtttcttgctcgtgcggtggttgatgatattctacctccagctttcctcacaagagcaaagaaagcacttgtagaatcttccaagggatttcaggttattcagactgctgagaagagctatctttcagctccacaccatgcagaactcgtagagaggaagtggggtggtagcactcacattactgttgaggaggtgaagaaaaagattgctgatttgttaaaggaatatgtggaaagtaaggatgctttcgaggcctgtaggtgcataagggagttgggagtgtccttcttccatcatgaggttgtgaagcgggcgttggttctagctatggagaatcaaaccgcagaaccattaatattcaagctattaaaggaaacagctgatgaaggtctgattagttccagtcaaatggcaaaaggattttctcggttggcagagagccttgatgatctagcacttgatattccatcggcaaaaaccttgtaccaatcactacttcccaaggcaataactgaaggatggcttgatgctacatttgttacgtccatgggtgaagatggagaggtacaaaaggataatgaaaatgttaggcggtataaggaagaggctgtgaccataattcgtgaatattttctctcagatgacattcctgaactcattcgaagccttgaagatcttggtgcaccggagtacaatccaatattcttgaagaagcttatcacacttgcattggaccggaagaaccgtgaaaaggaaatggcatctgttctgctttctgctcttcacattgagatcttttcaactgaagacattgtcaatggttttgccatgctcttggaatctgctgaagatacggccctggacattctggatgcttcaaacgagcttgctctgtttctcgccagagcagtgatcgatgacgtcttagctcccctaaatcttgaagaaatttcaagcaagttaccatctgactgcagtgggacggagactgtgagagtggctcgaaccttggttggtgcccgtcatgctggggaaaggcttctcaggtgctggggaggtggcaccgggtgggctgtggaggatgccaaggacaagattatgaaactcttggaggaatacgaaagcgggggtgtagtgaacgaagcttgccagtgtattcgtgatctagggatgcccttcttcaaccatgaggtagtgaagaagacgctgatcatggccatggagaagaagaatgacagtatgctaaatctcctccaggaatgcttcggcgaaggcctaattacaatcaaccagatgaccaagggctacacccgaatcaaggacagtctcgacgatctagctcttgacattcctaacgccagggagaagttcactttctatgtggaacaagctcagaagaatggttggctcttgccgtcgttcgagtccttgacccccttagacgtttcactgactcaggctgcagcttcttgaggagaacacacatattttcgattgtttctctcatctgcgttgttgcccataacctatattgtactgtgttttctcttttttttttccctttcaaatgctgttgttgcacactcttttttagaggtggatataggtatggggatgtaatgggctcttggttttttcttttttaaaaaatcttcaagtggatcggtcatattatggagattcgttaaatcaccacaaccaatgtataaagttggtttttttacttcgttgatttgctttgtagactccaaattgttgcatcatcctcattatgctctttttagtgctgataatattctccatgcaatgaatagatagatgttttttttcttgctatatttggaaagtctccgttatgcatgaatacattacttgttttattattgctttaagagcttttttgtctgactttattcgggggaatctgattcttttaagtgtcaacttgctacttttctccaaattatttgcttttttttttaaaaaaaaattatttaaaaataacgtcactgacattaaaaaaagttagatcgattagtcgttagaaatcaaggttatagtgaaaatctcaatattactagtgatatctaagctcaaagtccatttcgcaatgtgtttttctagaggccatttcacaatgttatgagcaacaattttaagactactaccaatatatcttttacggtttttgtactttttatggtttttgtgccatttattatg

SEQ ID NO: 378396 - DNA, 6270 bp, Cannabis indica
ccacttccacatgttctctctttctctctactgccctttttgaagtcaaagcaagagccattggtaactttttgtccccatggcttagaggccaaggcttccatcttcatcattgtgtacattttccaatcatcattattttttctcaaataatatatatacgtaaacaagtacattgaaagttgtagctacttaatttgttatatatattaataatattatgcttgatcgaagagtttggtttgtatttaagcaaactaaaagctatacagttttgaagcatgtactttactgatagaactgaataacctaactagccttttcgtccttgtaaagcaaagtatttcttcttcatagggtgatcctttcttcttatacaatagtcctttatttcgtcataaatttaggagcattgttgtttgacatattatggtactcactactcacactactaaatactaaatactaaagtataaacaattatttatattatttattaaattaaaatatgtaaaaactaatattaaaaggtaccagtaaaaatttgtgcttttgataacacttgtctaaatttatattagaaatgtttttaaactaatttttttttttttaatttataatcaaacttctaatcaactacaagaatagacgtaaataatcacattcttaataaagagtcatttataaaagagagataattattattgcttaaaaacttaaagtagcagtttcagtctaagattacacgtatgttttaaacctaatgattatataaggacgatgtttaagagtaattaagaataatctactcaacctttttgttttggagctagcattgctaagacttcaatttatggccctagctaatcttctatataaatatataaaggagaatggctatatggcatttctccttctaataattaatgttttttaatttgtaatttttttaattttttcattttattttcttcttttcaataatttttatacttttattctttttaaaaatgtctcacatagtttaaaaatcatggtaaatttatacttaggttatatgtagatctatcttcttccactttaacttgtctcaaaattagcattatttatttttttatgtaggtaattgataaatttcctctaattaattgtattctttttaagtgaatatatctctattttttcattcactttatcttgtctcaaaattaacattatttgtttttaatataggtgattgataaacttaatatgtacactcaaaaagttcaaaagaacttcattaataatgtgagattattcgataccccaaagaatcaaatcaccaagaactatgggttggagttgaaggcggctccgagaaggcgtaattatgtggacggttcatggtggttaaggtcaagactggctaccaagactacctatcgggcaacgtcagtggttaaggacggttcatggtggttaaggacggttcctcactcaaccagagaaggggtctagtggtaacgtcagtgacaggtggtggtgacagggatcatttaatggaggagagtaatctggggttgccttcgatgagacataatcaaatggccatgaatatagggattatcaataaaaataaatcctcaatgtcaggggaggcgctaatgagggaggaaaacgtgggagagtcggtggataattcaaatgatgggttgatttttatttattctaaaagaaggagagtgattgagggccaagctagtgggccaagtgtagtcatagatgtagacgtgggcctcactaactcagtggtaaatgaccaagtggttaatgaagataatttggataatggtgaagacataatggatcacgagggggttacaaaaaaacttgataggtgtgggctctgatttcaagacccaccaagagtcatgaatgtgttaagttggaattgtcgggggcttgggaaccaacggagtattcaattccttcgagagactgtatctcaaaaaagacccaatattgtctttttatgtgaaataaaatgtcaaaaagctaaagtggatgggcttgttagacttttgggctttgatgggacgtttactgttgatactgttggtttagctggtgggcttgctattctgtggagaaacaaagaagatgggagtttgttgggttactctaatcaccgtattgaccttgttattcattctgttcaatttggcaattggaggcttactggactttatggagaacccaacagtagtagaagacaacatacttggaacctgatgcatatcttgtccactcgatcagagctactatggtgtattattggtgatatgaataatattgtcaaataagaggacaagaggggggtcgaccatatcctcaaaggcttctgtcgggtttcaatgatgttttacatcagtgtggtttggttgatattgaactacaaggtcatccgtttacgtgggagaaaggaagaggatccaatcattggatcaagattcggttggatagagctttggccacttcggcttggcttcagctattcccacaagctactctttcaaatttagatttctcaacttctgaccatgcacctattttccttgaacccacgacttcaaccacttttgctccacatcagcgttttcgctttgaaaacacttggttgaaggaacctctttgtgctaaaattgtgaaagattgttgggagaatggtcaagctaatagtttgagtggtaagttgagtttgtgtgctgaaaaactcaaggaatggggtaaggagataactgggacgcttaatcatcgtattaaagaatataaaaaagatttgaagagacttcatagtaaaaggaatgtagcttaggtacaaagttacagtgaggtgaagaagaagatttttaaggctcacgatcaaagggaaagctattgaaagcagagagcaaagcaattttggttgcgtgatggcgatcaaaacagtagttatttccacaaagcagcaagcagttggaagaagaataatcaaattgatcaactgaaagatgttcatggtaactgggttacttgggactcgggtctaatggaagtgatgaatgagtatttccatggtttatttgcttcggccaatacaagttgtttagaggtggttgattgtgttgctccagtcgtaccggccaatgtcaacatggacttatgccagcccattgaagaagaggaagttaaggaagctttatttcaaatgcatccagttaaaagcccagggccagatggaatgacccctgctttttatcaatggtgctggtctattgtgcgtaatgatgttgtgcagtgtgttcgctctttcttttctcattgctctcttgagcaaggttgcggtgaagctaatgttgcttattccaaagaagaaaaacccagaatctatgtcggatcttaggtctattactctttgtaatgtcatgtataagatcatcacaaaggttatggtcaataggatgaagcctttcattgacttcattgtgtctgaaaaccaaagtgcattcatcccgggtctttatttaatttttcataacgttttggtttcttttgaagtactgcactatctaaaaaggaaacgcaaatgaaaagatggttatatggctctcaagcttgataagagcaaggcttatgatagaattgagtggtccttccttgaagtaatgttacgtaaactgggctttgttgagaactgggttcaattgatttttaaatgtgtaacatcggcgcggtataagattattcatggaaactatgcagttggtccaattattccttccagggggattcgtcaaagagaccctctctccctatatctatttattctctgtgcggagggcctctctactttgctttgaagatatgaacaaagagggtggcttcatggttgtaaagtagctaatggggtgccaaggatatctcacatgctttttgccgatgatagttacttatactgtaaggctacattatctgaggctgctcgtgtcaaagaagctctacacaagtttgaattggcttcgggacagaaggttaatttctctaagtcttcatttttttcagcactaatactattgagactttgaggaatcggctttgttgtgtcttggggatggggcctgctttggatggcagcctttatttggggctgccaagttcgatgggtcgcaataaaacaactgctttgagtttttttgaaagagaaggttcgaaaaagattacaagggtggggatctaagttcatctctagagcagggaaggaagtgctaataaagtttgtctctccttccaagttatgcaatgaatgtcttcttattacctcttgaggtcataagagacatggagagtctcatgtccaattattggtggcagtcttctgcaagcagtaactctggtattcattggatgtcgtgggaacgactttgtaatcataaaactgaaggaggtatgggcttttggaatctatgagattttatttggcaatgttgaggaaacaaggatggaggctactcatcaaaccagattccttaatggctcgcatttttaaagctcgttattactctactggtacgcttctaataacaacttctataggctctaatcctagctttgtgtggaggagtatacttgaggctcaaaatctggtggctagtggtgttaggtgggatgttggagacggcaagaacatcaatgtgttaagagatctgtggttgccggataaagataattcttgggttatttcctcacatctgagccttgaaaatgctaaagtagtcaatctaatgactatagatggtttggagtgggatagggaggtgttaaatgatttatttgagccgcgagacagggagcttactctccaaattccaatcaaaattgtttctactcaagaccatttgatttggttttgtgagttgtctggtttgtatactgtcaaaagtgcctataaacgtattcaggagctaaaaggaatggtgaatgtggatgagtctcaagtgaattaattttggaagaaattttagaacctcaagatgcccccaaagatgaaaatccggtgtggagggcgtgtaccaactgtcttcctacaatggtgcaactcaggactaagcatgccatgactaattctctttgcccagtttgttcacttgaagatgaataaatctcccatgccttagtgtcttgcccaattgttaaatgctgctgggaacgagtggatataccctctgatatgtagcaggataattgatttttggcctggtgtatagctaatttccagtgcctcgactgggagaaaaaagaactactagtggcagtcgctttgtttgtgtggaatgcgagaaacgatcgagttttgcaaaataaaatcattggtgttgacagcatcatatcatcagcaaaaggataccttaatcaatggaagagtgctcatttgactggtttggagctcctgtctgctggtttgatacaaggggacgaagctgagcattgggttgttccaacggaaaataatgttaaggttaatgttgacgcagcaatttttggtgaaactcaacaatttggaattagtttggtggctgagatgctcggggactacttatcaaaggacacatatagtttttcatgcccattcttctcctgaattagctgaagtcgtgggaatttgggaagccttaagttggatcaagtcaaaccgttggcatcatgtggtacttgaaacggattggatgtcggttgttcaagccttgagaagttaaattgttatgatttctacgtttggtcaagtggtaaatgaatgtaaggccttgcttaatgttttaagaaatgttcctatttattttgttcgacgatcagcaaatatggtggttcatgaatttgctcttgcctctgtatcattccctgattttaatttcagtttggattctattctaactgctttgttacctaatttggtaactaagatggttatctaataaagtttgatttttcattcaataaaaaaataaaaataagttattttgtgggaaaaaatagaacaaaaataaatgttataaaatttggaaaaatagaataagataactgattggttacttactttgaggaggtaactcgttaccttaaactattattcccatattttgtggagttctatttgcactccacagaatgataagtgcaccataatattttttaaaaaaaaataagcttaaaataatttttaaaaatcactcttaatattttttttaaaaaaaa

SEQ ID NO: 378397 - DNA, 1870 bp, Cannabis indica
ctcacatgaccatcccaacaaaaattttcatggcatgccactctctctctcttaacctaaaaacaaaaccaaagaaatataacaattttttttttctttctttctttcaataatgcaacacaatggttttgcaaatcggtacttcaacacaaatgatttctatctttttttttacccattaattatacttgcttgtattgtacttacaaacaaaagccttttcatttttcaaacgaaagggaaacatgtacttactttggtttgattgcacactctaaccacttgtgaccacccttaaacatagacctatcagccaagccaagtggcaacaaacaagatcccaacttcttaagcttcagatattattgctaaagactcggggccaaaagcactagtctagccacattataggattaattacagcttaaaattcagctgtattagtgttagtttgttacggtaatttggtgtacatatatttgaatttgatgagtatgggttgttagtcttttctcctttttttgtatataagaagattctgtaagcttattctaatgataaatcattttcttaaagatgtatcacattatttatgtcgaatcaccaaatatgtacattttgggttcgtttggaacgccgtattaaatcgtattgtattgtgttgtattatattgaattgtattttatacaatatttttatgtaaaactatatgtggtattaacttttatagacacataaatatataatattttagtataaattaaagtttaatatagtattatataaaaatacgatatataattcaattcaatataatacaatacaatacgacctaatacaacgttccaaatgagccccttaactcccaattaataagtctcaatagaattgatacattatgcttcatcgtttataaaaaagaaggaaaaatcggagtaatctttcaaattatcaagacacaactttatgtacttttatcccatacaaataataataaaaataaaaataaacttttgtacttttagatgatttatttcaaacatgaatgatgatatatagtccaagaaatgtaaagatgacaaaatgggacactttttcaagttgcagggtttcttgatataatcaaggcgacttctaagataaattatgatctgtattgccttaccattaaaagaatcgaatcaaatcacaattcgaccttgattatatgataaagacgacttctaagatagatcgtgatctttaccgcctcaccattaaaagaatcggatcaaattacaactcgaccccgattagtttttttctttctcattaaccctttagaaaaaaaaaaaaaaacttagattaatttaataagttttgaagctaggtgggaaaacatatacaaatattcattctagcgttttggtatgtaattaaaaagaaaattgaatatcttcttgtaaatatatattggcaattagtaattaaagtataaattcaaaatctattctttaacaaagttatgctaaattttacttgtatgaaattattagttaggttaaaaaataaaaagaaactattgtattttcctaattagttaaattattgaaaaaatgggtcagtcacgccccaaatcatacaggttataatggagtactaaaaaaataaaaaaattacattatatacccattttactttatatgctttaatttaaacttttattttcatattctttaagatatacctacttttatagatgatgtctcaattatactctttaagttaatgtaaattatatgttagacttaagtgaagagtgatgatttattggacaatccacttacaaaagtgagtacattctaattaaatataatatgagagtatttt

SEQ ID NO: 378398 - DNA, 3143 bp, Cannabis indica
aatgatatctgagtcatgatacatagccctgtattgaacaaaaaatataagaatcaaagaaagaaagcaattaaagctggttggaaggtagctgcattgggtatatcgtaacatattgtaccttgccaaagcaagccgagctctttgtccacctgacaaattcactcctttttctccaataaaagccatgtcacctccgtccatcagtgaaatatcaatgtccagcgcacatgcccataacgtgtccgagtatctactcaaaatttaaaaaaaaactgaaaagaaataaaccggtaaattaaaaaaaaaaaaaaaaaaaacgaccaatgccctttcaagataaacatagtgaatatttcaaatatacagtacatgagtttaaataagaatcacactttcaatattgagaaatggtcagcataatgtaatcaagaagaaagtagagagttttgagttgttgacttaaaaaaccttttcgattataatccttccaaacaatatgttatcacgaatagtaccagattgaatccaaggaacctacaattcaagcaaaaaacatataagcaagagatttatacccaaaagaaagcagataaaccaagtatctttagagcaatgactagcttataaacctgcggtacatatgcaatagatcctctcgactgtattgaaccacagaccagctgtgtttctcccaaaattgaattcagaaaggatgatttacctgaaccaacctgaccatattcaagtaagttgacagaagggtgaactcaatagaatttgaagtaagagggaaactgttacctaagctaaaagtttacattatgaatttaccaaaactctttgtaaataaggcatcaaacatgatagaggatcgataaataaaaatgtgtaaagtaaattctgacctctccaataactgcaatatacaaaccccttggaagacctagactcacattatacaagaccaaattccattcctccttatcattgattgagtaagcacaagatgcactgtggaagaaaacagccatattttcaagggcatatttagactggttattcagctgtaactgtgggatagaatcatctgttgtttcctctttggacttgctttcaaaggaagataaaaactggctcaaccgtctggtagatatgatgacctgagaaaaggtaacaagatcatgattttaaatcaatcgttttaaaatacaaactcccagaaataataaattcagagtacttacatctatcaagccattgataacccatgggaaggagttaagaggtgaaattaaagtattaaagagagcaagacaggtgaagacctgcataagagatcaatataaatgacatactctacgttttttattaaagataaaccaaagaacagaaattgaaaaagaagatatgatgcaaatgaaattaagcaaattagagaagtagtaatctagtatacttgcttgaaggataattagaataccattgcagcatcaagttgatgacccattaatgcaacgagcccaaatgtgaaaagagagaacagggttggtgttgtagcccaaaaaaatacacaccatgcatccaagtacttccgtgtctagtgatacagataaaatattattgttaaaaacttactcaaggtattaataaaaaatccagtagattgtataacccttaagacactccaaaagtaaacatcatacgcttaggtgcatcacttccaaagttcttgtttccatcaaccagtgagagaaaagaagctcccagccatacatctttagagtgcgaatatatgtcaaaagttcacctgttctcctaatcctggccaaaacaaaaaaaaaatgctacttattgtttaaaatagtaaatattactaattaaaaatgttgttgtaatagttattatatttctctaaattttgctaaaaacaaatcagctagccaggacaaggtctttgtcagcaattcagccacacttctgatttgcataagcatttcattccagacataaggggacaaccaaaaaaacctaaaggatggatcaaaagtaggtgaagaacaaagaaaagaaagattgtacttcaagaattattttttttcttttgctctatttacttcaagaaacaaaaactttcacaatagaatatcggctctcctcaacctgctgctcatgtcatgaatgaaaaaaataatatttaacaaaacatgatgagaacacacttcaacttgctataccagaaaggaaaatgagcatacctttcatccttttgcttcatcattttctcactagcccttgcaatcaatttagatatccacttattaactgcaaacaagaaatttcaagcttttaatacgagtcctcttaaaattaaaggcataacaacatcatatgtatcatgcatgagagttgaacatttgaataacatagtttcagctaccttcccgtccacataatctgacagtttataatttacaatgctctaaaattcattatttctagtttgattaaactagctcaatcaaaaattggaagcacacaggcaatgcaaatatgtatttacatgtctaaaaaagataaccaaaaattttgcaccaaagttaacttgatccttagcatgaatggtttaatgtatcaccattatcttctattaatatgtctaagaaagataaccaaaaattttgcaccaaaaataacctgatccttagcatgaatggtttaatgtatcaccattatcttctatttagtagtacttccatatagggtctttcatccgtaaatgagtacagaaaatttattcaaatatacaaaggaaagaaagaaaatctgctcattactgtacctgtgtgccaccaaaaattaggtaagatgaaaataaatacctggtatcaatgcgatggtaatagcaatcccagaaacaaatgcaaatttgacttgagtatacaaaaggaataaggccactccaatttgaaaaggcaagctgaaacattcacaaaaactagtaaccaaactacggagaaaaatgcacaataaaatgcttatcaaatgtaactaatctatttttacttgctcccaggctgtgatcaaatgagaatggataagaggattctcggaatgacgtgagggggtagggatggctatat

SEQ ID NO: 378399 - DNA, 6442 bp, Cannabis indica
tatatatatatatattaacattaagggtgatcgggactatctaactgaactcctactctattatgcatgaatgtatgacctttttaatcgtaaaataaaatatgctattgaaaatagtattcttcgtcatataatgtctcataaactaaagttaaatagcataatttgattctgtttctttgttttaagggatatttacaaaggtcaataatttatgtttttgtttttttgctgatattgttaggcactcaaaaacagtcacgttagaatatagactagtaacaacacagtatctcttcattctaggaacttatatattttacatgaaatccttgaactatctgtatgaaagtaaacaatttagttctaaagtatccgttaacgctgatgctagctgaaattctttgttatgctatgaatgcagtggatatgtatctgaaattcggagacaaaactggaagatgtgctggccatttgctttggatgataaaaaggataataaggttgaaagtgaatccttgcttcctcctttaattgctccgaaattcaaatggtggtcttgccaaagctgtcagcaggaaataagctctaaaggaactgtaaaggattatgataattctggcacaattggatctcgatccaatgacactccctctctgatgccatccctttctagttctgctacacatgatcagccgaattttctgcaagatccatctcaaaacatagttgagaaaacaaaatttgatgtcaaacacttttactgaggtgaataggagtggggaacaaattccctcctacagtgacaagaaaaaagtgtttgctgcagatgcacctaaaagcttcacaggtatatatacaatatattattaaggacgagtttaatactttgaatatcctaatttgctaaatttctagctaatattccccactattttttttctttgattttttgatatccagggcacaaaaatggcttagaaaaggatgtggttcgtgaatgctctagaaaagcttttgtcccactcaaagtgatcccaatatgatgaaggagaaacctaaatgtgccgcaggtatatttacagtatgttaatttggaacctacaaattttcttaacaagtcagatgggtgtgacattgttttgtttttgttttttttttaaagcagaagctataaaaccggagcggaacagacttttggaactctgtaagcatagctgcagaaaagatgacattacggatgttgagtttccaatccaaaagtgcaattctaaaagctccaccaagatgcttcaaacagaaaaagaaaattttgcagctgaacaacacatggaattgaagaaagcgtctgggacatctgtcttagcctgtttgcatgatgaggcaggcaatgatgttaacagacaaacaaatggattaggtttccaagcgttagatgagtgtaataatggatcatctggaagtgttcaaatctttgctggacaaaatcctcaggatcataacattgataagtcaagtggcttacaacgtaagaaaatccgaaaggtgcgtctgctgacagagttgttatgtgacaatggagatgcaaagactgatcatatccgcactgaagactctctgtgtaatgctattaacaatgcatctgcgggggcaggaatggtttctgttcccgtaggtcaggtatctttgccagaaaattgtagagatgggttggtgataataagaaaaggaaaattgcctcaggaagaagaattgaagtcgaccgaatttgagttctcacagtaatatgaccaaaaagttttaaatacttcaaggcaggagaagaaactgctaatgcaatttcatattcagtatcaaaagaagattcccctactggattctattttgcagaccggtacaaggagctcatggagtgattatagaattgatagaaattctgttgcggtgaagaagaagaataggaagaaccaaataattgacaagcatccttctttagttccaacaggagacactattctgaaccaaacccgtgaacaagttgggttttcaacaaagtgttatacttctgtcaatgataaagtttctctcaaagaagtaaaagatgcgtcaagtagtagagggatggacaaaactctaatgggatcttcaagcaaggagaggaaatcatcatttaagaagaaagctaagatggcagaggttgatgatggacaggcacctcagttccccttgaacagtagcttggtcagaaagggctcagccatgaggaatgatgatgttgtgcatactgggcctgtaaacgtttcgtttcaacaggcagaaaatgcttgtccggatgtagaatcacatctttctttcggcagctacttgcacacacaaagggacaagtataataagaaatatactcctcaagttaaagatggcctatcgtccttcttatcttggaaagaatgcgcccccgtggatcaaatcaagagaacaaaagtggatacaaattacatctcagattcaagcattccttctaataagaaatatactcctcaagttaaagatggcctatcttccttcttatcttggaaagaaggccccgtggatcaaatcaagagaacaaaagtggatacaaattacatctcacattcaagcattccttctaactccacctgtgcattttcgcataaccaagttcatgctgaagtcagtaataaattaaccatgtacaattttcctgttttgaatgagaaacaaaggagcagcactcaaattgaagaaggatattgtcctcttatgaagcaagtggtatgccctttactgttttgcaattgttaaactagttgtttcataattgcttcctgttatgcagttcattacataaatgtcatagtgttactttctaattttaagatttcttaggaaagattattccagaaaaggatactcttcttaagaaaaaattgttaacaaccatttgagggcttaagctgggaaaaaatggttttaattatgtataaagaagaatttactattttgaattgcttcattttaaacattgtgtatcattttgtcttataccttaacaactatgtagtatgttgggtgtgttttaatatgcatgcatactacatttctgaagagattcccatgattttcatacttgaactgaatttaaagtggttagagctttgtttattttttttccgaaatattttagtttttcattaactttgtatttattcactcttacaaattattagatagttatcatcagaagaatttctaggctgtctttcaaagttggacttgtacttggatttctgctcgccttccttagttgagcttaaagagcttttaatttgtacagttaagcccagttttggcttttgtttatttcaattttatcaaattttaatcggtggttcattgggggcaacttatgcttgtttttcttgtttcccagcgagtaatttatgtatagatctacacgctataacagtagtgaatcctttcatatttccgtcctaaactactataatgtttctggtttttcattctcaatttggttttcgtaataatatattttctcaggatattcctggtgcgagcaacaatcctcaaacaattaaaggcaaggaacttttagcagtttctagaaaacatgctgatgaaataactcacaatgtatccgagcagggaccttcagatgacatacccatggaaattgttgaactcatggcaaagaatcaatatgagaggcgtctagacactgctgaaagtaagaaaagccagctagaaccagcaaaggaggcaagaaataatcagattataggttatgataaagtctttagcactaaggagttgagattatttgaggagacgagtgagaaaaaaaattgtcgtgccagaagtgaaagaaaagacataggcacagtaaggaaaaatgtacgaccttccaaacagcagtcggttgactatttttctcctagcaatcgagaccaatttgacatcaagcaaaaggatcagaaaaagttctccagtgttcattttccttctattaattctggtcaatgcagttgtgctcaaaattgcaaatggaatggagatgtggtgggccgtggattttttcaagctcgcatgcaaataggagcttgtgatacatgccagattgattcagcccggaaagaagaggcagctcatttctggtcatccaaaatatcacatcatgcgcctgtaagacataaggctcctcaaaagacagcctctcagtctagtaacctagatatcctttctaacggtcctggttttctgcataaggggaatattctggacagagagcatgagctgaagtttttgaatcgaaatgctaccaatcttgaaaagcataatcaaaatgttggttctgacgttttcaacagaagaaatgtggagtatccattttctaataagcataatggggttgaacctcagcaaaatctgatgggatctttagatctgtattctaatgaaaccatacccgcaatgcatctgctgagcctcatggatgcagggatgcagtcaggtgcagctttcaagacgggtggaaactcaaagttcctcaagagggtctcccctcctgatcataactccaaagagtattctcttttagattttggcgttcataagaaacacggtgatacttctgaagggccacttgattattatggtaaaaaacaactttctgagaaatcccataatttattccctgtcaacgcaaaaattggtacgtctacttcatcgccacatcagggtaaaggttttgaaagggctaatgactttatgggtcaagtatccttttcttctagaaggaaagagaaggtgcaaagctctagttcagctgcacagagtcgaggtcgtagagctctaaattctatgtttgcaagtggtggttttgggacaagtcacaatgccaatcctgttcatagtatggagaaaggttcacttggtgcatctagttcgatggttcttcctttgcaacttcacactacagagaattcaagagaacacaagtttgcagttcctcatactagtggaaccttttggcctccaaaatccacttctgagtccacaacctgctccactaacaaaaatccagctgattttagctcgccagaggctggaaatgagttcatgattagaggtgaagacttgaaatttggaccgagaaagagacatggtttaactagtgcagaccagcgcaagcaacagagaaacgctaaacggacaacagaaaaggaacgccccagacattaaaatttatgtgaggttcatgatttgcgtcatggtagtactttttctcctactattcttatacttaccaaattgctttccttatttactcttccattttagaatgcttcatataaaatagcaacacatctttttgttgaacacttataagccaatggttgatttgttcaatcttagcaggtgacaccttcgatagccggccagtcattcgtcatactagtcagttgggaaactcaatagtactcccttttgctatggtggtctcagtgtcaaggcctgtatatttttttatgccttgacgacttgttacaagtaaaactatatctgatattttcgggtttcatttgccttacattactgttagagtacacaacatatcccttcattttcagaagggtttactctttttgtttctctagtctttgtctcggaagctttctcattcctgatcgtgaagccagggaattaggtagcttatatgttatgtgttgttggatttgtgtaaatttagaaccccttacgggtctcatcaataagagggacttatcgtgtagtatactacttgagttgagttgtactttctaatagtgtctgccctccttcaaaaaagaaaacttgagacaatgtattgctggtgtgattttcgacattataatactgtagaagaaaaatcaattttattctttatttactgttaatctcatggttattttacagaaattgtaagagcatgtttcacattattttctgtttgttgtttttaaaaatgtgttttcgaaaatgagaataataaacggtttttataatataaatcgtatttggttaatgttttctaaaagcttttttcattttcatttcattttacttttttttttttaaaaaaaaaaatacttcaatactttaagaccctgatatgaacaatacgtgactcgaatcttatccctggctccaaattcaagcccgaccccgaatttgtgaaccggccccaaccttgaacttggacctcgtctttgataagagaaagtggtgagagagaaagtgatgaaagagaaagtagtgtgagaaaatgaggagagaacgtgataaaagagaaagtgatgagaaaaaatttagagagagaaagtgatgaaagaaaataatgttgagaaaaaatttagagagagaa

SEQ ID NO: 378400 - DNA, 5708 bp, Cannabis indica
aaaaaaatatatacatacgtatataatatatagaaaaaaaaagaaaagaaaaaaaggttcttgaaattattcagttagataattactacaaaaaatttacttttagcacaacaaaatttgtgactaaagataaaaaagttgtggctaattataaattatcattgttgtgttgtgactaaaaggtccgtggctaaaaatattagtcacaaacattacaatttgttgtgactaaatgtatttttagtcacaatatttgttatgactaaaactaaattagtgacaactcgtaactaaatactatgctttagtcacaagtaactttttgttgtgactaaaaaagtcacaaaaaatttatgttgtgagcaaaatattgtcactaaaagtacgtatatgaatatatatttaatgtatcgtgaccttgaaacaactcaagaacttcaacaaaatatttaccttgaagctagggtagagactcgtgctaataacgtgctataaagtaataatataaaatatataagaagaaaagaaaaaaaagatgaagagaggaaaaaaaaaactaattaatgagaatattcagttatttattttaatagaatgaattcctatttatataaaaatatgactaaaggaatggaaactaaattaatgtgataaagaaaagtaccttaatgataataataattaatttagtaatttagacatgtataaatagtataaataatatttcataacgaaaacaaggtgaatccactagaagcaaataggcaactatcactatagatagatataaaacacggaacttaaagagccaaccatccatctaattacaaattgactctttccactttggcgaagtaaaacgagcgaagcaattctttggatttgtgctttgacttttgtatatacctcgtctccattgattaggacaaccattttaacgtttcactaagacaaacttgttgtggccacctatttatttcttcccttatcatttcatagttacaaattactaattatgaacgtttcatagttacaaattacttactttactttgcataaaaaaaaatctacttagttgttgcgttgcacatttattttgccagtcagtaaataaaaaataaataaccaaagttgaaaccactaattatgcttatataacgctagtatgaatcaactatcaacaacaacaatagcctacctacgcttacgctgcggccatcaatttcataatacaaaaaaaactaatttcgtgggcggaaacctttttgtcgaaattatacaaaaaaaaaaaaaaaaggaagctgtctttctagaaagggttaaaagggttcggcaagtaagtccgagaaacttcttgaaacaaagttgacgcacgtgacccattcggcacgtgcctctcctttgtacgggacttcggataatattagaacgacaaactggctgctcttcatcaattacaaactctttgattagctctgtggcactgtttaagccacggtttgtcctgatgatctacatctaacggctctgatttaacctcaactccagctggctgctgctgcaaccgtagattcatcgcattctcgaccaccaccgccgccgccacttcttcaccgtcgtcggctctagctcgtttgatacctaaagttgagtcgatttcgtcgccaaaccgcttaccaggcatcaaatcaagaggtttcatttccagaaattcctctgtttgaaaactgctatgggattgaacacaagcatagttcgaaaccatattgaagatactactgcagagagttttcatttccgctaactctttcttgagctgctggttctccttccttaacctctcattctcatctacgagctccgtgggagctattatcgatgacgagttagaggaaaatacttgctcttcatccgaattcgacggcgatattataggccttgccgtagggattgccgctactgtcggcgtaggtgttgcaatttttcggcgttgtatttcgcataggagttgtttctcgtttttgcgaaagaagtcgtttgagaattcccaccgatcaggaacaaccttcctaaatccctaaacatggtgataaagaaattagaaaattttcaaagaaaagttacctaaaaatattacaagaagaaaaaattggaaacttacataggtgttgagttgtctaacaaagctggaaaagttattgtgcttgaaatattttgggagcaaatctcttgcaaaaacagtcggatcccaaacgatgaaggtagatccgtcgtagttccaagagatgacgtcgtcaatggtgggatcgtcgaccagctgataactcttggtcaagaacggtgtcggtaatggcttttgggagtcggcggcagataattcgccgttagtctccaccgccatggttgaattatcttcaccagatcacaattaatataattattaactataataataacagaacaaaaaaaaatgaaagtggaagaagaagaagaagaaagattgaggtgttggcaattttagaaggttagaggaataataatagaaaatggaaagagtttggttgtttgggagttgagaaagataaaaagaaagagagaaaggaaaccaccaggcgaagctactacgttgttacgtctttcctcgagaaacttccaagattttctcttgccttttacacgtgttattttattaacggattaatttattttttattttatgttctttaattatttttagaaattgcgagctagctagaattgttacatcagttatatcagtgagcctatgtctaattaaatttaaaaagaggaatgttacttgataaatattcacgaagatggggaaaaatgctctctaaggagcctacttcatagaagttcatagagttttgctcttctcaactaagctacctcactactgcaacacacagttagttatcacactccatggatcctgcagctgtttcgaatatgttccaggatgccgttcagatttcgcacgatgatatcacatttgcccttaatcccggtgaagtggatgagccagaggaggctaaccaagtcctactggggaaaattatcagccgttataagcttggtaaggctgcaattcagggatccctcaaactttcatggaatgcgattaaaggatggaagtggaaggagctcgatgacaatatcatccaattcacatttgctaaccgtaatgatgctttgaatgtcctatccaggcgcccatggttcgtgtgtggggctctcatagtaatcatgccgtggccatcatggctatctccatctgaagtaagatttgataaaacacccatttgggtgaacatcaacagcatccctccattctattggaacctctccaacctgaaggaactcgcatctaaagcctctcctgtatgagcttccttcgggtattgaagacgccgtcggtacgagttctctacgcttcagagccacaatcgacctcaataagccactattctctggattcttcctccgtagacaacgtctcaaggatctgtggctgcaatataagtatgagaaactccccaaaatgtgtttcaaatgtggagtcttaacgcatgaccaaagcctttgtttcaaacccccaactgtcatcaaggatgaacaggggaatttctacccaatgtacgggatatggctcaagaaggatgcaagtgagaaatcaacattctccactccctttgccaaatggttccaggattggactctacagaagaggataatcaatgacccgaccctacggaaccagataaaagtgcagaaggcacttaaaaatggcgattcggatgaacttagggaaagccgaagacaacttccctccaagaaacggattgtctccgacgatgaggcggaacaaggtggcatggtcattacccagctccccatggtttatctcccaggtattggagaagttgccccctttggaaataatacaaaagttgtctctattctggaactgcaacttgcacgctgtaccgatgctctaccacaggctaccaacggtactttgggaggcaggcacgcactggaggcagaagagaggccgattgtgacagaagctgaaaatcccattttggaggaggcagatggggatgaagaaattcatggcttggaatctagccatttagagataagaaagttgaattcaaatgaaacacaccaaaatgagggagaggaggctttcaacaccagcaccaacggggccccacctaaaagcccaactaagccttactataacccactccttggtactcaagcccaactagtggattggcccacttctaagtgttgggctgatcctaaagctagagagcttttaatgggatcaataactgtggacaaatattttagagagcccaatctccttagcccaatacttgatattgaagacttcagagttcaagagcacctccaaggcccacggaaaagaaaagcatctgatggtttgatctttacacctccaaaaaactctgctacttcacaaccaaactcgaaaatacccaactcaagagataatgctttcaatgagaatattctaccaactgatatggaggcctcttcgtcccaggtggagcgagaaatgctcaatgacccctctgttccgacccaattctcacctgggatcaagacggaaaatggttcgactggccgaactcaaaggaccacaagaaagccaccggccacatccctggaattccctaccccgaagcaaagaggcagaccaccgaaggatcgtagcaatcttgcagcaacgccaaaagcttttaaaggaaaacacaactccaagtcaagggtgggacgaaaatcaacaacactaagccactgggaaggtagttctttcgacttgactgtgaatttagataatcattttgtggtaattgagaagaatgaacgaccgaccaccagctgcataatcactgaaatatccgaagtatcaactagtcaagacaaccaaggcaacagacatgaggattttcgatttggggctacggagacttgcccagaaaagtctccaaagtcgccatgaaaattctatcctggaattgtcgtggtctcgggaattccacgacagttcgacaattgacggcgcttatccgtcaacataatcccgaagtggtaatcctttctgaagttcggctcttaagcaccaaatttactagaatttgcaaccaattgaagtttcaaaattctcattatgttcctccagttggtaatggggggggacttggcctatgctggatgaaaggagttacttgcaacatccaattcgcaagcaggttcttaatagttggggaaatctcttcggacccccctggatgccactggaaactcttcggtgcttatgggccaccacatagcagtgataaggaagaattttggactcatacaggggaactagctctggctgcgggtactccaatactactttgtggtgacgtgaatgggactctgaaagattctgaatgtttcaactatgttagaagaagcaactcatctagatactcatttgactttaggagaatggttcagcgagtcggtttggttgatcttggctatctgggccctggatttacttggatcaaagatggaaattgcagccacctgggaagaactctaaacgtgcaaggctagatcatgggctggcctcgccaaattggcgtattctcttcccaaac

SEQ ID NO: 378401 - DNA, 4720 bp, Cannabis indica
  modified_base (4670)..(4670): a, c, t, g, unknown or other
gtactcaagataaaagccaagggcaaagcaaaagccaagggctaaacaatgaggccaactctatgcttataaaggaaggaaatactcaagatgaaagacaagaacagaacaatgaggatcatttgaagcaaacagaagaagaaagtactccggttgaaagacaaggaccgaacaataaggatcacttgaagcaaacagaagaagaaagtactcccgttgaaagacaaggacaaaacaatgaggatcacttgaagcaaacagaagaagaaagtaatccggttgaaagacaaggacagaacaatgagaatcacttgaagcaaacagaagaagaaagtacacaggttgaaagacaaggacagaacaatgaggatcacttcaagcaaacagaagaagaaagtactccagttgaaagacaaggacaaacaacaagttcatcttaaagcaagcagaggaaagaaatgctccagaagaaagcaaagagcgcagtagcaaaataacttgaagccagttgaaaaggcttaacatctcaaaactgttgagattccaggaatcattgttaatttgttcaaagatcaaatattgttttttagtccatatatcttattttctcttatgaaaagaaaagtgattccattttaacaatggcagatgctttgtaattaatgatgggtatcaaccattcgagcaattcaattgtagaaacactccacagtacagcaaaaataaacaatcaagtactacaataacttgttcagaagcgtgattgttctttcttgtacattctacaaccttagacttgtgtcttattgttcagaaaggttgtgttacactaacgcttccataaatcattcatacaaatacaataactaattcgcctataatatcacaatctacggaagatgatctataattaaagaccatgattctataacttgagcatgtttgccatacacaataaagtgtgaacttaacataatgagcattcagacattttcatgtactccatggttagtcttctctactgttggaatcatctgaccttttacgtttggaaacactcttgcgtctaccttttcgtgcttctccaacaatctctgtcaaacagttatgcaccgagctcttaatttcgttaagcaactttttatcccgagaatccatccgatcaattgacactgactctgctatactagcaatttccttcatggcagcaacctgtaaagaatatttcaatcacatccaagtattccagtaaataaatgactactaagatggaaagggacttttttgtgtcaacttactgttctctgaaactcagattctagtgattcaggtcttcctaaaaatcttcgggtaattttttcataccactgcatgtactcactttcatcaacatcatcaccaacttccacaataagaagtttacgttccaaccactcttttaactctgcttgcaatttaactttagcttcagattctgcatcatttgtcaaatcttttccaggacccggggtccgaatttttttctcccaacgcttgactttctctgggattgattgtggcaaaccaaattgccttaaacagcgatctggcatgtgtttttctgctttgtcaaagcatatcagcatagtctttgatcttctcaggtctaagttatcctttatatgttctggtactactgagaaatctaaatctttgtagggaagccattgaacctgcatttgttatcaacaattcaaattttataataaaacccgaaaccaaaaaaaaaaaaaaaaaatccatatgtagttattaagtgggtcatctcttcacctacatcacaaggtgtaagggaatctaaagccttgcggtaagcaattatattggatgttgatcttgatccactttgtcttcctttccacctaagtgcaaatggaaatctaccactcgtatcttcattgatctttggtcggccaagattaaggtgataatagctccagcactaaagagaacaatataaaatcgttataaaaaaagtatatgctttgacaacccttacaaaaatataaactttgagaacccattcatgcaaaattgagggagaataaaataagaagctataatagttaacctgcttacctgaactaaagtcaaagaaccgctaatggtgccttgagatttgagagaagcattgccaagagttctatacaggaatgccaatgctgctgctccccatgcgtattttcctgcttcgtcaaaattttcaaacaatggaagatacataatagagactttgttcccagttgttgtggaaaatacagtgctgccaacgagatacaaaagataggcccgcgtataacgctcaattacttcaggagaagcatcctcaggacatttagagaaggactctttcaaccaagttagcttcaacattccaccatttaggtcctctggtgctttgcctagaagagcttcacaaactgagctgggtgtgtttgatgaagcacctataacaggttttccatcaattgccaacccaagaatcagggctacgtcttcaagagttatcgtcatctccccaacaggaaagtgaaatgtattagtttctcttctccacctctccacgagggctgagatgagtgaattatcaagagaaaaagagggaatcactctaaggtacccaaatccagctttctcaaccaactcaatttgttcaggggtgagtttccactgttccagcattgaagtgtgctcatgacatctaagaacccctcgctccttcaaatgccgtaatcagtttaaaccacaaattgaaacataaagtaattttattataattttattttaataaagaataactggtaaaaacaaactttaatttccatccaacctggccatcccaaactgctgaagaaacatgactatcttgatcatagagcacagatttatcagttggtcctggatccgcaattgtagtcattttaactgacaaaaaaaaaaacaataaaaaatgcaaacatcaacatatgattcattgattactgcaatttgtgctttctccctttaggacaagttactagttgtaaaatagcagtgatccagtggtaaatgacagaagtagagggaaagaaaataaaatctagttaattgacatatttctcaaaccataattggacactgatacagtcattcaatacagtaatggagtctcatcagtcatcaccagaaacatatgaaaaacaaaaatagcaaaagccaccaactttaaatatttcttcccaactgttttaaaccagaagttgaaatctgtatccaatatctataataaccactaaagttcagagccaaaactatgaaggttctagtggggagatacgccccactgtattttgtcaaaattgttttgataggacattaaaggataggtctttacaattacaaaactcgacacacatgtatatgaaaaaaaaaaaaaataaaagaagaagaaaatccttctgtgaatcaaagaaaaagcaaaataatccgtaaattgtgatttaaagactcaaataaataacctttatgatgggtttgggaaatcaacacaaccaaaaattgatttcttatcaacatggtaacccggatttcaatttcactaacgagaaccaaagctcagtacaacattcctaaaatgtcaaatcgaaacatacatagaaataaataaaatacacagtaacatgaaatacctggcagcgatgaagggttaaagagccggcgaagtgggttggccggcggacccaagtggagcagcggccgagagataatttagggtttattattttcaaattgaatatgtaaaaggaacaacagctttgccggacgaagcaaaagccagtgtctttgtgtttagccgatgatggaactgtgaaagagataagaagaaaaaataaatgcacaatttttaagtttctttcccgtcgattggagtcgacatattaatatttactaaataaataagtgtatttttttttttacgctcgagtttcatcttaaattttgggtttttatccaagtcgttttagctcttatcaacgagtttagattccataataatttatgtaaggttaggttaaattaagttgggttttatttcgaaaaaaaaaaattagattaaaagggaattattttgggtcttggaaattaccccatatttggtgtaattgtatgtttccaagacccaaaataaactctcaaaaaattataatattgccaaatgcgagttaataactttgtttttttattttttttgaaagaaaagtgtacaaaaagaaaatataccttttttttttttggaagaaagaaaatatacctttagaaaatgagaattcggatttattaactttttaaaagaaaaaaaagatattacctttattttacacaatgaaatttatataagacttttagtaaaagaaaaagatatgataacatttttagatttgtagtaatgttggggaatttcgcatgaaattgcagaaaattttcctaaaaaagtatgataattggccaattgggtttgttatcctgagagcaaaaaagtcatcgtagagtttcaactctaactaaagcaaacccatttttaagaaacaaaagaaaagcaaaaatcatacaattctttctccacatatacatacacacactcactaaatagnggaaaaaatggaagagagagagagagagagagaagagagagagagagaga

SEQ ID NO: 378402 - DNA, 1298 bp, Cannabis indica
tttttctcttggatagattcattctaacattattagaccaaaggatagagaggagtaagaatattaggattgttaataaataagaatctatcctagtcatgtacacctataaagttataggttatcttattcagaaaaaaaggaataaaattatttatgttttgggaagagttagactcttttggtagagaacaatcctctagaaagcttggaacctaaattgtaaatgtgtgttccactgaagtaagcaattccagcaattttactcaagaatttggttgggacacagaactacttcctatcaaacttacccaaagctcttatatcaatccatttatcatattcaaagagatataaacattcaccaactgactcaatcacaaaatccacttacttatctaattgcaactgttgaatcaagttaaagaataagacacaactaaacctcatttttgcctaatcaaaatccaaaatagggtttccaattaaattgattaaaacaacacaaacatgtttaaatcttcaaagacattagtagtaattaccaaagaggccaaagagataaaggaaaggcttgaaacggcggaaaacacggcgtcgagctcgtcacgtgagctgcagatgaccaccattggaaggcccggacggcttccggccaccatacccaataattccagcaaagtcacctaatttaaaatttccaactttgattaaaacaaaaagaaaaaacaatgtctttccatataagttatagaatattagaatatataaatatatatatgtggaaaaattgagggtagagaccatcttgtagtggtgcctgtcaacggcgacatagaagtgacgctgtggactgaaaagaaagcatgaatttttgatgattcagaagaagttgttaaagaaatgggggttggcataaaggaatttcctttcgggtaacgaaaactaaacctgaaatgggaaattgatggagaagatggagaaggagacggagattcaactgtatctatggccatactcaatccaaatgggagtttttcttcttcttcttcagttcttattaaaaattcatttcctttcaaaattacaaaaataaattaataactgcagagtgggttgcccttgcccgtataaagactccaaaacgaaatggtaggaaaaaaaaaaaaaaaaagttaattagtaatttttttcccccaaactttgatatgtactaaatcgtgtcccttgaacttttttggccgttaaaaattctcctcgaactattgaaattgttaaatttaaggacttttatctaa

SEQ ID NO: 378403 - DNA, 7215 bp, Cannabis indica
tctctctctctctctctctctctctctctctcttaaaaaccatctatccctacactacaagcctcatctcaatctccaactccgaccctttgcaggtgatctcttctctctcattgatttttaatctttctttagttttgtcttcttcaagttttaagcttgactctttgctttgttactttggtgggttttttcaaatcaatctttgaattgagataaaatgactctacttggtatattatgtgaatgtatgacttgcccaattatgaatttaagctgttgattacagaatttacatgtgtgtgtgtgtgtgttccttgacccttggagctgatttttactactcatgatgtcttaagaagcattttatatagaccccccaaaatgaaaatttgattgggtgtagagaattatgataccccatttgcgtcaatacttggtgaaagtgaagttctttaacatttgaaagtaagtagtttgaagattggggttaatatttgaaggtggatgattatgatttgagtcttgagagaataatgataccccatacccaagagaggtaggttaaacaaggtctgaggttcgagtccctcctgagtacctacatagcaattgttatagttttctggtctccaaatattgtagggttagaaggagatcgtagtttcggaaaaaggaataatgatacctcatttgtgtcaaaacttggcgaaattgaagttgtttaacatttgagtcaatagtttgaaaattgtggttcatatttgcaggtgtatgattagtattttgagtcttgagaagcatgtatagacccccaaaaaagaaattttgattgttgtgtattgagaataatgataccccatacccaagagaggtagctcaaacaaggtctgaggttcgagtccttcttggatacttacatagcaattgttatagtttcctggtctcaaaatattgtagggttaggcagggatcctagtttcggaaaaaagaatagtgatacctcatttgtgtcaaaacttggtgaaagtgaagctctttaacatttgaaagtcattggtttgaaatttgggaaagttatgattaatatttgagtcttgagaagcatgtattgaccaccttagaaagaaaagttgattgtgtgtagagaactatatgatacactatattgtcaatactttggtgaaattgaagttctttgacatttttgaaagtcaattatttattatttgcaggtgtttgtgtgttttgttttgaggagctgaggataatttataatggcacacttactttccacttcttgtactcttaaaattgctcctggatgtaaaccaaattccagattaaaccaagactcattggccttttcagcatcattttctttccaaacatcgaaattgccctttagaagctttcgtttgccagttgaaaggtttagaacaaactctaccctgcaggaaaccacaattccatcttctggttttcgtgctagctcgggtgaaggcttgaaagcagagaaggttatggtaatcggtggtgatgggtactgtggttgggccacagcacttcatctatccaagaaaggttacgaggttgccatagttgacagccttgttcgtcgcctctttgatcagcagctcggtattgactcgctcactccaatatcctcaatccacagccgtgtacgtcgttggaaagcacttacaggaaagagtattgaactctacattggtgatatttgcgactttgagttcttatcagaaacttttaagtcatttgagcctgatgctgttgttcatttcggggagcaaaggtctgccccttattcgatgattgatcgatcaagagctgtttttacacagaataacaatgtgattggaacattgaatgtgctttttgccataaaagaatatagagatcattgtcatttggttaagcttgggacaatgggagaatatggtacaccaaatattgacattgaagaaggttacattacaattactcataatggaagaacagatactcttccatacccgaagcaaggtagctcattctaccatttgagtaaagttcatgattcaaacaatatagctttcacttgcaaggcttgggggatcagagccactgacttaaaccaaggtgtggtttatggagttaaaactccagaaaccgatatgcatgaagagctatgcaacaggcttgattatgatggtgtgttcgggacagcattgaatcggttttgtgttcaggctgctgttggtcatccacttactgtgtatggcaagggaggccaggtaaaaacaccttacttcctttctagttttttcttagtatcaattgttgttgttgttaaaattgtcatttttattttccttgttttgtgattagactcggggataccttgatataagagatacagttcaatgtgttgaacttgccattgcaaacccagctaaccgtggtgagtttcgggttttcaaccaattcaccgagcaattctctgttaacgagcttgcagctctcgttactaaagcagggaagaatcttgggatcgaagtccaaacaacttctgttccaaacccaagagtagaggccgaggaacattattacaacgccaaacatactaaactgattgaattgggacttcaaccacatttactttcagactctcttcttgattctttgctgaactttgctgtcgagtacaaagatcgggttgacatgaagcagataatgcccagtgtttcgtggaaaggaatcggagctaagccaaagactgttgctgcctagtctggtttttttggaaatggtcagtcagttgtactaattggacatttagtttagttttagttcagttctgtcttagaaagaaaaaaaatgaaaagcacacaaacattataagctgttgtatagttgtgtgatgatgtttgcatactaagaacattgaaaattttaaatccattcatgggatgatcatagctttgttgaagaagttcttgaatgttaagaaagacccaggaaaacggaaatccacatttcaaacaacaggaatgcatttccttactttcttctaatcgcgattcgtattaaccaaatattagataagtatgattacctactactcgagctaagtttggagatggttatcaactctctaaaagggaccttttctaattggagtattgacaactatttatttcaatgaaatcgattttttaattcattttcggattttaatttttcttgtgtctaacaatgtaattttgttgctcagaatatgattaaatgtaagtttacgagttggatcaaaaacatatcctgacagcaagtagtagttgaaataattaactgttcaagcgattagaggttttttttatcaatgaattctatgtttggtcttcttattcaaggttgtaaaaggctcctttcttctatgagtcgtgtttcattgtgttttgtaaaacgttttgtaaatcgagttgttcattttgtagctaggcaatctcgatttaatgctgatcgtgaaatctattgttttaatatacatttcttatgcaaatctttattgtattcagattctatttaattaaatgaagttttctttttttgatcaagaaaaggagattttcatcggtcacaaccaacaatacagcagctaaaaccaacaacaaccgagcaacaacctgcccatgcactcaactttttaatataaacattttaagtaaatagttatgatcattagtgttcctctttcccctaacaacattagccaacctataagacaacacctttttttatctcagcaacaatataattgaccgacctagagcactcttcaaaaacacacatgtttctatttttctaaatttcatacacagttgcaaccaacatacagttagtgacactggcagatgtttcctatcattgcagatccaaatttgccaatttgcaaattcctgaggccaagtaacagctccaaaccagctagtcaatctctgaatcactcgagcagacaatacacagtcaaagaaaaggtgagcatgagtttcttcctctaaatcacagactgggcaattcaacgtctccaccgggatacaaagtttggtcaacttatccctcgtcaacagatgagaattcaaagcttgccagagtataaatctgtgtttaggaacactaagtctggaccaaacattcttttgatagcaaacaacttgctgttgtaaccttctattatatagatttgttgctctgaatttgtcgcctcttccagcagcaacaatgctagccttatcaaaaacttgtctcagctgacaaattttcctccaataccaactagtatcttgttgcctgttgtaatcctaaaaatctgctcctttaaggtagatcgagttgacccataaatgaagttttcttctagttaaaaaaatgtatatttgtgcagaacttgtttggtattgattgatttatcaacattattaaagaatattatttataatgaccgtgaggtctaagctccttgttttatgttttatgaaattggaaggctaagtttggcaatgtacttggatcctaaagagcctctaaatgtagttaagaaattttctatgttgtataataattatcttaaatgacaaaagtagtaattattcgagacaatgtatattcaatagattattacacactcaaaattcaagaatgtaacaatttctttcttgttgatgtcaaaataaatctagttacttacatctcaacactatgactaatattattttgggggaacatgttttattttcgttgtccatatttccttaaaatataagaagatcatcctataatcgcgaccgaacaggtagatctccagcttggcgaaaacctgccttgatgaagtccaacacaacagaagccaactcatcttgatgataagtgtactcatgatcagctccttctataatgtgaagtttatgattagaaatgaactcgttaaactcgaaactatcttctatcggtactattttatccattgatccatgaattgtcaataccctgcaagtaaacatcattaagatgaaacagagaaacacacaagttaagaacatatcccatttgtgaatactcacctgcagttgtgatcgatcgatttgcaggcctctcgagtatctgtagttaggcggtctatcaaactttcttcagtcactctgtactcaaactttcctatcgaaaacaagaatgaaagttaaccatcatgaatgacgattctgtaaccgattattagaatttattaccaattggtttaaaaatttaacagcttacttacttacctcttttattcttgacatcaatgaatccatcttgcttgattctttgaagaaaatctttacctaagcgaccttcgataccccttttgaggtcaaaccggccagaaatattcacaactgtatgaatgtcattatgttttgcagcatacaaaagcacagcatttcctcctgcaacaacctttgcaagttacaatttagaacaacatttgagaaatttcattagataatttgtgataaaaatacagacaaacctttgctgtgtccaataatcgaaattacagtacgattcttctcattgaagtactgaactacatcacgaagatcatcagcctctcttcgatagttaccatatcgaaatgaaccttcactttcactgaaaagtaagcaaaaacaattccaaacttctgaaccaacatcaaacaatttgctatttgtttctatagatatgtatggaatggaactatgtagatacaacttcagcaaagattacatgtttttgaatcaaattgaacaatagacaactcatgacatacaatttcattcctagtatcagaacacaaagacaaagtttggaactttgtaaacaagtatcgaaattcacctcgaaagcatactattaaaaaatttactaatcttgccaatctgcaaactagagcttacccattcccagcgaaatcaaagcgaaaagcactgattccttctttctcgaatgcagcagcaagattcaccataggaatacgttcctagagttgaaaatacaaggaaatgtagattataatgcttcactatgagaaatagcacatgagcttattactaacttgttagtattttcttatcttagtatatatataaagtcatttgagtgagaccaaaatgtttcaaagtaggattatcctaacctaagtttgcttttggcccagatcaacttcagttaaatggagtttatatcgctatgcttgaatcaaatatgaaactttatacaccgtaaagtttgttagatagaaccaaaagacattataattttggtgaggtccttatactcattaggcttagcattgaataaatagaatattcaccttatcagtatcgtaaatcaatgatgggttctatctttggcatccgtttagaaattttcttattggagattggtactgtctcgaagagtacaccaattattgcatcatataaccaaacaatcaataaaataccaacaaaatctaacaacaaatagagtctaaacaagttcaaattctacacattctcaacccatattgattattgtttccctacaatttttcagattacaaaactattaattaacaattgttatggagatgtatacccattaccaaaaatactatcttttacatcagaaaattgtaagaagatgattaaaagtaccttagaggattgtaagccatggcagattataacgagctcttcagaacctgtatcatgcaatattcccaccagattctcaccatgtctgttaacaatactaaccctaaccctaagactctgtcgaatcactgcaaaaatagaaaaacacaatcaatatagggaaggaaatttgggaaatggaattcgaaaaaattaaataaaaagatcataactttcatgtatgaggaaaaaaaacgagcttactagggtttggaggtccttctttgagagtagctttcatggacgtgtgttaatgttggctctcctctgtctatggcgccactgttgtcccatgatgacgaagcttagttttatgttattgttacccgcctgttacttgtgaactgtcaccgtacgacacgtggcataattttatttaacgaaaaaatattttataattttattgcgggtaaatactattttagaccctgtattttgcaaaagttatcgattggaccct

SEQ ID NO: 378404 - DNA, 5617 bp, Cannabis indica
aaaaatctcgattagagttgacacaaccaaaatcgaatagactagaaatgataaagcaaatatgcacaaaaatggcatttgacaaataacagtactgttcagatggtaatacggtcacgcatgaaaaataagagctgccacaattaatagtcatacccaactacctatccaaaaaataataatgagagacatactttcaattttgcaaatatcgtgagcatattataagaaccttctttacaaagtgttgtgattaataaattttttctaatttacattctgaatcacaagtaaaaaagcagtaggaactaaaatgaacagtgcagtagcaataaatgcaattttattcagcattgcaagtgttatttaattgattaatttgttgacgaaaaacttgtgtaaacaaactatacctcaaaaaaaactaatatatttacacaagtaaacccattaagaaaactataagcttaaggcaagccttagctttttttgcaataaacatacatacagaaagttatgacaaactaccttagttctggtaccaaagtttccaaagctgaattcattgcatgaaggatcattttcttcacctactcgataatgcaaggtaaaagagtttatgtaagttataaatgtgtccataaatacactgtcagcaaccaatgctctacaaatgacacaaaacccctgcatgaaatccctctaatgcggaatgcatgtgtaaaataaagtggtcagaatataaacaaagaacagcaagaatagacattaaccatatagcaccatcctactagaaccatggccttcctaatacaatatttaaccctgaaacctggaaatatcacctacctgcaatttgtcttccttggcaatatgatttgagggaaggactcggaattcttctgctagtcgaatgcactcaccgacattttctggcgagacaaatttgagtgcaacatttatgcaggactgtgcaaaaaatatcataacaccacccgttattttttaatgtttcaaatgatagaaaattggcaaaatcagtatatttgatacatgcagcgaaacagaaaagaaaaaggtgtgcctgttatgttatttataatagacaaataattaatgtgaattacactatgccagtgaaagaacaaaccaacaattacaggtactatccataaattattattattgatttatattgcaatgtaactttattttagttcaatagtaatcgtactcttttcccaataaaaaacaaaattagtatatttatcaagaaaaaagttgcacacaaaatataagtaaatctgtctcaccacagaaaccacaaaatataagtaaagttacaacaaggaaacaaaaaaaaatacaacgaaaacgaacaagttatcatcctaaacccaatcaactaaaataaacttctcagcctccgaacaattcagagaaaaaaaaatggttaaattatttctcgttcataatctacacagaaattcaaaagttgatcttttctcggaaagactacaaaactctctttagagcacacaagaaccaataagcactccaattccataaaagcttgttctttttattattaccccgaacaatttttccatccatgcaatcacagtaatttcttggaagtgattgagccattcccaactctgccaaacaaccagacaatgtgaactagcaatgaactaaattttcccaagtaaaatttgactataacataaatgttttagaatttttttttcccataacagatatgggcttatttattaagcacatcatatagttgagtcttctcatgtaaatcagtttttcatgacttaactcgcatcatttgtttcttgaggaaaaatggactaaaacagtttggaaaagttgtgtaccatctaaaatcaaagagtttggatggctatcagcaatagagaagctgaatgttcatgcgaagttacaatagaggaggccttatcaggtactgtttccagggcggtgtgtttgctgcaagaaaaatggggagactaaatcccatttatttttttggagtgtcccttctctcaatttctatggcataagatgatcagataatttggtatacaatggtgtatgtcttgttcaggcacccaattgtccctgtgtaaattaaaagggggcaggaggatctctacattgtggacagcaaccattcttgctatcttctggttagtctggttaagagatagcagaatctttgaagataaagaggatgtggcggaaggactgtgggtgaagactaaattttgggttgcaacataggtcttcaaagcaaaaggatttagggattatctttcctagatatctctataatgcattattcattgtttgtgtatgaaaactgttatttacatcagggatagttcttgtaaagctgtgatatagctaatttaggaaagaagttattacgttttatcaaagaggtaattttctgatgtatcaatctagacacaaaccgtgtatataaagctttatagggttcccttttccccttttcaactgtttgatgttgctttgattactttatttcatttctagttgttgtcaggtgcaatgagatcaactctgttctctcttctttgtatttttcactatacagttataataattatttttttgaagcacactatacagattaatacaaatatcaatgtatatgtatattcagcacatcatatatacttcaaaatattatgggacaatatcttcctttggacaaccactgcacagaattaacaattcaaaaagcatccccacttaaataaatatatatgagtagttgggcatgtaacacattatcaactgcagctataaacaaaacatcactatgaaacatagtagtagtaattttctaacatataaacaacaaaccaactcccggaagccacagcacaacataaacattgtaaaatgacactccaaacttaaatgcataaacatgactagatgtaagcatgtacacaatatcaactgtagaaattaacaaaacttcattatgaaaacatagtaatataccaaagccctagataataggtaaatatgatattttcaatgcatacaatttacgccaaccttcttcaagctcaaagaacttattggattagagccacaaatttaatttaatgtcaaataagaacagtaaaaggtaagaattatcttttgccaaaaacaagcagcatccaaaccttcatgattactagttaaatttataaaaattaaaagaatagaagcttgtatagcacctgttgcatcaataatacagtcactttggtacaataaacatctagatgtagtcattttttaccttcaaatttctcacttgatgggggcagccagcaggtataaagacagcatctccaagtctttgaacaaatgaccatggttcaattcctattaaatagcatacaagcaagtaaaccaggtgagaagaatgaatacaactattccacacacatttgtaatgaactaaccatattcctccttgagtttccttttgtgctccatagtcagatacatagtctggtcatgtatggggtgaataacctatggcaccaaaacaagcaatatatattgaaaaaataagaagcacaccaaaaagtatttacaaaacctcaagtaaatgaagggcctacaattatgcaaatagaaacaaacaataaattagcactaaagctcttattgtgctttccaactttgacgatttagaatatgaaagaattgactccgcacctaagccaaactcatttgacatggttaaagaattctgtaagattttcagggctgtccatttatcctttgagtcatgacagccactacagactacaacgatgcctataatgcaacactaacaatccagctcagtcctcgttatataaataagatgtcttaagggcattggtcattggagcaaatcaagaaatgtttggtattgactaaggatccttagttatttcagaacataccaacacagttcaataaaataaaaacaaataacgaaagtattacataaaaatatggtatacacaatacagttcaatatatttacataccaattccttagttatagcaataaaaacaaataaattattaagcatgctcatactcttccatttacatactataacatggcagagtgggaatgagtaatgaccatggtatttataattttgataggaataacgatctaacttaaacaaattcattaagtcttgatgaatggtaaggtgaacaagtcatataatccatttgtacatatacaaagacaccgccagaaaagtaatttgtatttcttaatagttaaaactctagaaatacaaacaaccaacaaagattacagtaaatcttttgaaccatcaagcaagatgaaaaactttcaatctcacaatttagtaaccatttactgtgaaattaccttttctaatggagaacaatgagtgtgcctgaattctctgaagtgcttttttagatattcctgcagcttgggtacatcctctctcctgaaaatgtcccaaagcgcaccaccctcagccatttccaagttttccaacttatttccacaatttagtaagtgctcaatactatcatcactcttatcttcagtttttctatcattaactttgttatccggaatttgaccatttccaaaaagttctcttcggtcttgttcattgtgcttccttttcaggtgttctataatagtaagctgttcgggtgttaagctcacatcggcagtgtgcatcagaacattcacctaaaattttaccacgcaaaataaataatattcatatttagaaaaaatacaggagaaaatactactgatgatgacccagataatcacacaacctaaggcaaaaattgcacaacaagtggtgcacaagtgcagagaggtgtgacagacattatagtcaatgcaccttgtaaactatatatacgacatctcaattcaaagaactatattctataaacatctcgtagagaaaaattaaatattgtccaggaatgccaatgtcttctcagtgaaaatttagagctaatacatgatcagatttaacattttaggccaactgcatgcattaaaaatatattaaaacaaacctggagatataaatagcctgccaacttaatatattataatccaaagccctcttggagtatttatattatacaaatttcacagtcgttcaagaaactatgagctgcaaacaaaccttgaaatatcttttgatcactaatgattaaatcatacaaggacaaggtatagaagattcataaaactacttcggtatacatctcaagagagagagtaggggtgagcaaaaaatccaaaaaaccgaccaaaccgaatacaccgaccgtccgaacaccgaaaaccgaaaaaaccaccttcggttaaaaccgccttaacatggtcggttttagtatcaatggcaaaccgaccgattaaaccgagaaccgactgattaaaccgagaaccgaccgaacatatatcttatatataatatatattatttttgtacatatttaatatacaattttatcaaactagttttacttatttctttttatttaaagtctcaattattta

SEQ ID NO: 378405 - DNA, 4794 bp, Cannabis indica
tcttatttacacctgaacaacaatagcgtgcacaacaacagtattttctggataaagtatctacttttaatgacatttgcatgctccgaatagaaggaccacaaaaaactgaccatttcagcagacatttagaatatatctaatgacattttatcttttgtctccttttatcttgtcttgttgtggaaaatgaaaagtctctgttctgaactttttctatggaagagtctgcagttgttctcttttgacgacttgtattcttcagtactgaagaaatgcacacgctttccaccaatttggtttcataaatgaagtgatttttcgctctccttttgacataacatttagaacattttgtatgtttccctcccctgtccggacatcagtattgttgagagcagggtccaacatatatgtatacataagtacttgtattgaatacttctttgaatgtattatctgtgttatgcattgactataacttacaatttcttacggagctcaaacacctgagctgacttgctcatgcctttgtgtcacatacttggtgctattatgagaagctaagaatttttatataaaaaagtcatgacagagtcttgatcataagtaatcagtttaatttcaagtacataacttgggcacgtatgcatgccgcttaaaataatcctgaggacaaatgtaatgccgtgaagacaggagttgtgtaaaacacttttatttattcatgttatctgtggaatgcataagttcatttgcacattgtgatgttgggacttatgaacatgccttgtttcttccaaccactttatgcagataaaggatatggcattgaaagtatctggagcttataagcagtgcaaaccctgcacaggtgggacaagtagcaactacagaaagggacagaggccttatcctgactttgatgctgcttcagaaggtgttccatacccctatgctggtggtgcgagctcaagttcaacacctgcatgggattttacgtctagtcatcatcctggtggaagatcagactcaagatttaccgggctaatgagtggtgaccagactcctagaggagtgtctgtgtcagcgcagtcttgtgatgtggtgttagaggatgaggaagagcccaaggagtggatggcgcaggtggagccaggcgtgcatattacttttgtgtctcttcccaatgggggaaatgatctaaaacgaattcgtttcaggtattttgataatccattctggcaaaatgactcctttttaatatttttttaaagctattgaaattcttaatacgacatgaagttaattttatatacttattttgatactttttgatgtctagtatatactcacatgtgatctttgtgttgatgcatgttgtcccatgttagtgtcatcctaatcttttcaacatacatttaaaaaaaagttagtgctttgcaatcaattttagttgttgctttttaactaataccaaatttaaatttcaagccgagagatgtttgacaagtggcaagctcagaggtggtggggtgagaactatgacagaatcatggagctctacaatgtccagagatttaatcggcaagctcttcagactccttgtaggtcggaggatggggtaaagttgcaaattcttttacttattctcttttaaatatattatgcatcgagttgcttataacaccaaatgatgctcctactaatttgtcttgtcaattggatcagactttgtgtttctcaatcacgtatttgaatcttcgaagtagtatgtagatagatatgcattagtatgataatgattcacttgattcaaattatttttggtttcacttgatattacaagtgcataagggttttgcatgatgcaaatgagttatcctttattgtagaattagtaaccaaccaaactgatgaatgtatgcctaaagaaattgtgtgcctatttcagtttgcttagtgtttataattgtggattctctaacagagaaggatgtaaagctgtgctaaatgcttaaatattgatttatagaagttcttttttatcatatatttagattaataattgctgttgtttctgtgagttgatgaatcttttctagagtttccattgcttctgcatgcgcagtaaagattaaaacgctgcgcatgaaacattgtaattgttgataaaattcttcatgaaatttctgtatccagcttgagaacaggaaattttctctgtttacatatactgttcatgttttatcctctaatggccacaagaggaactcaatcagacatcaaactgctgagagaattcttctacttctactatgttaacttataactaggacttagtagctgatactattgagtaacactaagaattttcattgatcccacatatgaaataactgatttcaattaatcatgactaacatacatacttgtatttattgcagagagattcttcttattcaaggatggggtctgttatggaaagcccgtcaatgaataaagactggactccaagaagccattataaaccccctggaaatagatatttccctcctgactcttatgatcatggtggtggtggtcctcactacaatgctagttcaagtggttatgttataggtggtcacaaaggtgagacatcatcttttgatgcctcaaggacaacaacctcatctcgagatgaggcttcagtttcagtgagcaatgccagtgacctggagactgaatggattgaacaagatgaacctggcgtgtacattactattagacagctagccgatggcactagggagctgcggcgtgtcagatttaggtaacaatgtattattaaaggaagtttacaactagtcttgtcccaactattaaaacttttcatgttgagttctcaagacataatcatacactaaaataatcattaggtgaaacattacaaggaacctcagaacttatgctttggtttatttttgtatgattgatgcagtcgggaaaagtttggggaggtccacgcgaagttatggtgggaggccaacagagaaagaatacaagctcaatacctttaaatttttgtgacacaaccaagagttgaggaggaggatgattagaaagtaaaagagctaagaagcatatggatgactcaaaacgccaatattccactgagaaggaaactggctaaatcccctcgcctcttatacaaagctgaaatgacattctttgatctaacactactactactacacaagtaatgggtttcttctgctcaagactccatttttatttttacttttggtgggggccttatgcacattatctcttgatgtgttcggttttgccttagttatgtcttttttatttataaatgataatactacatattattacaaatcacttaattttttttttccttttttgaggcctttttcccattttgggactcatgtattttgggcatcatcatattatttttatttattttggctatcatattctgtatcagctttagtttgtaacacagtttatagtttgagaaatgaaattggaagcttttataactaccttttatcttttcgaaatttcctcgaatgatagcataccttgatatcaaatgaaattacaattaaaactgtaaattcaggtcggactctttgatacggcatgagcccaacatgagtttgaaaggtacgggcacgacacgacatgaaaaaataattgtgctaagcacagcatgatgatgtaaattgacacaacacgacatgggctttagcatgacacaggacgataagcctgaaagcaccgtaaaaaaagcacaagcatattagcttaaaaatacgacacgtaagcacgaatatataaaacccaaaagtacgacatgcaaaatgctcaaattaataaagatgccacttgttgatattgaacgacatgtccccaaaaaaaagttcactttcgatgcagataagtcccaaaatttaaaaaattatggtagccccaagctcaagagttctcattaatccgtaggtatctaatttaaccgtttgtaattcttaaaaatgtcaagtgtcaaaagtttattagtccacatcatagaaaaacgatttaaaaactttaataacttttttcgttttttttcaattcttttattaaaaattataaaactttatatacatcccagaaaattaattaagcaacagaaaaaagaaaatatgtgatcgagatcgagattgagaccttagagagatgaagtttttagtttttttttctttacgtttcaagaaagctgagagatatggatggagtacacgatagagaaagagagatatgggtagtggtgggtggtgggttttggtggccgattctttgatctcaacttttctggttcaaagttactcagacaatttttttaagagcggcccatcttactaacaaaaattggagagttttagtagagtaaatcagtgttcggcaagttggactgagagtgaacgagaagaagtagaaagaaaaaaataaataaaagatgagaaaataaagttagttaattagttttggaagttatttatttagtctaacttattttaaattataattatgatttggaccaataaaatatcaacaaggtactttggaagcaacaaacaaagcagctcaattgggtacttacagactaacatggtttgatattttgcacacgcaagtgtacgtatcgttaacaggtagtacactcaccaagagtgaggtcgatcccacgagaattgtagttaagcacgttagaattaaacttttacttctattggttga

SEQ ID NO: 378406 - DNA, 5985 bp, Cannabis indica
aatttgtttggtagattgaaaattttattagagaacttaagcacaccaattatattgaagtattaattagtattaaaggacctttacaaaaaaaaaaaaaattagtattaaaggaattaagtacactaagtctttggtagcaagtttctgttcatacttctatatgcattcagatattttcacatccataatgtattggaattggagtgaatgttttgttctatttgtttatctttgagtggatttgtgttcatcttgcagactgggattctggccgtggtgcttttggcgatgcttctggtgtgggcactacccaaaggttagagcattatatgattttttatccagttttctatttacaaggatggctatctttaaacttttgggattatataggttatgtggttatatgacagtagtaaatgtttccagggaaggtttaatgtcatacaaacagttcattcaggagctagaagatgatgttctgccagctgaagccgagcgcaggtacaaataagtcgtgaattgtgtaaatagcaaacatggaaaaaattgctgtttgttccttaagaataaatgtacctactatgtttttgttatgcagatatcaagaatacaagtccgagtatatttcaactcaaaagcgagcttattttaatacacataaagatgaggaatggtaaatctttactttggtttaattccttgtttatttcattatttttttcctgctcacatgtgtttcttgactgaacataatgtgttttaggttgaaagacaaatatcatccaacgagtttactagctgttatagaaaggtgtgtaaataaaacaaataaattgagttctagttgctgattgaaagctgaatagattaattgtgtgcagccattggcataaacttttgtgataatttatatgcaggaagaatgatcttgcacggaaggttgctaaggatttcctgcttgatctgcaaaagtggaacactggacttgtaagaaaaagtgctctgcaatttttcttctacatattactcttgtctcgtcatcacttttactaaattttacaatttactccaaaataattgtctttgaaatatttcacccaaatttggcaaatgtagttttgatttactctaatatttagcaccgttgaagaaatttgggcaaaatgaggctatatttgctaatttggggcagaatgtattggagtattttggagtacagtggcaatattaattaaatgttcttaagaagaaatctaatagtgaaattttctatacagttaactgtataaatttgaattgatgtacttggccacagctatatgaattaatatttagcacacacaaatttaatcaaaaaaattctttgttgtacttttggttatacatataagaatatgtacaaaaataggagtgagaaaaacgcacccaatttaatttctagtaaaaaattgtgttcatttggtatcttttaaagaaaataaaactgcaagttacctttttgttctcccactttttcccaagtattatagtttaccccagattatgactgcttgaaatttgtcaaacatagtactttaccccaattcagttgattgtgaaaatttcatacttttttaaacttttgttctagaataagccattactatcatatttttgacaggggcccaggttttagtgcttcgtcttcatttaaatcaggacagactagcgagccaaactctgaagatgaagttgatgcagggggcaaaagaagaaggggtggtcggacatcaagtaaagaagctgatctttctgctgctcccaaggctcaccctgtgagttctgaacccagacgaatacaagttgacattgagcaagcacaagctcttgtcgtcaaactggactctgagaaaggaatcaaggagaacattttgtgtggatttgataatgacaagagcagggataaggtgcatgcaggctccagtggtccagttattatcattcgtgggttaacctctgttaagggtctggagggagttgagttattagacacacttataacatatctttggcgtgttcatggcttggattattacggaatggttgaaaaaattgaaccaaagggcctccggcatgtgaggggggatggaaagagtattgacatgaatagtaatggggcagagtgggaaaagaaacttgactcgcgttggcaagagaggttgcagagtcaagatcccttagaaataatgactgctaaggagaagatagatacagctgctgctgaaggtatggatccttatgttcgaaaaatcagggatgaaaagtatgggtggaagtatggttgcggagccaagggttgcacaaagcttttccatgctgccgagtttgttcaaaaacatttgaaactaaaacatccagaaattgcgatggatctgactgtgaaagtacgtgaagagctatatttccagaattacatgaagtaagttacagttttttagttctttttcgtgttttctcttttgtcttttcctcatacaacaactgacaagttattgtatgtgcttcacagtgatccagatgcacctggtggaacacctattatgcagcaatcaggacaggtatgattcataaagtaaccagttacggagtttttgtatgtaaatcgggtgttccccttggtctgttcgattctgatatatgtagctctaattgtttagcaagatgtacaactggaaaatcattccagataggtacgaagactagttcttttaattggacatggaccagatggtgaagcagggtaatgaagtacattttgggagacattttggaataatttgaaattggggtctttgttgtttatattttggattctaaatgggccaaataaattttttaaagactcatatggtctctaatattgtaaagagggatcctggatgatttagttttcttttggggatttgaaatggtggctcatagagaggcaagttaaaagttccgatggtttatgaagttccaagaagtagagttctggtttgactagtcattagagaaattaagagttcaggatgaaatgttttagctcagtatgtgttgggttaaaatgcatctgcaattcctttgctagtgttcaattgcaactctctgttggatttagaaattatgagcataaaagaagcttgctagttttgttaaaatcttttggcgttatggccaagaacatgggagtgaaccccagcttggttaaggttggtgggtagactacgtgtaggaagatgattatctcttgttgtgtatgaacttgaagtcaatgagtgtttgcagaatgtaggatttatgataattttgtttagctttttatctttttgatgggttcatgttctatcctggattcagtctccaatctcttcttgactattacgttcttgaatcattttgattaaatctcatggttaaaatttttcctttgcagagggacagactacaaagacgtaggtttgggctagatgctagattgaaggacgaacgcggtaaccgcagagaccgggacaataaagctaatggagggcaaagatatgacaggcttgaaaaccttcagcagagtgaatttcagtccaagaatgatggtcctgatggaggagatcatgatgaatcaatgcatgatagttttggggggcaaggattacatggtgctcctcccttcccctcagacataccaccacccccggttttaatgcctgttcctggtgctgggtatgttaagtgattttcttttgctctcctctccttacagtagtctgtagttgaaattgctgtatgtaataagggcttgctctattctgttgtcaatgcagtccgctggggccttttgttccagctccacctgaagttgcaatgagaatgttgcgtgagcaaggtggtccttccccttttgaaggtggtggcagaaatgggcggcccggacctcagatgggtgggccagcgccaatccttgctttatctccagcattacgacaggatcctagacgtataagaaggtaaaatgttattgtataacatatttagttaaagttggtgtgtttctctcttaaccatgcttaatctctaaattggaaattgcttgggaaggctgaatttgcaacttactccaccaaaaccacctcttaccaacaaatgagcaataaaattagttctcttttcctggttagataatcagtatctagaaatattgattgttcaacgttaagtcaatctcttgacaatcacgatcaattcaagtttggtactgtggtttgtgttggacaagggataacattcggttaacaagctgagaatgaacttagtgttctggatgaaaatgaaataccagtgaccaaaaaattgagcaacatatcaccaaagttcattatcaatatattattctgctgtctatcatagtgaattaatataaaaaagaaaatggaggacaaataaaatagtatcccaactgatggtcctttatttaaacttgtaatagttctgtgttaaatttggatatagcgttgtgtgttagtattctccctttttgtgaaatcattatcatctctcattcccacactaaattgtaacaagtgacgattaattagttgagattggaatctgccaaactagttgaagagaacatgttttttttaggtgaagaatatctctctgcatgtggataacttgtatataaaacacttgacattaatttatttatgcagctatcaagacctggatgtaccagatgatgaagtgactgtgatagactataggagcttgtagatattatttaagcttagccggatgcctgaagtgtcaagaccatgttgaggtgagggcacaagaaaacttctgtttgatcaaatgttgtcttggctggctctcaaatcatcacatcggcattggcatacgcatctatgctgtaaaatttgcgaagatactttggtgcttgcggtagccgcttctcaaaagttggtgatgatattgcttccagttgagaagtggccagaaaaacttgccttgggttgtaagcacatttttgttcaacctgcttcatggagtgggaatgacaggacaatcaacaattatgtattgctgtaatagaaggggactttttaaaactacatatctgagatagaggtttccattgttttatgtcagtcttcatgagttagttcatttatattcggatggattattgaccattactgatcaattgaggattttattttattattaggcgtcatctacaagaaaactataaaccttaatgtactcatgttttgcagagatctttgttcaaattttcaatgacatgtttagtgaattttaacataattttctttattgtaatatgtactatcaagtttgtgaaaattatacttcttaacattaatgcttttttttggcaatctagtttttgtgagtgttttgtttgcaattaaaagtaattagataatacaaatgaaagaaacatataacactttgtgtaagaaaagatcatgtgaaagtttgatatcacctagatattagagtagtattttgttaatgaagaagaaaagaaacaaacagggaggataagcacgctggtttgaagattgtatgcctgatggtttgaggtaggaaattacatgagtttagatgaaattggtagcatttatataagcatgcttatatgcttatgctttgaagcttgtgtataagaagaagaggaaagaaataattttgaagattgatgagactagacgcccttaatcttattcacttctcttctctctatatgtcctgcgtcaactagtagcttgagtgagtatttacatggaggtagcttgtagagaaagatcgtgcattctccatgtaaagccttatcttcctaaatcaagtggtagccacattttattttagggttgttttcataaatgtacaacaaaaacagcataattacaaaaaatgtgcaaaaagaaattattttaaaaa

SEQ ID NO: 378407 - DNA, 6426 bp, Cannabis indica
aagagttttagtacctgaaatttcatataatgatcgatttcttgtctttgcttctcaacttgatccattacactatgggagaaagccattgttgaaggagtgggagtgggagtggcagtagtcatattactagtgttgtttttagtgttatgatcgaaccaaacggtgtcgtttctcggttgaagattctgcaactcaggcatcataatttgttgttgatgatttttttgaggaatatcgaaacaaaactgattaaaaccaaagttactattaacaccacagccattatgaacaacatccgcaaccggcatcatcatcaaatcctgtgaaccaaacagaggaaacccaagattctcctgaatcaaatgcgcttgaatagccatttttaaacgataataaaagccacaagaactaaacaactttgcagatcaaaaaaagtaatccaagctttctctgacccttctacttctctctcgtagacgtaacatatagaaaacaaaggtgatagagtataaatgggggtatatataatgtgtgggctggagtttttagtaataacaacgatcaaagagttgagactaattaaagtatgtagaccccacattacaaaaaaaaaaaaaaagaatttggaaaaagtaagaaaaataatagggatagggaactactttccctgtcttttatgggtttgttttaaatgtaatgaagaaaataatgtgtattaaagaaagatgtatgggaagcggtaagcaacgacgtacacatgcagattttgtgactaaactatcgggtcagatatcagaagacgtttgttttgaattgaattgaattaaagaaaaaattgaattcaaagtgggtgaggaggagaagagaaccagccctgtgaatgagtcagtttccgtatttatatatttttagagagaatcacagattttgtcagtttagtcatctgtaaaggctgaagaataggatcctcttcatctcttttcctttgtgcctttatggttttttttctttattttctttttcaagaattatggtttatttgttaggctttcttattattgaattacgatactttagttacaactgtgtgtgtattataacaaatttaattagttttttaaatttggatatcacattgtataaattctaaaatattcaacggatgagatccactataatatatgtatttagttactgatttcaaaatattaagtaaaaatcacatgtttaactcttaatattcctctatttgaaaacaaaaacaattaaatagtaaagttttaaattataaaaattctaatataatattttcaaattaaaaatgagtagtaattaattaccgtgtttcaagcaaataccatttttcttgcaattatatatgtgtataattattattattataaatagtattgataataaataagataatgaaataaaacttttccattattggtggcactttgtccttgtgaagaaagcaatatatcatgcaccttgtgtgatttagacctataagtatagtactatctttataaataaataataaaagaatactatgcatttaatattggccaaaatggtcacaactgtaggatatgaatatgaatatagacttatataggtttgtagatattccacaatgaacaaattattgattcactgtataggaagaatgtagtggttaaataacactgtattatgactttagtaatcactttcccacaattacagtttacacgttttcacgaaacctctaaattgtaaagcaaaattggtttttttttgagaagcctctggtgggtttctcccaaatatgagaaacttctatgaaaaacatcgattcgtcctcttaataattataacactgttttagtaattaatctatttgaccggaaaggaattgcaatccaaatcccttaagtagagttaatttttttttttaacaactaaagtagagttaattgattgagaagaaaatgcaataaaagtaagaaaagtaactatattttatttttgggagagactacatacaagtcacgattgtaatgtttgtgcaacgtagttgtaactcgtaactgtagggcaggtcattttctttgttttgtagctaattttttctcctcttttatccttatctcatctttttgcctgaaaactttaaattcctaggaaaaagttttccatataaatataaatctctgaactttgcacatgcaatatatagatacgagggccattatatgctaaaccgacactactaattcatttccacagcaatattgacgggtattcaaattacgaaaaaaaaatagagaaataaaaaaaaaaaatcttttttcaatactatcaacatacacataacaacaaaattcatacaaaattaaaatatatatactgattgaaatttcatttccctatgccatttcaaaggacatatgtatgcatgtatatttattacatttggttttattatggttatgaaaacatagttaataataggagagttagtgcttagaagaacagagaggcaagcaatgtgggagagggcctatggtgatggtggtggacccacgtgctgctcacccaccacaacccacgagccatttctctccttggggcggctccttctgcaactaatggtgcaaaccatgtgaaaaccattgctcatttttcatttgactataaatattatataaaataaccttaattttttaattttacatataattattgtattttccttggctgtgttgtgttgtttctccatttcttaatggttaattaatgcgtggaggtgcacataaatccaaaagcacttcattttctcgtatttgatgctaagtctttccttctgcaacttctcaactgcttcgctttgttttgtagctttcggcaaagtggacatggatggacgcatttgagagctgagactctttagtatggtactttattcacataacgataaaaataatgaaaaaaaattattatagcgttacagtgtttggtattattaagtagtaagtaggtgatgtaatttgaattggatacgtacgtatgtttgttgatttgatttgaaagattggataatatctaccctagacacaaaattataaaaaagagtgattaagatggcagtgtcttgtttgtgtagtagtgtgtctatttattgttattattaaagttacggagaattgtgatataaaaaataaagcaaagcaagcatgttacttttaaaaaacaaaaaagctagaatatcccccaattttcaaagtccattcaattaacatattaagtagtgtaatctcctatgaatgacaaagcacttccacttccatgatgttgaattgcacatatgatggacgtgaatgaacatctctattaattattcttcttattattattattagtttgaacagtaattataaataatttctctgaagcttctgcgcaaacaccttgtaatatatttatatatatatatatatctttttaattgaaataaaatcagtatataacctgccgtctgagccggataatattaaactcatcacacgcttctagtctatgggccaaattcaaggaaaatccaacgagctttttagtgatccctattatttacatatatggtcgtctattcaatatccacacacaattactcaccaaaactcgtttaatttaagaatattgttatagaatattagtagtgtacgagacatttagatatattatcttgtaattaactagtaatattattttaaagttattatatttaactatatgagatttgatatttaattagatctagtgatattaacacacacaaaaatatctagcatttatcttaatttaattaaaaattaattggcaagctttatgaattgtgagagactttattatatgcacacactaaaataaaattatagtgtcatgactatatgagtattgaatagggtacctaagaccaccttacttcaactagtctttggaccacctgaacacctctttgagacacctttcgttttctctagaaagcatggcttctctacaggcatcttcatccttctcttcaaatagcagcgatcattatgaccacattcaatctttttgattcttggctcaaacacttcttccaccctttgcaatgttgtggtggcgccacatttaaggtgattgatgctcgacaacctaaggcactgatgttagatttacctggttcacgaggacattaattgggggaagtatggagtggcatttgtgagcaatttgcatgtttgatcttgcttctaagtaaatctaatcatgatttctctttgtatttaattttgagtcttttcagctcttaaaatattagattttacttttaattgttgtgtctactaacctggtctgtggatagatttagataatctttcacttgaaatggctattaatgctatagatcctactgtctctggcattcgagtgtacctaggttagtcacaaccccctgtattccccctagaacaatcttcttagtttttatctatttgataagacccaggttaatccctttacgttatttgtttagacttgcctatcttacctttcaattcttactttacctaaaatggaagacttagcccccctttttttttttttctgcaactttgaatcttattgaaataaagaacattgtacactctctcgtgaataatactgacattcaagaaggactttcactagctttaccctattctacctcatggccaccttgtatagcacaaaaagctttaaccacaatgtcttgaaaagtttccttgaaaaatactggaaaagaaagtttcctgttagcattaaggaaagatcctctaattcaaacctgtacctggtatctttccactgtgaaggagataggtgtcgagccattgtcaatcaaccttgaatttttgactaaaatcctatcctccttgaaatccctgaccttgactcttcccttgtccctgtggctattaggaaaatcccactatgggtccaaatccacaacatccccttcacatgaagatccatatcgatggccaaacttgttggtcaaattgtaggggttcttctagaaatccattaaccctccctcctcaaaacacggggatcttttaaagttttgtattatgttggatgtcaccaagcctctcgcaagaggtttcctattctcttccctgggatgtcttccgccacctagcttaaactgaaatatgaggatctccgtaaccactgctatcattgtggatgtcatcgtggcttggaagtggttaagaacaagtctacgaaggtctcctaggttgatatggaggcctcgggtaatttgctaaactaatcgtgagcattaacttctaaggtcgcaggaagtatctaatattttgctagttgtggtacctggtctttccataattgtattaaacttatctaaataatcgatcgagttagtagtacctttgtatttgagcgacttagatagcctgaaacccttcgagagtctagcttgttgcacttcttctataaaaggcaatgtcccatggagtttgtaaataggctttctttgctactcgatcattcttaatgctcgcaagaggctttcttggtcaatacctcctggtaaggcataattggtctgttactattagtatagcagcaaccgcggctatcttagctaggattattacctctgtggtcgtagctggtgcgatcagcgggttgactggattagtcaggttgttcacattctgcgtgccttgatcccccattttgggatcacaatgctcgtcatcattacaatttcttggtgtccgggatcacaccctaaaattctcattgaggtgatcacgaagatcagctctatgaacatggtatctccctcctcgtcgtgtctcaacagaacctggcctagtataaatactaggggagcgattgttagtagaagaagaatgagatttgacttcatttacctatacttgtggccgagcctaacaatctcaagtttcactgttcagggtcttcctcttgcggtctctcttctctgtcacgaccggaatcaggtgcaaccagctccctactacgcatggagttatctgtgggttgattcagattgagaccctcttgcacattcacacgttccctgcgaatacaattattgttaggacgttcatttcgttgtctatttgtggtagttacttgagggttgcctgagcgcgtgttcgagactcagggtggacgtcgggtcctgactctcccatcgactttagcctgcaatgcctacatctatttctgcatggtcgcatactgtgctgttgtcagttggaaaattcctttaaaggctacgaccaacgtgataggcgagaagtggcctagtgtaaagcccgcttagttaatttggaaattagcagttgttta

SEQ ID NO: 378408 - DNA, 1940 bp, Cannabis indica
agggtcttggagacactgatttctttggtacatacttttatatatatgactaattatatctcttaatctattgaccttaatttatattttgaaattattgtatagatgatgatcaatgtgttaatttataagagtacttatactttgtaggtgatatggatccctatgtactgattcaatacaaagatcaagagcgcaagagtcttgtagcccgaggtaattagtttagtcaattaatattatttacaaaaaaaatgaaataatcaataattaatctaaaaatggtgggaatgcaggacaagggagtagcccatcatggaaccaaaaattgagctttagagcagattatccaggttctggagataactacaagatcaccttcaaaattctagacaaggacactttttctactgatgatttcatcggccatgctacgtacgtataggagatcactgtaatttattattagtacctaatttaatttgattattattatgtaattaaatatgatttgaatgaataataatgcaggatctacgtgaaggatttattggctataggagttgagaaaggaagtgctcaactaaaaacgagtaaataccgtgtagttggcgctgaccaaaaatatcgaggagagattcaagttggtgtaactttcacccgcaaggtatttttttttttttttgtagaagatagaacacttctttcttcttcatatgaccaaaaaagtttgctataagaatgatcaagtaaataatgtttggtgtatctgataactttctgacaatgttttgttgttgtatatattttgcaggtggaacaaaaatgggagaaatttggaggatggaaagagagcagtttctagattttcttatgctattccaaagtcccaaatagctagaaagactcgaagttcttttattgatttatttttcattgtattaatatatttatgtttgaaatctctttgtatatagtgagtaattgccgtaatgaatttaacaaaatgttatttatttatttttatttttgaaagaacaacaagttcattaagaagaaggatggagaggaaccacatggattccctccccttgataaacaccagccatttgacaagaaaatctagctctttttgctagtccatctgtaacagaattaaaacgagttataaaaaaaaaacttacaatccgaaatttgcttaactaaatctaaaactaacaaagataactgcaaaaaactcctatcaggagggcagcccttccgatccaaagctctaactacttttttgcaatccgacaaaagatgaaaattgtcccaagaattctgaatggctcaatccagtgccaaacaaatagcatgagtctctgcttccatagctgaatgagcacgaacagaggagatgttatacagccacgaattatctacaatgttgatagccacaatagctaactcaaccttcccatcatgccaagaagcatcaatgaacacaattagattggcctgagcactaaccaaaacctgttcctctgctacacactgattgacttcttcaggctgctggttacttctaatcagcagaacaacctgaggggtagctcccttgactctcaccgaattcctttgagaacatacttcatgaaataaacaaccaatataggataagaactcaaactttttcatacccgtatttgaatgaagaagattcactagtacaaaagtcaaaattcgcgacaatcccaaaaacaaattttttcgaggaccgtcgctaacaatattaagtgactgttttaaaatgctagagaaaattaagtatattaccgacggtttagaacacttgggagggaaatttgcgacgattttatgggtttatcgagatttttaatagtcagttatacctggcgatttaaaaccgtcgggtatactataggcgacgatttaaa

SEQ ID NO: 378409 - DNA, 6110 bp, Cannabis indica
attataagtttttttgcgtttcattacaaatttggaattcagggtttcaattttcttaagagagaaaatttgccgaattttagtgttggatctggtaaattgaacgggaatagagtggtttttggacgagagaggaggtaaaagagaagtgactttgagcaagtgtttcgaagtaggtattgctggggttgatgtcgctagtagttctttctaaatttattgaattcgctggttgatttgattttgtgtttttaacaccaagaagaacaagatgatgaacccagatcgctcgaagaaggtctttctcttttttcttcaactttttcgccttaactatcttcaacttcgtactgatcttgcttggattttccttggttccccgattgactttgtgactaaatgaattttggacactaaaacgtttaacttaagaatctctaggtttatgggttttcgttctttggtcggtagaaaagggcttccctaattgtttgcataaagagaaattttactggaagatttgtttttccgttttttttaaacgcaagactgtgttgagatgaatttttatccttatatattttgcatcatttccaattcagccattctgtttttttgccaacattttttccggttctactgtttttgccgttattagtttgatgttttgaatgtttaatgagtccatcaacatcatttatggatctcttgtttaacagattagagtctgttttggaatttttgtttgctttttttttgagtggcgggtatggttcacagctttatttttctattggttttgtcattgtgcgggaatgtaatcaaagaaaggaatctaggttgatacatatttgtgcttgatactccactattgccatctgtttatctgcgcttgctttttcgtagcacccgattctgttatcacattctaattaattttcaaatggatatcttgatactttagccattggccgctttagctactttttattaaaatataactgcagccagagatgagctctgacaaaaacagcattggttttattagtgtcatgtaatttctttgtttaagaagtatttacgttcatatttaatgtaactttttcaattttcagatgaaagacatggaatttttcacagaatacggggatgcaaataggtataagattcttgaagttatagggaagggaagttatggagtagtttgtgcagccatcgatacacatactggggaaaaggttgcaataaaaaaaataaatgatgtattcgagcatctctcagatgctatcaggatcttacgtgaaattaagttgctaaggctattacggcatcctgatattgtcgaaatcaagcgcattatgctgccgccctcgaaaagggaatttaaagatatttatgtagtttttgagctcatggagtccgatcttcaccaagttatcaaagctaatgatgatttgacccgtgaacatcaccagtttttcctctatcagatgctgcgtgcattgaaatatatgcatacaggtgtgttttaactttcttctggtcaatttacactgatacaagctatcaaatcctttttttgaggatcctagagggtgggttgctgattttaattgtttgggtgcagcaaatgtgtatcatcgtgatcttaagcctaagaacattttggcaaatgctaattgcaaacttaaggtttgtgactttgggttagcaagagttgcatttagtgataccccgaccactatattttggacagtaagtacttgcacttattcctattagtattatggcatttataagtgccttacatctgaatttttacttgtaaatggtgtattttatcgtggttattttggttcatttacaggattacgtggctacaagatggtatagggctccagagctttgtggctcattttcttcgaaggtattttactatttattaccctttctttattcactttccttcattaaatataatatagaagcttggtctgtggttgcttggattttaaattggtatgtgttctctctcgtatcggattcaatttttttaataggttatcttgctttcattctcttggtatgttgaggaggcaaatcctagtttttatccctcttgattgttttggtgatttgatatgtaaataagacggacatttgacaatattagtcttggtaaaccatagtccttgctaatgaagaagctgtctgttttatactgcatggagttttgcatcatttttccttaatgaggtctacaagtttgtgtgttgaagtattaataataaggccattttgtccttatagaactatatgtgtcttgcattagttgaagtcttgaacattaggatcaattttttacacttgctgctatatttgtttatgttcaactgggtgcaagatcgaagttgcaattttcttgtcattgtttagtgattcttctaattgagggcaaggtagtatattcaagttacagtatctttaattatggcggagttgctcttcttttagaattatttagttgtttgttcaatttaagctgattttaatggctggagagtggattaagtgatgtttctagtggtatgttcaagttagacatattactttctggaaagtaattgattcattagatatttggttttgagttttttttaggcctattattaacgtgacataaggagacatttgcaattttggacaattgtcaacttttacccactccagtcttatttgttatgttagaaggtgtgcatatgacgaaataataaagggaaaaagttaacaggcctatgttttggtgtagtatagttcattaatgcatatatttctgtgtggaatatgttctgagtgctttattatagtaagcagtaatgcctagattacaataattcttgttcagggaggacaattgaactctcttggaagttgaaatatctttcattcaggtaacggtgtgaggttatgtttgtttctctggagtggttttatcaacgtgtgaacttcctattgtattttagttgtctaacttttgcttgtttttggttgcagtatactccagcaatagacatgtggagtattggttgcatctttgctgaagtgttgactgggaagccactgtttcctggtaaaagtgttgttcatcaattagacttaatcaccgatcttctggggacgccttcgccagagacaattgcaggagtatgttttaactttcttgctgtggcgcattgataaatattcattcctctcctatttctggcttgaaatgtttcattactaagctgtagatatgcaaaatctatgcaggttcgaaatgagaaggctagaagatacctgacagaattacggaaaaagcctcctgtatcatttgcacagaagtttccaaatgcagatcctctagccctcagactgttgcaaagacttttagcttttgatccaaaggaccggccaactgctgaagaggtttgtactgtaattgtttttggaaagttttatatgtatgtatatatatgtatgtatgtatgtattttttttttcaaggcgcatgcaattggactgaagtcttgatgtttttattaggcattggctgattcttacttcaagggcctggcgaaggttgagagggaaccttcatgtcaacctatctcaaagctcgagtttgagtttgagaggagaagagtgactaaggatgatattcgagaattaatataccgagagattttggaataccatccccaacttctaaaagactacatgaatggagctgaaggaacaaattttctttaccctaggtagaaagttgttcttgttttacatattgatgtcatctcttaatttaatgctctatcttgttggtatccgatgatgacgtgtgttattgtattcctgatgcagtgctataggtcaatttaaaaagcagttcgcgtatcttgaggagaatttgggtaaaagtggaccagttattcctccagagagaaagcatgtttcacttccacggtactaatcttcaagcgtgattattggccagtacaaatcatttgtgtagtaaatctatctttgaagggcgattcattttgtcacattattctaatatttttcatttacaggtctacagtccactcgagtatgactgtttcttctaacgaacaccctaatatggtttcatatgagaatcggcaaatgactggacatacttctaacgatggtatggcaacagatgttaattctggaaatccatcgaaggctttacggcctccgccacgggtgccagcaggtactgactttattattgagttatccgtgtttagtagcttataagtacccattgttttgatctgggggtgtagaattatcatttgaattcatactctatttgattggttttgaccttctgttttttgttttcccccaatattctgccgtccttacacgtttctgttgcaacaggtaaaccagggagagttgttggaccagttctaccatttgagaatggaagaaacgtgagagaagcatatgatccgagggtcagaaatgggatctttcctcctcaggccgtctctccccactgctttttccgaactcacactgccaatcaagacaagtcagattcttcacaattgaaaatgcaacaagctcagtcaccgcagataaacatggccagcaagcaatcttcggtgatggttgttgacatgaacaccaatccgtactaccaagcgcaatcaaaggttgaccagatggctgccatggacagtaaactgttgcatgcacaatcgcagtttggcgctgttggtgcagcagctgtggctgttgctgctcacagaatctgatgagcgagcaaggtcagttgagtatgagtggaaatacggatattggtgttaggtttgctgaagggcgggggttgcccattagattagtatgttgtagtctggtaattgggttgtcatgtagagaggtttcgtcccacattcttctcctagttctgattaattgtacccctttgtaattatgtaacagataattgattttttaaataataaataatagtttctcttattttcctagattttattcgattagacatacaaattcttgattcttcataggtggtttgggggttttatacaaatctacttcccttttatttctatgtgctgaggccgttggttagatagatgggtgaattcatggtagattatttctaggataacttactgtactattctttcttgtggtttgtttgaaaacactcaactaaagatttttggaaatattcctttgtattttcaacatattggcttaaatcttaaaatgtgaattataaagtggcacaacttttttttataaaggtttacagtatttaaaagtaaaattgtatcgtcttccaaccaagaagctaagaacaaatagacattacttagcagtaactagtaatgtatctttttgtagcttggcatagaatttccctgtgaagcaaagatttattattttattaaagtaatatcttagtaaacctcagtccagtccttcgtttacattacagtaaagtttacaatttcataacttcaatgtaagatttaccatcaagctcacgagagaatagacccttgatatagtctttaattcccactgttctgtatagagcaggattttgttgattgatcaagctgtgggcagggcctatttcagattctacacttgtattgaggaatgtggcaatagagagcctttcctgcacagagtttactattgctctatgctcaatgctacgatacattccattagttataatctacaaccatcatatgcaaaagacaaattaatgaaacaatattacttgtatttgatgaataataattagtgggttatgagttattacctctagaatgtctcctatattgacaataaaagcatttgggagaggcttgacagggacccacatgccatcttttttgacttggagtccttctacttgactcacttgaaggagaatggtaaggcctacggcatcagagtgaggagtgagacctataacttgctctggttcagggcatggagggtaatagttcattctcatcgattgcattccatcttcaaacaacttggaa

SEQ ID NO: 378410 - DNA, 655 bp, Cannabis indica
gagagagagagagagtggggtcaaatgtagtgagaaaagaaaaggacaagagaagtattaggtggttggttttagggatagagatgggatgtcctaaatctgagaaactgcaagcatgtctggcttctcagacaaagatttgggtatcttttcacaggcctacacactcacccaattcctatctttggaccaacatatttttttttatagcctctactaaatttttcttttctttttgttctgcctcatcatacctatactataccatacataaagtcaaattttattattcttataaacttctttttagaagagtgtagaaagatagtatgtataagtataagtgaagttcattaattagttcatgtaaagaagaaaaagagaaaaaatgcattggtaataggagcataaataaagcttattagatggggctggtggcggcgatattggtttagtagactcacctatgcttatggttagaatgtgagaactgtaattgagaaagtatcataaagtgaagtgtgtgataaaatttatcgagttttctctcaaaattaattcataacgaatgaagtaagttaataattatatattagaatgtaaatacgtggttaaattataatacagtagaacctctatttaagaatactctatt

SEQ ID NO: 378411 - DNA, 2549 bp, Cannabis indica
caattacagttggaggaggaggagaaaggggttctgatttcggatgatcaagagggagaggtgcaagcttttgatgataggtgatgttcggttggtaaattcctcacaaatagaacgatcgattttgacactatgagacacatgttggcatctctttggaagtcgagtaagggagtctatgtcaaagagcttgatacaaatcgctatctttttcagttttatcatgaacttgatgttcaaactgtgattgatgggagtccttggactttcaatagaatgcaactggtttttcatcgtttgaagaggggagaagaccctcgattggttccattgcatgagttggatatgtgggttcaacttcatgatttgaaatatggttttatgtcggattgggtggtgaaacatgctggaaattacattggaaagtttgttaagtcggaccccaaaaacttcattggaatttggtgggattatcttagagttcgggttacaattgacatcaacaaacctctaaagaggcgtatgaaattgatcaaaaaagatggcacttggatttggactacattcaaatatgaacatgttcccacattttgtttcatttgtggactcattggccattcggatagattttgtccccggagatttgattcccattttgatcaaaccgtcaagccttatggtgaatggatgaaagatgtcactaggaaaaacaactatctcattggtgcacaatggttgcgctcagatcgtgaggaagatgagggtgtggtggctggcaggggaccgtcccggagtacggaggaggcgatggatattaattatccaatcaggattcgatctgatggagatagttcaggtgtcaatgggggcggtaatcaggctccaaattgtggagtaaataaaggaaatactatcatggaacttaatgagaatcatgacaatgaagatgcacagttggaatatcaaaatgatgattctgttcttatcttagataataagaggaggcataccaataaggaaagaatgaaggaggttgttgaagtaggtgatggtaatatgggcgggttggagaacctgaatgacttgtcaaaaaacaaattacaggtgggccttggtgttcaggcccaccaatcattatgagtatattgtcttagaattgccatgggcttgggaacccatgggctattcaattcttgaaggatttagttatccaaaagcagcccaaagttgtcttcctttgtgagactttgtcaagaattgaggtgttggaaagattgcgtgtgtcgctgggttttgggggggttttttcagttgatgttagagggaaaagtggtggtgtagctttgttgtggcgtgatagtgatgatattaaagtacttggttatggggtgaactatattgatgttgaagttagtgagaatgatgggaatcgttggcgtcttactgggctctttggtgagccaaattgaagtcttccgacacctgggatcaaatttgaactcttaaggatatgtatgcattgccatggttcattattggtgatctcaataatgtaacctctcaatcggccaagaggggtggtaatccataccctaattggcttgttgatggctttggtaatatgttggaagagtgtaatttggttgatatggacttgtgtggatatccttatacttgggagaagggtcggggtactaatgcctggattgaagtgcgaattgaccgggctttagtctctccaagttggattcacttttttccatctgctaaacttagaggtttcaacatcggaccattgtccgattcaattgcttcttgatgttctgaagaggactgaggtacagaggatgtttagatttgaaaacatatggctcagggagcctgcttgtttgcaaatagtgaaagacacctgggagcttctttcgggttgctctgttatggagaagattagctattgtggtgataagttgctggtgtggggaaaggactatgtagggaattttaaagaccgaatacaagcttgcaaaactaaaattcgaaaatggaagaaaggcagagatgaggcttctgttctaaactacaaaaatgctgaggcacggttccaagaggtgctgattaaaaaggaaattttttggcgtcagcgatcgaaacaattgtggttaaaggagggagatcagaactctaagtactttcatgctatggccacttcaagaagaagaaacaattcaattcagcggctgaaaaacgatcaggggatgtggatcgattgggataacaatttgtcaagcctcatggttgattatttcagcaagcttttttcatcttctccattggagattcgggaggtaactgatgctattcctaatgttgtttccgatatgcaaaatgctttactactggaaccaattactgatgatgaagttcgaagagcccttttccaaatgcatccagacaaatcgcctggtccggatggcatgactctgggtttctttcagaaatactggagtgtggacttgttgtgaaaaatcgtatacgcaagtgcacgcaat

SEQ ID NO: 378412 - DNA, 3545 bp, Cannabis indica
cacatacatatgtaagtatacgaaatgatgtgagattatagagaggggaccccctcatccacctaaaggtactaaaatcattacaacgctaacgtgtcaaatatgatgcaaaaggagaaggaaggacatgctttccgaaaatggaatatggttttggctcatcaaggacaacaggaagacaattgtcaatataagaattctttcttcaagactggaccacaaccaacaaaacctataaattttatccagcttcttaaactccagctactcttctagtactggccattatggagtaggaaattgggaaagggatatttatgaaaaaaaaatatttattagaaataaataataccccggttgtacaattacgaggccatgtgtgatctctaacctgtgtaaatcattggttgtacaaatatacccgaggtggcatcatttatgaattgatacaattaaaaaaaattaggtacaagaggagagaagagattgggggaaaaaacctatcatcactcgagaaaaagtcaagtagaggacgcagctcgatcagattctatcatggactttatgtaatattcaccggctttgtatgatgacctgaccatagggccagaggccacataacgaaatccctgtttcatcaaaccaaacaaaataatgttatcaatatgagatagatgctataactgtcagtatcaacaagtgtttcaaaatgatgagctgaggttttgatgcatgtgacaattatcacagcatatgattaaatagtaatagttgagaatttgattatgtcctgcatgatgaatgctgccacgttgcaaaactaacctaattccttaatcatgaccacatgagaaacaaagaaatatgtatctccatgatcgttaaaaatttaaaaactgtaaaggtgattggattaactgcttccaacatctgacaatgcagagcacacaatgccaaattgaacagaaaacaaatatgcaaccttgtttggggttaatattcatctgaaaaatcatcaattgtctgctgcagttgcagtaagagcggatatatacacatatgcatagagccgtagagaaactaatgcataaagatgttattagatttggaaaaagtactgttagcagaaccaaagcaccgaggacaagctagtcaacaaccaagtatataataaataaacaaatttagcggcgactagaataaatgttttcaattaaatttcaaactgaagaagaacaatttcagctacattgacaatctttcacaacaggaacaaaggaaaatgcatgaagaacaacggttccacgttccaaaacatgcacttgaagtggaaaggaattgaaagacaattaactacttgcccattaaggagctgatgagatttatacaattaataaccacattaagttcataatcagcacaagtcacaaaattataccataccgtaaggtaccataagtaaatccaacaaaaaatgacacatattatatgacaaaaatgcatgtcacaaaacaaataaagccctgtaatgtaaaccgactgagagaaagaaacaaaaaggataaagccgtaccatatccatgccgaggatgcgatacttctcaaaagcctcaggagtaatatattcagatacaggcatatggcgcttggaaggtcgcatatattgaccaaatgtcatcacatcaacaccagcagctctcaccttctccattgtcttcacaacttgatcaggtgtttccccgcagcctaacattattgaagtctttgtaagcgttccagcaggagcttggtctttagccatcatgagtacttctagagattggtcaaaatttgcacgatgatcccgcactgccttctgaagctcctcaactgtttcaatgttgtgagcaaatacatctagcccggaccgtgcaactttctcaacacatatgctgtctcctcgaaaatcaggaactacacaacacagaaaagcaaaacaatattagaaaagcacataaccaaactgaaaagaatgaacataaatcagataaaatagttgacgctgcagtaatccaaaccatatgaaaacagagttgccacacatgaatgctaaacggtgatgtaattcactaaaactaaaaagcattatagtatatatacagtcatatacggtatcaggcattcagtccacaaaattaaaacttctaagtcaaaaacctaaacaatggggagaaaaaataaataaaaacccaagacatatatcagcgcatgaatatattaaattctcaaaacaccataaagaaagcaaatgcaaacatacccaatgcctctatgagcatattggtttcagttctttcagcttctgcaccgtctcggcaaaatgaccactcccttgatcaggtaaatcatcccgatccacactagtgatcaccacgtaatccaacccccatgatgcaatcgcctccgccacattggtgggctcattaggatcaggtggaggcggcgttcgtgaagtcttcacattgcagaacctgtaccaccaaattaatcacatcaaactgaggaaatttcccaagcacattccccaaaccaaagtaaatatcagctttgaaaaagaaaaactcgcctgcaaccccgagtacaagtatcaccgagaatcataatcgtggcagtggcagtaccggtctcaccgccggaccagcattcgccgagattggggcatcgggcctcctcgcagacagtatggagattcaattccctgagctttttcttaatctggacgtacttctcgcctccggggacggcttccttcatccatttgggcttgggaagaggattcttcttggtcccaacctcgacggaataggagctgttggatttgagatcctcggcgaaatcggtgagtgagggggattccgcagccaatcgggctcggagaccggctagggtttgagggaattgggaagtggtggatgtggattgggtggaggatgagaagagcttctttgaggttgatttaagggttcggccaagggttgtgaagcgggagttcatgcttgcttctgtccctcggtctccgagtaagatcaggtggaagagaaggaggttggacccagaatgagaatgagataaggaagaggatgaagttagttggttggttggttggaccagacaattttggaacacatttagattatgatgggccttcaagatgtgttcacttcatttgggcttcaattcacaacttttccttcatttagacattataaaaaagagataagggtttattttataaatatggctttttgtgtaagtggtttagaaatatatggagaaataaataaattttataaaaactggaaaaatgaataaaaaatttaaaatatggaaataactaattagtatatataagggcattttacaaaaatactggatttggggtaatacttttcaattttactgccacacggcagaattaacatttatactgtcctcctttttttttttttttcttttatactgtcaataccaaacaaaagtatgaggcctccatctttgacaatcac

SEQ ID NO: 378413 - DNA, 2149 bp, Cannabis indica
caaggacacttttctgagctgatcgctgagtaattcatatattttgtgtaaacctgatttgactgtgatttattttaggcattgtgaataaatgtatgagaattcagctctgtttagtgcgtttatgtaaattctatacagaaagaataagtgttctaattctttatgttgagtacgatctaaaataaagtaaaaatggacggtgaagcagttgaatttggggtttttggctactgagaaataattcgtatatgtaggaaactaaagaatgtagcagaagggttctggttttaattaaaatgatatcttgtgatttataagagatggtattttgtatttggatgatctatttatgtatttctcttgaaatcatctgttgtttgtttccccaaactttgattaataggaagaatgtctataataaaacattgtgtttggtctgcagataatcctattgttgcagcaatcttggacggaaaaactattaggctgtttttagaagatgaggatgatttcgcaatgatagcagagaatattttcactgatttagatgctgaagataaggggaagatatgcaagagtgaagttcagagtgctctcgttcaaatgggagttgagatgggtgttcctcctaagtcaggttcacatctaattcatttccttgtcttttattggctaaattatttgaagcacctatgttgaattagctatgaatgaatcgttgaattccctagcagaacttaaacccaagaaatggggggattgtgtaagccaatgatggtcattttatgctctagttttaaaaccccttcaatgcacaataacacttgattatccttaattcgctggtaaattatttgagcagttttataaagactctaagaatgtattgaactttgtataaggtcggaagacaaaaggatgctttattcattgaaatacttccgaccctattttattcccaatcttccgcttgtcatttctgacatgatcatgaaaatattactcacttaattacacccatctgttattttttacatgtttataaatcaatcactaacatctcttagatggagacttatcatatctgttatttgattatccagtaacttttctgggttttttttatcatcttttaattgttggtaaaacagacttttagactacataattttggcatcttgagagttgagtatatgattcacattactagggcttgcatgttttatcttaaagaataatgactttgtccatttatttttggcttgaaaattgatgagataatagatggtcatttgcacgcatcgtgtgctttgcaaattctattgtttgtgtctataacttgttgtaattagatactttgttgttgaatcgttttctatgcgcctatgagttacttttccaactcatcgcctgtatatattcatttcttaaagaaaaaaatgtttccaggacaataatctaaatagaataacatcttttgtagtaaataatttaatctactatcatctgtacttgtactagaaacaaccctattcaatgtcatctcttcaataagcgtttcaatttcattgctccaggaattctgatgattatcttgtcaatcttccttaagttcctaggttttcatatttatagtcaattatgatgctttagtgttgtctaattcagttttgctaactgttttgctctacttaagaaactcttggttttataaaagtaaaaattgacactttcattttacagagtttcctctactaaactctatattaaagaaacatggggcagaaggagaagaagagttgggccaaggacagtttgcattgttacttcagaatattctacaagagctagcagaggttttggctgaaaagcctatcattctaattcagaacatcaagattgcgaatggttccaacttaagaaaggtatgtttcaatgttttctcgtagttaaaaagtgtagtcacttgtcttctttgcttgggcaattgggtgtaaattgagtaatataacattgacaataggcttcataaagcctcttgacccatttttcaatcataatccttgatttgagcagtaatggaatctatgcgtttggttaggaggaataaaaatataggaataggaatgggtatgggaatgggaat

SEQ ID NO: 378414 - DNA, 5003 bp, Cannabis indica
gtaaatgcttcagtgttagtgagaatggtagtagtataatgtcattgaggcaaaatcaaagatgtaatctgattatgtacaaccaaatataacagaaacagtctatctcaacaaaattcttacctgcatcaaacattaagatctttctcaagtagttgttaaaactaattatcaagtacttgttcatacaatttgcttctttaaataaagtttctattttttttatcaaacgatatgtaactaagttgattaattatttagctcgttgtacttattatttttcaagtcatcaatctagtaggaggtttgtccatactaatcctgaagctattctattaacttatttgcttaattaatggtacaacaagttttaattctatagaacaaaaaaactaaaaattataaatctttggaaatgaaatataaaaaaaaaaaagtgtgtgtgtaagagtaagagcaacatagaggggatcgccagatttaacacgaaaggcatagagacttacgaaacgtgtatgccatccccatctccatctccgccttctctctctcccctcactcttaccgcctatatatatatatattgttactatatatatatatatactccacacccgccattctactccggttacttctttctttctttctctccttccatcttcatcttcattcatggctcctccagctcaagaagttcaaccatcttcaacccccattaacgatgaacaaccgcctttctccaaatccagagtcacagttatcggaagcggcaactggggtagtgtggcttccaagctcattgcatccaacaccctcaccctcccctctttccatggtatttaattaataatctgtttttctattttgcatgcaaattttacaagaacagaaactacaattggtgttgaattgatttggcttctgacaattctgttgcttttaatgataacccaattaatttcagatgaagtgaggatgtgggtatttgaggaaacattgccaagtggtgaaaagctcacagaagtcatcaatcgaaccaatgtaatgtcatgataacatttctgttaaatatttgcctggtataaagcttggcagaatgtggttgctgaccctgacctttgaaaatgctggtactctacttcaagttttgttttttttttccctgtattctgaacctatatataattaaactagtatggggctttcttttggggaagcagtaaggatgcaaacatgttggtatttgtgaccccacatcaatttatggaggggatttgcagaagtcttgttgggaaggtgagagaagatgtggaagctatttctttgatttaaaggaatggaggttaagatggaaggtccatgcatgatctccacactcatttctcagcaattgggtctgaattgttgtgtcctgatgggggctaacattgctaatgaggtaagttttgatcttgttatttatatacagctttataaggcctgatctttcactaatgggtcttttgtatttcttttgtagattgctgtggaaaagttcagtgaagctacagttggatacaaagggaacagagagattgcagagaaatgggttcagctgttcaatactccctatttcatggtcacagctgtgagttttaataaatatatctctgaagaaaaaacacactgaaaagaaaaacagttgctgttttacaggttttgatttgttgaatgcatgtgaaaattataggtacaagatgtggaaggagtagaattatgtgggacactgaaaaatgttgtggctatagcagcaggtttgtagtagaatattgtgcctatcttcatgtctcaagcttattatgtagatgaggaattaaataagcatttgagcaggttttgttgatggattggagatgggaaataacaccaaggttagtggtatacaatattgtgaattgaaaggtaaactcatatttgatatcctttctctgttacatttctaaatcatttctataaattgagtaggctgcaataatgagaattggtctgagagagatgaaggcattttccaaattgctgttttcatctgttaaagacagtacatttttcgaaagctgcggtgtagctgatctcataacaacatgctgtaagagaattcttcctttttcattttcttcctccatgtgttttgttagtaaccaaattaagtgtggcacactatgacagtgggaggaagaaacaggaaggtagcagaggcttttgcaaagaatggagggaaaaggttaatatcaagtacttgattcatgatcttgtgataatttgaagtgtaaatacttactatttagttatctacctttcgaatttgcaggtcatttgatgaacttgaagcagagatgcttcgaggccaaaaactacaggtttatatatatctagaaactacactttgaacaaatcagaatgagaaaataatgtcagaatttcggttttcaatttgaactgacaatgcaatcatgcaactcatgaaaaacttagaacaagttttgaaaagcttaaaaagctatcgagtttgaagcagccatctttcttatagttacttttccctctgcagggtgtctcaactgctaaagagctttacgaggttttgagccaccggggatggcttgaattatttcctctgtttgcaaccgtgcacgagatctgcattggtcgtctcccaccttcagccattgttgaacactttgggcgcaaaccaaagttcacgctccctatctgacttttcatggatatgataatacagggtacaatctatacgagtaaaattttcagtcttgcaacaaatgttattaaaataaccacgttgaatatttaatatcagttcacagataaggattatgttcaataacactaatagtttagtcattatcatcatgcccttatttatggcttcaagagtaattttatgtttaatgtaatatgctaaaactaagttgaatacaattagaaaaactagattaagatatcgaaagatgaactattcacccaatttccatagttcagaacagttaaacataaatcaaataaaagggtcatgaacacaattatgttacttttgttgtgtatacaaatatacaagaaacttaccgagtgaaagcactactagtactaacttcacttaacacaacaaccatatcacatcagtattttcattgtaattttgctgcatttattttcttcttttccatctattgtagaaatcaatatcattataaccatcaaacttttctcatataataccatattgttattatataactgccacaagccaaattacacagcaggaaagaccattacatcatcatcagatgaaagatagaccaaataatttttccccacaataccaaagctgagatttgatttgaattatacatatacttattataagaagaattattaccctgttcttattctatccaatcgatcaacactctttcttcctctctccaattggtggtcaatacttttccgggacttctcgtggcaatccacacttctccgagacctttccatatggtcaaaagaaatccttaatttttctagtttatcaacattactgaattggtttttcagtttctcagccctgtctgtactatgcctcggcttttctcttcgatcagtactcttccttgaaacttcaaataatatatctgtactctttcgaggctgctcgtactggtctgtgcttctcctagaactgtatctctgcgaaggagatttctcaacagttgatataaactttttgagatgcctgatatactcagggtattgttctaaattacaatggtttccccccttgagccataaaggttcatatttttctttacacaattcccagagctgtttgccatgggaacaatcaacaacttcatctgaggttccctgtataaagacatagaaactagctcaattaacattagaatatcattaccaactcttttcatgaaaataatgtctttttatacttacatgaatgataagaacagggcagttaactagtgggattttgtcaatattctgcatagaaaataaacaacagataagcacataacacataaacattctaatcaagaacaaaaaacaaaacaagccaactggtattattatgtttaccttatatatgtcaaaccagtatgtacgctttacaggatacatgactcttaaaccagataatattggactatgaagaacaacagctcttaactgaggcagcttagctgcaaggtccaaagttggaccacttccaacagattggccataaaggatcacatcttcttgcctagtaccatagctctcttcaagacacttgtatgcagcttcaatatcagcatatgtattctgttcacttggctgcaatacagacatagttttgggccatagatgagtctctgagctcaaagtttccattaatttaaaaaaagtaacagttataaaaaaaaatctctaacaaaccttgccagatgattgcccatatccagaatagtcatacctgcacaaaactatacatatatgaggaagctgtaacttttttattgaattttatttacaccacacaagcccagatgttccttatgcatggaagggactcataatttacattagtctaaatacaagcaaatggaaagtagaatattactcttcaccgattggacttagattgatggacccaaacctcagcaccatagtactttcttttcaaaattttgacatgtactatctaaagcaagctctcatgacacaatttcacttgtaaattctcataaaagtacaacctttacgcagttacaattaattttccacccttgtttgaatcatcagtcacaaaagggttgatactaaacatggtaattaaaactaaaaataataaccgaaatccaaaattctaagaagatggaaagagaaaagaaaaattaaaaacccagcttcattccaatcagacccagatgccaaaactagaacttttaagt

SEQ ID NO: 378415 - DNA, 1063 bp, Cannabis indica
attagtcacgccgccacatcaatgaaaaggctatatattacctatatatatataatataaatatatatattttatatatatataaaaaaagtgtaactgaactcgctaaaaaagtcggaaactcggatggaatcaaggcaatggccgaccgagtcaactcggcttccgagccattgacaatttcgtgcattttcatgcacgaccctcttattggctttgaccacatgcaaccataattcatgtcaacaaagtactaaaattcgttttcatacatactaatacatcttatatatatatagatataagatattctaattatactatacattaattaatattaattttccttataaagctagttgatcaaatatataatttataatatttcttgatttctaattctcttttttctttttctttttcgccaccttaagttaagtctgtatgtattactttacttacataattttaaaccccaattgaaggcacacctaaggcatgtatataatatatgtaatttgtaacatgttacaagatttatattttattagtatacatatgatatttatatatctgtatgtatggcattatattattatatatttaaatagatttatatattggatcattttattaaccattaattcagcttcttactcctaagccatatttcatgcactcttttatttactattctgaaaaactaaagggatagagtaaatagaagaccagatcgcagatttggcacataaataattaaagctgaaactaaaaaaaaaaagtaaaaaaagaaaaaaaaaaaaaaaaaggacgagttgcaataattggggaagtacatgtgcaaaagtaggggtagtgggctgcgatgagtcatgggcgatcagatggctcagagttttctttttgagcccaaccccacttcatatatatcagtactcttcactttttaaaagttaattatataaatatatattccaactaattttacatttatattcctcttactaaattatttgtgtgtaatatagtattacttcctctaatcaaacataatatatatata

SEQ ID NO: 378416 - DNA, 2511 bp, Cannabis indica
gtttttatggtgccaaccctaaagtcctacatcgttagtttttatgtgttattaatattacaaatattattatgtgtaaataaaaaaaaaaaaaaaaaaaaaaaaaaaactaacatgtgcaacagattatgaatatagaaaaaaaaaaaaaaaaaaaaaaactcgtagcataacatttatctttcaacatgcaatgaatatgaatatttgtgccctattgtgccttttgagaggtaggtatcgtccagaagaaatacacttacacatcaatcatccatattaagcaacaacgaaaatggttatatctaactcaaatctattttcaacagtacacgacttgattaattattccttgacattattcagtcatttaaatttttaaccgactacaattacaaaagtcaccaacttgatattgaatctagtaacgccatagctaaaaaaacaagaataaaaaaaaactcaagttttgcaagagcctcaaagatccccaactataagcaattacccgaatttgctttgcaaagaggcgaggctcttcacctgataccatgaaatgatggtaagacagcaataagtgggtctccgtaaccaactgcttctgtaaaccaaaaccattggaataaaatattagaatgaaaaccagatcaaaatccatactattgcttcagtgatagataacacttcactaaaactctaggtaacagacattatcgccgagagatataagcctgtaatcttttttagttataaaagatctaatgaactaaaatgctttttttttaatataaaaatatcaactttttttttgggcaaagtaataaagttactctaatgaaccaaaaccattagcgtatacaaccataagcatttaaattttacctccttcattgaagaggaccttcaaaacttctccaccaacgtctgtctgctcaacataacaaaaggccaaaaccattacgacatatgtccatcatgggaaagtatgattaccaagaatgatctcaaaaaggaatcttaccttcactggaagctctgtgccaaactgatccacatatccaattacttgtccctctttaattagctcaccctgtatttttgacaataaacaaagtaagaaaatacaacaattgactgatttcaagcacttcaatatagagatacttaaaagcaaaaacaaagaccaacagaaacagattcaaagtattatatatatatttattttatgttgtcaattacacatataactggtgtataaattagacggaaaacgatacctctttacagatgggtggttgcttctttcctttaactgttcttccctttcggaatgaaccaacctggaaaatagataattgaagattttacattgacccttctcttgaacaagaaacagaataaacatcataggcagaatacaaaccgtgggagaagacacaagaacatatgcattagatccagaggcctccaaggctgctaatttcggtgatttcaccaaagagacatttgcaaatggactggtacttttaggagcggttttgggtgatgatggtggtggtgcagcaggttcagattcaaccattggtttagttggaataggaggtgctgatgttggcgagatgttggacaatggagctttggtgactccaatgtttcgcttcaaatgcatctcaaagtctccaacctatcacagaagagaactgctagtcaaataaaagaatgctcaaaccaataattttcaattttcaattttcaatcattcaaggagaggctgttctatatttcaaaattctccaaatgatcagttaaaatttcatcaatggtatagataatctaaaggttttcttagtaccatctctgtgtacattatgagcggtctcaataaagttattgtgaccattttaattctaacagtcgtacatacgtatattcacaagtgttttccatatgcactaagcaacaatgaagcactttgaaataaaccagattaagggtcttgaagttcacctttagtttcagctcagcaatctctgtctcatcacagacctctagcatcaacgcctaataattcaaaatactatgttaatacaaaacggttgaagcaaactttgtgcgttaaatggtattcgaggcaaatagttaaaacataaccattaacaaaatttcatgactaacatcattacatgacatggtgtgccgaccatatttctagagctatacagacacaagggttgagaatgacaagatgtgttaaatgagctcacttcaggaaatcaaaccataaatttgaagctccagaaaacatgtacactattttaattaaaacatatgcaataacaaccgaaatcaatcatccctaaaatgaaagattccaggcattgagtaaatgaaccagatatacataggtaacacatgcatactagtcaggaaaaatacttttgacaaatcaacattcgcccatttatataacatcgtatggtaggccataaattgggagaatttgcacccact

SEQ ID NO: 378417 - DNA, 8411 bp, Cannabis indica
tgtagatagtgttttcaaagtactttttttttttttggttgtggcatgcatataagaagctttgaaaataactaatttgtgggaaattccaatgcttattctaaaattctacaggtacttgatgatttagatattccagaggagttgagagacatgttcatcacaatagtgaaggccactgtttatggtttacatacatttgatgatttaaaatgatttttcattagtggtgtgaagatttagagaaagaaactcacattcgtattggaataaaagatatgagagttccagatgcagatcctgcatttgcttgtatagtgaaaattgatgaatcttttgttaatttgtatttgcttttgttattctatttcgtgtgtcgagaagcttcgcgccaccagccctgggtgaaatgaaagcgaatcacaagcttggtgaagccatagaccttttgtactctcgtggatgcgcctcttccgaatcttacacacgcctcctcctcgaatgtgttcggtcccgtgatgttgcccaagccaagagattggagtctcacatggagcttcacttattccatcccaccaatactttcctccataatcgtctcctccatctctacgccaagtccggtagacctgaccatgcacaaaacttgttcgataaaatgcccaaaagagatgtcatatcatggaacgctatgctctctgcttttgccaaatccgggtcggttgagagtttggaaaaggccttcgaacaaatgcctgatcatgattcggtttcttttgacacgatgatcgctggttcttcagggaatgagcgtccaagaaaggctctagagatttttcttagaatgaggagggaaaattttgagccttcggagtacacttttgttagcctcttacgggcatcttctcagttattgaatcttaggatcggaaaacaaatacatggtagagttgttggtggtaatttggctgggaatgccttcatttggaatgggttgactaatttgtacgctaagtgtggcgaaatcgacagggctcgttggttgttcgatcacttagtgaataagaacttggtttcttggaatttgatgataactgggtatttgaaaaatggtgagcctaggaaatgcgttgatttatttagggaaatgcaactgaaggggttaaagcctgaccaagttactgcttcaaccattatcagtgcctactttcaaactggatgtatagaagaggcaatcaagactttccatggtaccaaccataaggataagatttgttggacgacgatgatagtaaattgtgcacaaaacggtagagaagaggatgctttaatgtcgtttggagaaatgctagcacaaaacataacacctgacagttttaccatctcaactgtggttagttcctgcgccaaattagcatctttattccatggccaagctattcatgggaaagcaattttgatgggagttgatgatgatttgcttgtttctagttcactcgttcatatgtactgcaaatgtggagttactaatgatgcttacttagtctttgaaacaatgccaactcgaaatgtggtttcttggaccgctctaatcgggggttatgcacagaatggacaagatttgcaagctttggccctctatgaaagaatgctggaagtaaacatgaaaccagataacgttactttggtaggtgtcttatcagcttgtgtccatgctaatttggttgaaaagggtcaagaatattttgattcaatcagcaaaagacatggtatgactcccactttggaccattacgcctgtataatctgtctcttgggtcgttcaggtcacttagataaagcttttgatcttgtcaaaagtatgccccatgaaccaaacagtctaatatggtctacacttctgtccatttgtgcaatgagaaatgacattaaaaatgcagagatggtagctcaacatctctttaagttagaaccttttaatgctggaccttatattattttgtctaatacgtatgccagcttgggaaaatggaaagatgtggcttccattagatccctaatgaagattaagaatgtgaagaagttctcagcttatagttggatcgaaatcgataacactgtccacaaatttgtatctgaagaccgttcacatccagagacagaagaaatttatgaagagctgaagaaattagtcaagaaagtgcaggaaggtgggtttattcctaatacaaattttgtgctgcatgacattggagaaaaggaaaaaattgagtccatatgttaccatagtgagaaacttgctcttacatttggattgatcaagaaacctcaattatgggtaccaataaggataatgaaaaatattcgtgtctgtggtgactgccatcagtttatgaagtttgtatcgaagattactggaaggtcaatcatattgagagatttaaacagattccatcattttgaagggggggcatgctcctgcaaggactattggtgaacacttatgttagaattgaaaattttgccaagttatacaacactacctcgtttgtttttaggggtgggcccaatttttaaatgaaataacttttttaatcattaaaaaaaaatagtatgaaaattgaaagaaaaatcaggctttgaatagcattatttgtaattatttgacattatcttatctctgaattctttgtatacaaattttaatacggtaaaccaaacaaaaaatatatcatagaattagtcatcattaaaataatatggtcatattatgagggctaaaaaaaacttaatgacaaacatataatacaataactagttacatacacaatccaatacttttatgctcactcgtacaacactgcctaacagaataactcaaaaaaccaaaaattgcaggactttgcaaataatacactccaaaaagataaataataaaaataataataaaataaataaatagaataattatatattataaatatatgtacatgtatttctttctctgtgtgactcggttcgtcagtgtatgcattgccctgtataatatgaagttaatttacttgaaagctgaaggcccgtaccattgttcataaatttttccacacattccattggaaggttggctgggaagaataattcttatgttatggcagaatcaacaaactaatgcttaattcttccttgagcattgtgaaaagcccagaccatgcatgtcttcatgatcctttccgaacttggaaacttggaagatttctgaacaaaagaatgcagccaataattatcaatacatcagacatgtttgtttagtcttgactcgggcagcagtctgagaaaactatagttagagctgtgtataattaaaacgagatcgccatggacttatgacacccaatccgcacctatgaattggtttcctcaattcaacttaaagtttcttaggcaaattatatgttttcttgagaaacttcgcagcagcctcatcgtcccgataacacaaaactcggagaagtgtgtttggttcattcggactccactgacctgaagttggaggcaaaggaagcctggatttggcagaagaccccaagttctccagagtcacatgtttgaactgttctattaggctctcggtatctgtgtgatataggggaagaacatttttcactacattagaaaatttatctattatttcagatggcaatccatctccattggaccagaacagatctgtgagaaacttaaagtcctcctctattatgacggaatcttgaagagtgaaagcccgagaaggaccaccagctagtaaaactaataggaaacaatcaaaagaagctttcattacatctgtgataacgcgtgttctgaccctgtcatgcactgttgtagaaataacctccaaatattgctcgagttcctgaagaaaaggctcaatcctagatgtagaaacttcaccgatgtacaaaccatcccagagaacatgagttagctcatggaagacgaccttgtatgctgttgcttcgcagagttgtaggattccttcaatgcaagcagattctgaaagttcaaacattttgcccaaacgatctgcaatatcagattctgggttccccagatgggcaactatcctctttttaaacactcccaactccaatcgaatgagctgcaaagtacttatgcgaacacaaagttggggtaccccaaacaaggaatccccatttgtgttgccaacctgggatttactctgtgttaaatgtgacttgtccttcttcttgaatacgccaaactttgatccggtcgaacatctagtcataggaggcagagtaggaacaaatgaacttcgagaccctggagacaggagaaaaggcggtcaccaaagagatttttaatctacagttaaagcatcagatttctactaactaaactacataccacagccagacttgatctttgatacatagtgttggagacatctgtcaagagccttcatcaaatcaggaaccaagaccgagtgcataggtattggcaacagaaagaatgcttctaaagtatcgtctataatgcgtagtacttcaatagcagagggagcaaaatgttctttatttgcttgcggatcccatacctgtagaaaacatattattctcatggtcagttaacaaagattaaatcaaaacaccaagaagttttccaacagtgtagtgacaccaacactgcaacaacacaaataaaaagtagttggtcaatcccacaaattcaataattgtgtagccaagctggaactaaatagttttttagtattatggtgtttcactaggtcaaaagttggtcaaactacattattaactctttttttctttcttaatttctaaagtgtaaagtttgacctctttaagtgatcctaaaaattattattagtttctaaaataactgagtggcacagaccatcccaataccactctcaaatttaatcaagtcagatacaattaattggttccagtaaagctcaacaaggtatgcactattacctctagttgtagattcctgtcaatccattccttaagtctgtccactcttgtctttatccaatccttcaccagagtgacaattacagcttcggcctcataaggaggcatctccctaatgacggacttcccaccatcatcgctatttacagcatcttcaacagcaatctgcacaagatccttctccaatttatcggcagctttcagcacttgtaaagcgtcaggcgtcaactcattaacactggccacaaattgcttcagctcattcccatagcaagaatgaagggtagctacagaaacacctgctgcaagggggtgccatcccttcaaaactggactatatacagctttctcactaaaagccagttcactaatgtcttgtgcaaggatggctagtagagggatattattttttttgctcttagatgaacgctggctcgacttcaatttttcaagtttctgaaacagaaaagttcaaacaagatcttgagcaaacgtaaaaaagaaccaaaaatcaccatttacagttaagcaatgctaccagaacttgcctgaacaaaagctttccgcaatgaggatctaatgtaagagtcaaccctgtctcgagccacatcagtgtcttttctcttcttgtgatagttatgagaaatatcttccaccaatatctttgctgataacaccccaagagaaactacattctgcattgattcaatattgtcactgtcgaatatatctcggtaagataggagccttttctcagcccaacccattatcgaacttaaggtagagcttaatatcttagaataaaccgaatcaacagttgtcctgacatctttttcaacttccaccagaagattattggaagccaacagcaaatcactctctacttcaccagttgtaacaaaacgatggaacaaaatccataagaaacaaagattatgcagcatttggtttattccaaggataggccaagtcttcttcatgagttctaaaacctcatcaacctcttcaatcacagacgtttcttcattcacatcaaaacatgattctaaaagcatttggtaaatcttaagattcaaaggatacccatcagcccaatggcaagtatcagaaaccgaaccatcgaatgatctgcaagcaagagacataacaacactacgaagtgcttgcatcgattcactgttcttaccagtttctataggtttctctaacgacgattgaatgatcatccggagtagtttcggggcactatctgtcttatcaagtggcacacaagggtgcaaaagtagtcctgcctctaaaatcttcaaatttctcctctgccaagcttcaaattcttgttgttggttgggaaaatctgaggccttgaactgttgtagaaactccaatggcagaaccatagtctccattcttcttccgagcttttaattatcaattaaaaagaaacaaaaaagttacactaattcagttcatcatctttagtcaaaaaagaaattcaaattcaaaactatcactgatccacattcctaggactcaaccacatgtaaacaacaaagattcgcttcttaattgtctcaaaaaaaaaacatttccacatgcaaaatttgaaattcataacttaaaaaaaacacaaattgaagaagttaagtcaattgacagacctgaccagcagcgaccctcaacagagctctcctaatcctcgaatcagtctgctccgaaactctcatctgaaccctcatcatctcacccacagtgacagaacgtttcgacttcccctcactctcctcccctctcctcttcaaactcgcagacgatttcaacccaagcgcctttttcaccctactagccgccgtcgaagttagcgatctctgcagcgacggcgacgccatgagggtcgccgccggagcccggtcggtcttctcggactgtgagatgtaagtcaacggctttccgcctgtactccggcatgctccgactaggatctcgtaggccgtttcccggaggtcggagtcagaaatgtcgatacccagttggccaaacggggaaaccaagtcttgtggttgtgtgtaaacgggcatgacggtttcagtttgagattgctctctttggtattttctcgagttcccacctactctctccttcttcaccatattattataagccattgcttttgagtcttcaaacacacacaaaaaaaaagactcaagctttgggtatggagaagtagccggtggggttcactcgttttcttttttgaaaaaaaaaaaaaaaaaaacttcttcctggtaaatgagagagaaaaaaaaagtagagagagggattcttgcttgacttataaggaagagctaatatttttgtttaggaaagaaaaaaaaatcttttattttaggaaaggaaggaagacacggaatttgagagggaaattgatagagaatttcactttattaaaggtttgtttgttggtttattaagaaagagagaaagagaagttgggttttgttggttggtactctcaaacaaaacatggtaatgaaatttggaaaagatggaaggttggcttaccatgcaataataataataataataatcattaactaatagtaatacctttttagagaaaaaaataaaattataattatttaatgaattaatatcttaacacaattaatttaagatagagtgatagtgggttctcaacacaattatatttagtgccaagaaaaacattattatatttaggaaaaagagagagatgggttgtctttttgttatcatccattttaaagctttattttctaattggtttgttaatgggtcacaaacaaacattaaaaattcaatgaaaaaccataaagaaaaagttgcactaaaagtaagattattttgcttatttttgtttctcaagtatcaagttgatttttcatgtattattgtattaacattaatgttctacaatgtgttttaagcgattttatcaagaggaatagttgtggatttaataatagaatgacttaatataatcaaatctcaagcaagaaggtcacaagcatttggaccaagtccagtccattagattatatgtacaaatttgacctcaattaattaggaaagttttttttatcaaaaaaataaaaaaataccaggaaagatttcattgatcatgatgatgtatggatgggattttattgttttggttcggaaacagtctagtcttgaccaatccgaccacaaactcataactcattatatcataacacaaacatttaggtgatgtttggtaacactgttattttctaattttttaatcataaaataaaagtaaaatttttatttttaaaaattttatttttgaaaaacaaaaataacgttctgtaactacttttgtttttcaat

SEQ ID NO: 378418 - DNA, 3288 bp, Cannabis indica
aaagtactaacagtgcacactgcagtgcttgtcatatagacttttttcttttttctcaaacatatattataaacttactaaacacgtgataacttttcaattacattatgagaaatgatagaagaactagttctttcgtactttccaaataataactaaatatggaatttcatgaatatatctaaccaggttttcttaatgaaatcataatatggaatcacataaaaagcgattagcatttccatattattcctccgagcattgttattggacacccatagtgtctaataccttaatacttaattaaacgcgggtgctgctttttaacatttctctattcctcctaattaatatactacaaatcacttgtcacgtgtgtcaagattgactaaaaagccgattgcgaacttggaaagcctcttaaacatttttcttctctatatatttatatgtaccttgaattttactataattgtcaatctttcccgatcaataagtaaaataaggattttaatatttattttagaaagagaaaaaagaatggttcatccaattccagacaatgttctggaactgtggaatgagtggaacattagggcaatcattctattcagcctggcattacaggcatttctgattgtggccgctccactcagaaaacgctcctccaggaaactcatcattttctcactctggacggcttatttgcttgcggattgggcggccaactttgctgtaggccacatttccagcaaacaaactgacaaatctagtgctggctccaaatccagtaaccgagcagacggcatgatccaggccttttgggccccatttcttcttcttcaccttggtggccctgacaccattactgcctttgctcttgaggacaatgagctctggctccgccacttgttgggtctcgtaactcaggttactataatctatctcataaatttccattaccatataatgtgtgtacgtactcaaatgtagttaagacattagttccttattttatctaattataaaattacaggtttttatgactgcttatgttttcatccaaactgtcccgggaaacgatctatggataccgacggtcctaatgttcgtcggcggaatcatcaagtacgccgagcgaactcgcgctctctacaaggcgagcttaaacagtttccgtgaatctttactcaaaacaccagatcctggtccgaactatgctaagctgatggaggagtactcgtcaaagaaagaagctagactaccaacggtgatccagttgatcgcagagcccgatacagagtcgagagcctttagcaaagacgtggcacaaggtgacctgaaagagattgagatcgttacctgcgcccattactacttcaacatcttcaaaggtctaattgtggactccatcttcagcttcaaagagcgcgacgagagccgtgagtttttcatgattaggacggctgtggatgcttacagagtcatcgaggttgagctcaacttcatgtacgaagtgctcttcacaaaaatcgaagtggttcataacttggtcggctacatattccgtttcttagcttttggctctacctttgtcactcttggactcttttacgtttttgataaagacgatttcaagccctttgatgtcaaaactacttacagtttgcttcttggggcgatttttctggatgttgtagctctttttaatctcatcttttcggattggactgtggttggaatggagaagtacccgagaataagaaggtcgtcggtttcgagaatgtttgaatgtttcctcaaattgcagaggccatattggcatgattattgggaaagcaattttgttaaaagggggctaagaacggcactatttcggcggtggaccgaggcgataaccggctacaatttcataacttataatctaagagaacgtccggacgaacaaggcaatgatcaacctaaccaaaattgtatcaaatggtcggtaaacaagatcaactttgcctacggtgaagttttcaaatatcttaataaaatttctgagttcgtcactgataatttgggtttgacaactcttgtggacgatttgaagtacgccattagatacaaaatgaatggggaattatggaatttcatatttaaggagttacaagagaaagcagaggatgctgaagatcccgaaatcgcgaaaagaatctgcgaagcaaaaggctcttatgttcttctagaaggtactaaatacaagaacaaggaagaaaaggaaaagataaagaagttacttccttacatagatgaggtcacttatgatgagagccttctgttatggcacattgctaccgaactatgttaccagcattatattagtgaatgtagtgacaaaaaacttgatcccaagaaaaattataggtataatgaacactatcaattttgtaaagtactttcagattacatgctctatctgttggtgctgcaaccaacaatgatgtctgccattgctgggattgggcaaatcaggttccgagacacgagtgaggaggcaaagaagttcttcgttcggagagggaaagggaaggggcaagagaaggaggcgtgcttggacattcttggggttgatacagaagtgaaacctgagacggtgaaaggggacaggagtaaatctgttttgtttgatgcttgtatgttggccaaagaacttgataagtttgatgagaagattaagtgggagatattgagcagtgtttgggtggagatgttgtcgtatgcggctagtcattgtcgtccggaaagtcatgctcagcaagttagtaaaggtggggagcttattactttcgtttggttgctcatgtctcatcttggattgggagatcagtttcagatcaaggagggtcatgccagagcaaaactcatcgtccaaaagtagcttcaattaattaatttaataccctagctaatataatattaatttgtatttatgattttaatctcatcacattaattttcatttttctcttgtttttctttttcccttgtagttcttgtaccatttctctatttctacgtattagagtttttgcatgaatcaaaataaggatttttttttttttaattattattaatttgttttctgtgtcatttcttgttctaaataatgggctgtatcttttgacgtgaaaaaaaaatgggattatttcacaaatatacaaaaataataaaaaaaattataaaagtacgatttcacataattttaaatatttttatgattttttttattttatttacaggaaa

SEQ ID NO: 378419 - DNA, 2746 bp, Cannabis indica
ctataacaatgaaaatgaaataatttaatcaataaactaatgataaagttaagcctatctattattgttattattattatatatgttaatacatacatatatggcaatggtattttatatctaaaatagttagttcactctagctcttttattacattatatattcatagagacaaagatgaccttaatgaatgataacactactaacatattcacttttgtgaatatattaaatatatgaatgtaatatacattatcatagaaaatgattttgattactttcgtgaatatatattttttaagttgttaggaagtaaggtgaaaaagataaaatcatatttttaatataatttcaaatcaataaaacattgaacaagaaaaaaaaattagtcctcataaagaagttgaccaaactatgaagtggggtcaattaattttttcataaagtaaacctaattaggaataatatgacatatctaatatgcatatgaataaaaaataattctagcatccatatgatagttaacaaatgggatgaaaatagaagaaagacatgcttatgaagaactgcatttttagatttagatttgagtagagaaatttcgtgataatttatttttatttttaagtaattgtatttatgctatactgttgaacggtatgtttattttgttgggtgtatctacggttttcttccgcattgttagaatttggaaatataaggtgaatgaggttattatctcaaaaccaattggtaatgggaggagtagctcattcatcttatatatcacaatttatttccacacattaacaatgtgggactaactcttaatacaaatgaacctttcaataatataataagagaatgtcagtttaagataagtgacttcttttttcacataataataataataataataatattaattttagtttaacaagaataatcaacctctctctctccaccctattattttacccatcttccaaataatgatgacaccattaaagagagttactataattctccttttagtaagtagccgctcccattcaaaccccataatttgtcctaatagaccatcaaatatggggttatatcatcattatgataatgagcaaaatatgaagactttattcaaccaattttctttttttgaatatatttcatttaatttaaaaacccaaaaccaaaaaggtaggtttttcgcaaatattgtttacatgcatcttagtttacccatatatttactttaaaggataattttttattagattattctcttctctttttaagttcaatgaccctcttgtgagttgttcttttgtaacaaagtgtggctattagggagacaaaatgcttctttcttgtgtgccttttaacctttttttattcacatgtatcatacactcatatgctttgttgtctttttttaattctttagctttagagaaaaaaaattgattttcatattaattaataattagtatagagatttctctatgtgctaaaagttgatgatttgtaattggaactgattgtcatttcggagtaagtaataagtttgacgtgtttgtttaactagataattatattattgaaatttataatatttagtgtgtttggagtagaaaaaaagtttaatttgttgtgctcgactctaatagctcctatcaccgatttaagttcacgaatgcctattaaattattagtaatagctaagattaagttcaaataagagtgtttcaaaaaaaaaggttcaaataagagtgagaaactctataaatagtaattataatgctcatttgtcctacacttgatataatgttaaaaatatagaaaaagattgtaaagacatttatttttagatattagactgagtatacgagaataaatatcttggagataaaagtttggagctttgttgtgtaagtcttaagtgttcttatttttttttcttcatatttttgtgattatggttatttatattattattgaaaagtgttgtaatttttttaattattcttaaagctctcaatagtcttcaaacaatatgtgtattttgtatttggttgtatttgtaacattcatattccttcaagagtaatgtaatatttcccaacacactttttgcatttgaaaataaatattttctaatgataattgcatagttatttcaattcaaaacacatacaaaatattaattataaagcaactttctaagtggactctaacaagcaatacaatgtgtttgtggttaaaaaatgggagttggaaatgtattcaatattcatagatgaagctaacaagtatgtgattactatttattatgaaagcttttctttttgttgctcatagatgataggtgaaatgaatatatagacataaaaatcttaaatggtggggtgggtaacattcaaataaatcaaattgaacggaatcgaactaattaaatcaaatccaattataaaaaattagatattcaattacaattgtaatatcaaaatccaattaaaaactcattcgatctaattacatttgtatatattaaaaaaattatttatatttatttatatataataaaaaatattaaaatattaaagaatgtatattataattatattttgaattgttttcttaatctctaacacttgattgttttgtatatttagtttcatatgttttgatttatgttattacttaacagtgttgttttagatattttaaatttttagttgcattaaa

SEQ ID NO: 378420 - DNA, 6345 bp, Cannabis indica
tctctctctctctctctcatgcgtttttgtgtaacgactgtgagcgacaactggttgtttgttttcaaaaagactacataaaggcggttccaggctcgacctccaagctcctttctcattcattcatacgtatgttgtggaccatggaagcgccatgaagatgaagcgttcctactcttgctcatagaaaagccctgcgcgattatggcacgtgctgaatcattctgtatatatgtttgctttccgagaaattgactctggaaaatttatttgatttgaacttcttttcttatccagcaatcgttttcatagggatatagtttctttcttctctcgtggaactctagcaatggcggccgatgtgcaagtgaagctcgacactcctaattcttgctgtgcatcggtaaaatttcgatttgatttgagcatatatctgtacatacatttctttttagaatatttttgcgtttattctagctgcattttcaatctcactttggttattctttacagttgaagaacaagtactccaagctagaggagaagcggaatgctcttcgtcaagctgtgaagcttctagagcagcagattgataagattcaagcggagagtaagaaaggtaaatatctgtttacgtttgagatttttgaattttaaatttttgtcaaaattaggctttcgatgttataattaaggaaaaatggttagcgagggttgaaacttataattttggtttatacttgtagcttgtgagagagagcgggctagggcggattttgagaaaggggagaaggagaaagagtctgctgctaggttagttctggagaatgaagtggctacattgaggtctgagattgtttctcttaagaaggaaggggttaaagaaattggggatggaaatggcgaggtaaagattcttcgggctcgtgtttctgtaggggaaaaggaaatcaataaactaaaggaggtggttgaaaaagaaaggaaagaggcagaatcagtaaggaaaaatgctgaagcggagaagaaaaaagcttctgaagcacaaaaaattgtggaaggtgaaagaaggaaggctgaaaaggaaaggaatgttgccaagttggaaaaagagaaagctgagaattttaggcttcaggtagaagctatgaggaaggaagctgatgaaatgaagtcgaagttggtttctgaggcagtgagattagaagtggtaaacacaaagcttgaaggagaaaaacagaaggtggccaaggagagaaaacgggctgattcagagaaggcgaaggcagaggagcaaagaaagcttgtggaagctaatagaagcaagattttggatggaaagatttatgctgaaggtttatctcggcaattggaagagagtaaaagaaagattgatgaattacagaaagagatacatgaactcaagtcttccagtaatttatgtaaggcatctgttggccaattagatgcttctataaatactgaagataagactttagtaaaaggatcccatgaatcaaagtttgtgttggagctttcttcaaagattgaggaagcaaacaaaaggtttcagtcagagaaacagaaggcatctagagagaaagaacgggctgatagggagaagttgaattcagaacaacataaaaagctttcagaaatgaaccgaaagaaagcactggaagaaaagtctcgtgctgatcagttgtgtaagcagttagaagaagaaaaacaaaaggtccttgaattacaaaaacatatccatgagcttcgttccggtaggaaatcagttgcgccatctgctgtttcaatgactgaaagtagggaacttaattttttgaaaaaacaactcaagtttcagaaaatgaagaaaaaacatgctaagcaagttttggaactggaaagaagccgtaactgtatcctgcaacaagaattacggcatataaagctggattttgatcagttctcatgtcgcctagacatgcttcataaatctttctcaggtagaaaaggtgtacacagcatagagaaggttggtttcctctatttatattttgagtaatttcatttttctccctctgtaattggagtatccttacttgtttgggtctttatgtacttcagcttgtccttgaaacagaactatgagatgtgggtttgtttctttgtttttgctcgaaaatcacatgcatcgatgataaacctgtttcctattctctgatggtaaaacagtaaacataattttactttgaattatcaataaggtttgatgttacactgttaccaagtgactggatttgttgatatgttgtttaagacatcctgtctctcattttatttttcataagaaaattaaaagaataggagaaaagctttttagtttcaatctaataattaaattgtttatctttcaaattatactactggaccattgatgcaaacaatggtcacatatttttgatctaataattaacttgtttatctttccagtatttcactcacatttatattgtggaagctgtcactgcttctattatcataattatctttttcactgtaaatccacttgtttactcacctttggcatattttgtatctagcaatatattttcatcaattttgttaaaatccccacaatattttgatcctgtttactgattgatacttaattgcactctgcagactgggaacatcataaaagcactgaagtcaggctcagaatcttttcagatctacctacaaaagcaaaacgagcctttcaagagtatcttcccagcagtggatccctctggtactgtccagcaaaccttaccactctctgcacacttgtctactgtgcctggggcaaattttgttgaacctattgcaggtattgattctaaattggagtctctgcttggaggctctacaacaacaatgttaacgagttctgctataaattccaatacaacatctttttctgatggacaattggtcggctcacaggataagagttccttttctgttacgacgtcagcaaaattggttgaagggcattcacaaccaatccttctgacttgtcaggtgaagttctaaaattaagtccgtgaaaatctgctgtgtgctgaaaacatgtaaaagctctgttagcaatggtgatgttggaggagttactgtgcacggcaaaaaaaggaagagaatgcttgaagcagttgaaactattgaaaacttatacttcgaggagaagaagctgcatttacgattagaagagaagttatctgttttgcatggtattattaagaagaaatcggacagtccttccagaggagggaaatcactacttcctagtttcaatggcaattcatatggtaagcacggtaagcaaaacaagaagagaaaaacatcttttcaagataaagtggtaatgcaacatgcttgtgatattgacgagcaaaaggagagagttgtagttgaaactgaagtccatggaaatgcaagtttcggcaaacggacctccctaattggcattgatcaggtggcaacttttggagcaaagggggaaggcaaaagtgattctgctaaatgtgattttgatgctgtggtgggttttgaggacctagttgatggtaattacataaatctactaaacttggacagtgctgctgatgaagaatgttatagattagcaatggagatgcctctatcccctatacatcatgaaattgatatagagcttgctgacacactaaatgtggataatacaataaccttagctaatgaacccttacgcttaaatgaagaaaaaaagatgttaccatcatgcagaattgatactaatgatatggaaattggtatcaataacacaagttctgatggttcttctactgcaactagttccttggggcataacaatgaaaaccatgttagtactataggcatggttcggaatgattggcatactagtgaagttggaaaagctcctagttgcttgagtagcgactttggtgtggaaagtactaatccgactattttacaagatgagaagtctaagtttcagtttggtggtgaatcttggtctgctaccaaaaatattttagaacggtgtgttgttttttctaagatacaggatcaaagctgcttctctaggatacaatatacaataagaacttgtataggacaatgctctttggctactaaaacggaatggatgatgggcgagattctgctggctcttaaaattgaagaaaagctttcatccaagtaagttgatttttttttgttgtatacatatatttaatgaattccctttctcttttcttattcactcaatcacttctcaaattcttgggtatctatcactcatcactggataatttcacttgtgttcttatgcgtgaaaaattagtctgattatttatttatttaatctgtaatgatggaatcttgagtaacttttttttttcttccttggtgtagagagaaggtctgcgctctcttttccctgctgatgattaacttttctgtgactgcttctggtaaatttggaaacttcataaattgggcatcgatctcttgcttggattcttttgccgggcatgtaatttcaggttgcaattgcatgctatatacacattggctgttttttcattcatgatttggtttttcacaacagttctgaagtttaactttctatgctgtttttgcagtgatgtctgatatggaagttagaaggttgtttgcagaactaggctgtttagatgagctgtttagtctgattgagaactttctcatggatgagtgtgctaaggtgtacgatgatctctcatttgaatttccggttaagtgtgattcaagagttcagagcagtcttgatgtctcagatagatctttgttccctgtaccagcatcagcagaactgttggtagcagggagcatcatactggcatccatttgtgcagcagttgatcgcattggttttatctgcgaaacatcttacagcattttacgggcccgcagacttaacaattcattgaaactaagtattcttcatatatttgcatatttgggtggagatcagtttttcagtttgagtgattatagtctgatgatgactgtattgaagtctttagttagggacattgagagactaggatcttccgatgcttctgattcttgcaattcacttatgattgatactcgatctgcaatctgtccatgtgtcaaatgtccattttcaggagatgttatgtctgtcgaaaccgtgacatctttccttttggggaagctcaaagctgatgacttgttggaaactaagtataatacgcctgacttccaatcagacccattcagcaatgtggctttatatagtctcaacgatcttctatcattggtggagctagtagcataccacatggtacggtttgttttttttttctttctttttgaagtttaatgttggccatcttttgctggaatttgtcaatgcattgatactttgtttcaactttgagaatatgtttaatttcatgaaactatatttagcaaagtttttattatgagaagttggttttatcaaggtaataatctctggaaattattgaaagtaactgatttaaggattaacacatctttgtcaagattcttaactaatctcacgagtcatgagtggcagctttttgatatgcttttacgagttatcttgacattttcttgtagtaacaaccaccttatgaagactaacattataagaatgtacaccataatgaacaggagtttggactatttttttaatcaattcattaactattaaaaatcctgactttctatgcttttctcttattttgtagggttgggagtggacttgtctgaaaatagtgcctcagctggtaaaagttttggaatcatgtgtctataagaaatcaacttcagaagtagttgttctccttggtcaacttggcaggtatgtttgcatattttatttttgatcaacattgatgacttatcatgtctatattttctgtagcctttaccctcccttcgatcttagaaagctttttgatgtaaacttcatttcctattcatttgttgtacacaaacatttatatatatacacacacatattatgtgtaacaggactggaggcttcatcatcatttccttgctcacctcactaaaattattttcttacaaaatttttgagttacttttcttaacatcatctgcctaaatttccataagatgatttggcattttaaatttctccgtccttttttctttgctgttttttgctatttccaattgttaccatatgtattactttgaaacttttttttaccatttatctaatctattaattaaggtgccgtttgg

SEQ ID NO: 378421 - DNA, 4741 bp, Cannabis indica
attgcgacaggacacatactatttttattagcatttgactcagaagtaatgctaccaattgaagttaatattgcaacccatacgcacaaactttacaactaggacaaaactcataattgtggcaataatcattaaaaaaaaaaaaaaaaacaagatgagtctcaaatacgcaatgatgcacaccaacaaagaatcgcaagacattttaattaaagggttcgagaaagactatttaagataagtgatttagtcaggcgaagagtttttctcaatattcaagatcctgcaccaagcgtatttaacccaacataatcaaggcgaaagtaggatcaggcgtttataagttaggttaatcgaatcgaatggatcgttggtgaaaaacacttagaacaacgaataattaaagccatatttttagttaatttcaaataaaatataatttgaagcatttatactatgtaatgtttggattacatataaatgaaatttctatttactcaagtgacataaagattttattttactttacattacttgggggtatatttaaaattgaagtagttaattagttagatatatgaaacgtgaaaaatcttcatatttcataactgttgtaaggattatattaaaaaaaaataattattatcctattcctataaataagagtaaaaagaatatagaaggaacaaccaaatttctagctttaagaaaattctgccaaattatattctcactcacaaacgactaatccactattattagttcagggtcctgaggaaaacctttaaaagaataaataccaagtgctttaatatttaaaacaaaaaacatgtttataacctaattaaaatcagatttaatacgatgatatttagctaaagtgtaacttctgtttccacactttcacaaactagcaatcattttaatcaaaagttttatttcatcatttctttaacccaaatctcattcactcacatgattctccatattcattttttttttctaattctttcatcacctgcctggccttgccttattttttccacctcaaatacaaaacacaatcactcaagtataattttacatgaaaatttcagttcagtcagccaataatgttcctctgttttagagcaaaaaaaccagttgacaaatatataataaactattagattattggtgaaataaataaggtgtgcaacgtttaaaaaactcatctttaatttcaattcaaattcacataaacatggtttttagtatctgcatggaaaaaaaaataacattactcaagagagtgcatattccctccccaaatgtcatttctattgccccttgaaaattcaacaggttgccttcaaaattatcagaattaaattggtcaaaaatctagttatataacaatgtttttttcgattcaaaagcctatagttattaatttaataacatggtccaactaaataatagagattgaaaccagaactcagccctattggctattagataaaaacagagatcctgaattaggatgagaaagcattgcgtgactaagaaaacacggtttatgtcccccaaaatggctatgcccatggtaaagtgtgcctagacatagcataccacccagctaatacagacataatgtcaatataaaattaacagcctccccacattaataaataaaaaaaataataacataattaacacattaaatcatgttaaatatgacaatgaaatagattctaaaaagattaattcagtttttcactagtcagttatggtatcatgatgttccacttcaacttagcacaccaaaacatatgccaattttatataattaattaaaaccaatgtatatacaacttcacacaacaacattaattgtaagtagtgatttggcaacaaattgtgacacacaccttgttatacatgaaaatcattccataatgcattggatggtcagttgtaagcttgtgtgcttccaagcttgcaggcctcaaacctcaacatcagcacgtgttggaaattctaggccttcaagtgcaggtatgttgtccaaatcgtcttttgagaacaatgggaagaaccagagtgcctttttctttccaaaaacctttaggcgaaaaaaaaaataataagtagaagaatgaatatgcttaacgagaagacaatgccactgaggcatctaaaatttgaagcaaaacaatgggctgcttaatataacgtgaaagataattgtattaaataaacctgctcgaaattcctcttctttccgaggtcatactgccatcttactgctcttttcttctcataaacctacagaagttctcatataaattaatattgagacaatctgccatgtacaattataattagtgaaaatgaaccgtctcaaaagtgtgtgaggtggtttctttttcagttagtcatactcaaactcaaaccaagcatgcatttaactaaaaaaatggaataaaatctattaaatcacatcagagcatgtcaaagttaagagggcatgctgtatggagttccaaatgggaagtacagatagcataatgagcaagatcaaagttacataaagtataaatttgtagatattacctctacggatgtagtattgctagatacaagggatgcatgcataataatgaaacaaagaagactcaatgaaaaggccaaattaagaactgcaataaaacattgtcaatcgttagcaacttgaataaaaagtggaagcagggttaatatccagagaaaaatcaccaactaataagggaactatttaccaaaagctgtaaaaacaatagcaagatttccagcagaagtggaacgatttttggcatcaccaaagaatttgacaaaatgaggcagcaaaactaaagtatccaatgtcgtctccaggaacgtataaagctttatgccaaaaagtaaaaaaaataaaaaaagcaggataaaagagtcaaacaacaaattgaagaaaagagccaatcagtctgtctttgtgtgaagggttttttcctagcttcaaacacagaattccataagcataaaatataaatcttgcaacacttagcggccttatctattaagtaatgaattgaatagagcatgtgagcttaccaaaaaaagaaggaaaaacttatagttctgagctcctacacaattcaccacccaaatgcaatggtgatccatcttaagcacacatctttggcctacaaaaacacaatatttaagaactataaaattttggaatcaataacatgatcaactccaagattcaagcatcgtaggaatttctcaacctatcgataagcttacttacaaacagctctcaaatcatcaaaaggtctaacttacaaacagaacaatgatgacaacgtggcggcttgccaatttggcaacgagtgcaatagccaggctgtcttctttctattccatctaaagactgtgtggaagacgaagcatcaggagctacctgatctgaatgtgtaggatgagtactagcctgcaaattatcttcctccactgaaggtttccaattttcagggacagtacctgggtttttaaaaactaccctaaagtagctccataataataagataagctgcaaaacaaaaagcctcactcataagtgagtgacaagaagcctgctttaaatgttttttttttttgtaggtaattagtactgttaaaaagataaaaaccacagacgatttcactacaattggagtatgctgaccaggggaaattcacaagtgttttgatccataatgattttgtttaaaccagttactcataaagactcttttgtgaacaaataagtttaacagtcttcctaaaatagtcctaaataaagtcaattccataccctattcccaaaataaatgagcaaaataaataaataataagtgtgaagtgaatccaacaatcaaacgcgattcaagttagtgaaataatagcaattgctgaaagcattccaattactgagactatgttacgaatttatttttatgactttcttttctggatcctaataaggaattaattcaaaatttaaaaaacacaccttcagaaagccattacgtgacaactaccaatgtatcattcaaccaatttcacagaaaaccagaacttaaaatctgaacagcaaaattcctaatttcccatttaacccaaatttgaaaaattaaaacttggtgtgaagcgaatagttagtgagtattaccagagcatggaagataatgatgacagagaaaccgaaaaatgagtgaagaccaccacggaggagctgatttccgcagatgaagacaacgacggcgtagtaagagacggctataatggcggcaaccaatagaatcataagatagccaaggaatttaaggccggagcagagcgtaaagacgttgatctgcatagtgggagggaggaaagatagtggggcaaagccgatttgaatatgtggaatgagcggagccctgcgtcgtcgtgggaaaagacgtttccagatatccgaagccagcttttatcgcttggcaaactcccaccgacccaccctttttgctttgctttgctttgtagcttccactgggtgacgctgcaacaatctctctgtttctttgtttcgttactttactcacagctttcttttactgggagtctgggaatggtatttctggtgtttcgagtctttccacttcaaaataaaaagaatatagttttttagtgtggaagaaaacaataacatttg

SEQ ID NO: 378422 - DNA, 4875 bp, Cannabis indica
gttaagttagttaattctttgatgagaattttatctaaaacaaattataacacttttacatgacattcatgtcatcattattaataatagttaatgatgattttgaagacatgagatcactttggagggaattagtaaaagagaagaatttattgatttgaaaggatatataattatatattcataattatgatatatgaactaaaatttcggtgcagactttaaatactacttctacttatttatttttagcttaatataatggcatataataggttaggagggttgtcaattgtcaaagttgaaaaacaaattagtggacttgtcttgctcactgattcaacctttcgagcataagaatctaaagttttaattttaatttcataagtatttagtgtttataaaattataattttctttcagtttcatctatacaagtttattttgaatttattaaaataatatttgaaagtaattgatattacatatttctgtctagactcaataatctagattctgagttttatatctgccttgtttaaaacaataacagagtatgtacatacgaaattagagaaaaattctaagctttttatcctgtatatatagctcaatcctaggcatagacaggttaggcctgtgtctaaggcccatctagtccagtaactcaaaaaaatattttcccattttaaaattacacatattttttttactaattttgaaaaatatcacttctttatttctatataagatctcaattttttttttaaatgacctactgaattggaaattatacatatatatatatatatatatatatgtgtgtgtatggtccatgttcattactagtttgtagctgtgctattaagctttgattgtgaaccatgcaatgcatataaacgctatcatatgtctctctttcatacttttcaataacatatattatataatgatgattttttattttgtcccataaacacattatttcgttattaattatatcagaatttttgtatttcaatctcacaatgtattaaaattaatattattgaaaactaatagtttattattaaaaaaatcatcaacgatttattaacagaaatagtcttattgaataaaacctaatttgatacactaaggaaaactcatttaatcacacaacattttttttaataattttattgtcactaaaaatacatttaattacactaaattataacttttgtgagtaaagtttagctacaaattttttcatttcaaatacaacttatttttccggcataatatatataggatcgactgataacataaataaattaagtttgtgcctaaaactccaaaagaaggagcttaagctctagaaaaatacaatatttttcaaaacaaaatacctataaatttatagaaattgtgtttttatttactatagtagaaagatattatgaaactagatattttttaatactatctagcaaaataaataattttgtatggtaacctttttataaagtaatcttatcttctccatatagagaatcaatataaatatatttatgtatccaaatatttatttatttatataaattgttcctttccaattaattgtgaggagggcaccaactttttctttaacaatcttcttgtatattattttatatttttgttcaattatgtcactagctcaactacataattaatggctcgtaggctccaaaagatgacaaagttagatctaaacacaaaaccacattttcttccactaaattccaaccttaaaaatttgttacattaaaagtgtaaaaaatttgtgatattagcctttgttttcaatagaaacgtttgccattttgattagttgtcctttttattacaatcacaaatttgccattttaattgtgtagtacggattatgtatcgagtctcacatgttttaaattaatagttatttcaaaaaaatcactaatcattcatgaaacaccaccatgtggtaatctatgttacaatttcttttgcatgctctcaaatgaatgaatgaatgacatttataatatgaaataattgtataatatatatttacgtagagaaatattactattgatttctagcactctcctacttgttaatactactattagtacaattgagtatcggatattatataatttagtgtaataactattaaggagtactgctaaccaattataaagtgacacgtatagaaagtgttaggcactattggtgcctaataacaatatcactcatttactgcattgaagaagaagaatgtgaaaaagggtgcaataggaacattgctatttgcactttaaggtgtctaatactatactaatgtatcactttataattgagcatcagttttttatatgatttattaaattaaaattgtagaactccatattagaatgcaccaataatagtatgtttattagcactataatgatgcttaataaaaacagtcttattatcaatttgtgtgtcataataacatattcaagtgtaaaacatattataagtatttctgacttaagaattattagttttcctagaaataagaaaaaaaaaatcaagaagcaaatatgaaaagagatccacagctaataataagcaatataatttgacaaattgagaaagatataaaatatatatagagatacatacaaagtagttgggaaattaaactcaataaatgaagaaaagattaacactattgagaaaaaggcttaaaaggtccctttcatgatctcatttgctgtcctaatttaagtgcaaataacagttagcctcctaaacagattttctagagctcaaatatatcactatatataccactaaaagaaccctattcagctcatatcaaattgaaattcatataggatttcaaaggctaaaaattgtactaaaaaattttaggatccaaaatgaggatcctatcacttttccaaggggccattcttggcctcttactatgcctatttgctgtgagcttcactcatgtgtcttcaggtaattaacatttaattatgtaacataattttcttactagtgtagtatatgttgtttaagttacttgagcaaaatcaatgtaaattatgtaattattaatttgtttgtggtttttttggtatgtgatacaacagaggctacaggaatcacagaggaaaagacattccttccaccacacaaaccatatttcaagaaatttcatgattactttcatcattatccgaaacccatgtataaaccgaaacctcaccccgttccagtttacattcctaaacctcatcctgttccagtttacattcctaaacctcatcctgttccagtttacatccctaaacctcatcctgttccagtttacattcctaaacctcaccctattcccgttccaatttacaaacctaaacctcacccagttccagttccagtctacaagcctaaacctcacccaattcctgttccagtttacaagcctaaacctcatccagttcccatttacaagccagagccaaaaccagaaccaaaacctgagcctaagccagagccaaagcccgagcctaagcccgagccaaaaccagaaccaaagcccgagccaaagccagagccaaaaccaaagtgcgagcctaagccaaaaccaaagcctgagcctaagccagaaccaaagcctgagcctaagccagaaccaaaacctgagcctaagccagaaccgaagccagaaccaaaacctgagcctaagccagaaccaaaacctgagccgatgccagaaccaacaccaacaccaacagttccaatttacaagccgcatcctcatccgatttttaagaagccgaaataccatcatccactagccccatactttcatcatccaaagaagccatgccctccattggcaccttaggtagactatgataatgttccttttctttgttggcatggtagtattattgcaataaaggctttaaatggttgaaaaggaagtttataatgacaagtgagaggataaaatatcacaagatcattacttgttacttgttaggtaaggttgagtttgagattgagtgttgtaagcatttgtagttatatattatgcatgtgaaatttaatttatggttgtatgtacttgttattttagattcatttgtcatcaatatggcaatctgtactgttatgatcattgcaatcatacacattgagaatttcaatttatttatgttcacaattcaaattctcaacaaatatatatataaatatatatatatatttatatatgtgcattaatgtttttctttttttcgaaaatatttacagttctgcaacccaagaattatatgagagcaatatattccctgagtgaaaagaagaagaaaataataatataatgactatatatatgaaagaaattaaaatcagtgaaatattgatagacaatgaaattagggtataattaaaaaagaaagagagaaaatataaaggttagaaaaagaaaatgtctcatatgttgttgactggtaagacaagaaaacacaaaattaattatttgtaagtgctcatgaagccaccaaaattttacaccataaaaattatattaacgtaaatatttaagtgtaatttttgattttgaataaatatttaagtttaatttttaacgataataatactaaaattatattcttaaaacatccgtaagtatttagctgttaaatgtcaatttattatccacatgttattttcttcttagtatatttaaattaattttcaaataacaaataaaaatttaatgaattgaacaaatcagtgactgtcacgtgaccactgaccattgacatgacatttaacagttaggtacttacggaagttcta

SEQ ID NO: 378423 - DNA, 3930 bp, Cannabis indica
aaaatcctaattagccttatattaaataccattaatatttacgtgccatatcatcaggtgccggacattggagatgccgaagagcattaatttttatgacacctacttatatcgtattaattaaacacttacactttaacataatttctcaaaataaaaaagatagctttattattacattatgcatgaaataaacaaagcatgcaattattataaatataattaataataggagaaaaacaaagacacactcactcactcactttcacacaaattttatttaggtaaaacaggaaataaattaaaggttatatttatttaagagatgagggaaggagctgggttgtaggatcaacgtggcaacacttgtagctaatgtaagtctccatggcccgaaggcattctgggcatttcatacaatctggggcttttccagcaacagtaggcacatcaagacgaatacagtggcgaatagtttgagtgaccttagtgtgaacctctttgaaaccaacctcgaatcccttcactttaatcacttccttccactgttcaaactcctcaacaacctttagaatggtcgagccatgcccagatgtcaccactgcagaccctttgctaagaatagcccaagcactctcgttcttgtaagaaagaagcttttggatctcttgagtcaccgggtcaacatccttgttgtgatctttggtgaagaacaagctctctattccaccccagaatccccctagaattccatggtcttcttctcctttggttgtctttcccacgcaaaagaatttaatgttgatctttgcttccttgatgaagggattgcttccaagtgcagtcactttcttggtgaatgtttcgatcaaatctttgtcttttcctccgtagaagaagatgtatttctcctctttcacctatcataaatatataagaaaagaaaccaacttaagttttgggaaaccagttatctcactattcaaggagaagaaattcacacttcaaaaacaagagagaaatcatagcaaagaatcatgaattgcactcgtatataggtaacttttactcgcacaatagtcagggctaactctgaaaatatatgggcaacgaattaaattttcgtgttatgagatttgaacctatgatcttgaatattatggcatccacctcaactaactaagctataaatatttgttacttaaaaaatgtgggccctaggcatgagcctagctgcctacagccggtcctgaaaatagtgtaccggcaaaagtattggatgaaacttttcatccttactaaacaaaagttaattataatggaaacataaatattgatcaaatatatatttacccaagtctctataattgggtcaattcttttgacaagtgaaccaatccagtgaatttctttggagatgatttcttcagatttcttgtcaaaaggaaaggccttgattccccaaacacgaatgagatgaagtgcattaaggttctccaccttcccttgaggagtagtcaaaaccaacataggcttaccctggtattgccattgttccttgatgaatctaatccctgcaatcggaccaaattgatgcaaacagtaccatggcattttgctcttcaaagtctcatattttttctttatctcatcacaccacttctctacaatgggaacccacactattgtgtagcttttttctttctttgtttcttcataaaccggtttaaggatggaaatatcttcttctgtgatctctacaccagaaaagaacatgaatacgtttttcctcctcagcacatcaatgttcacctgtgtttttttacaataaacatataaattaaatgattttccatttactaaataattaattatatgcaatattattattaccagtcggtttgtggaaccatcaatgagtggccttggagtatccttgaaaaagatcaaggctttgaaaatctccatgatttcagttggtgtacggaacagcttgcaaagcctcctgtaagtctcggcctcctctgaaatgtttattaatgaattaattttcatggaatcaaaaaaagactaaaattaaaagcactgaatatataattacgtacccaattgtcttctgcatacattcaaatgcatagtaagctggttttggatgaagctgattttttgagcataaggggacaaatcgaaagttctgtctggcctggtacgtacatatatatatttgttaataattagttaattaagaaaacatgtttatacattatctatcgtaataataacttacttgtcactgatgagaatacaatgcttagtagcacatgcagcaatagttagaattgcccaatagacatcgacaggcaaatgatctaaggcaacagacaatccaggaatgtctttgacatcataagcagacaatttctcaaactcatcaaacatagcaatgactcgcattgtgacattgatgagactactgagctcgagaactgcctgtcggcgtttcacgagctcagaagtcttgataagggatggcactcttttgagtactcccaattgtttggccaatgagtcagaattgtaaagctgagcgatgagccaaaagtcaccaaactcaaaggcgaaggctgcaagagccaaaacagccttcgcttcccacgaatagttggacagcttattgagaatggctagtgttgtttcgtgggcagttacctcattaggagccttgcatgaaagctgtaatacaattaataccattaatgtaaataatttgtaatcataatataataatcatattattaattattgttacctcgttgttgatacccttgagcgtgcaaaggggaacattgaggttggctaagctgaacttgttctcaacattgtccacatcatgaacatgaattccttgaacaatcttgtcaatgatttggtttgaacccttgagaacattttcgacgatgacgaaaagagagtcctcgtcgaaagattcatcagcatggacatgagtggcatagataaggtcgttaattttcttgtcagacatggtgaagacactggtgatctgatcagatgtgatctcgatttgctgcaccactacattattaacattagtatcctgtactactttggaaaccacgcttttcacaccgttcaacatggttaactaattgatttagagaaacacagagaaagcaaaaagttgtgtaaagcaagagtactaatcagagtactaatatatgtaataatgaatatttgcagtgatgagtggtttgagctgctgaatccttgctctatttatatactcgtttattggcctaactttggaccttttctacctacctactcctgtctttttttcttttgattaatacttctagtgatgtcatactttccaaaaattattatattaaattatatagaatgcgatagccaatcacaataatagcacatgctaaataccactagtcctaacatttctctttcttttatctgttcacatttctttgcctgcagaataaccgcgtgaaaatttctaactacttcctttgtgtgaaaatttctaactacttttaccaatgtcattattactacttcctttgtcttcatttatattagagtaatttgcggcataaatacttaagttttatgccgagtagcagataaatacttaagtcgtattttttgcggtaaaaataccttccgtcactagtgtggaacttccgtaggtacctggccgttatgtgctaggttagtgtccatgtgtcattctttgattagtccacgtcatttaatttatatatttaatttaaaaaattaatttaaacatttaaaaagcattttaatattaaaaaaatcattaaaaaatgtaaaaattatattacaattaaacataatttattaaaaaactaaattacatacttaaaataaaat

SEQ ID NO: 378424 - DNA, 4212 bp, Cannabis indica
tgtagaagcaccttgaggaagtagaagaaaacttacctaaattgctcctagaggtcctatggtcgcataagactaccgagaagacgacaactggacaaactccattcgctctagcttatgtctatgaggcaatattgtgtgtacagctattgccaccatctcatagaaggacaacctgtgaccaagatacaaataaaatccagatgatagaatcccttgaccaaatagaagaacgaagagatcaagccaacctaaagttgtaggcctaccggcaaaaggtcgtaaggaactttaacaaataattcaaggatagtaaattatttataggagacttggtgctctgaagagtgttcctaaatacaaaagatctagcagaaggagtgtttgaacccaaatgggaaggcccctattaagttacaaagataactattaagggagcctacaaactaagaagatacaacgataatatggagctcattctcctaccaacatactattatagagaataccttcgcaaatactaaccaatgaccagcttataaaatgctactttgcagtagtagttctaccaacttaaaattaaagttaaaaagagctagtacccacgacctttttggggtggccgcccaccattcttcaacggtggcctctgctatgcaagtcaagaaggggtagctatttgatatcttgaagcaaaacttcattatgtaagcttgtagattcaatttatgtaagtttcacagctacaaagactaattaatgaataaaaaataatatttatcttcaaattattttgtcaaaaccacttgctaacaagattaacttcttaaagttattccattttagttccacatgcatacaattggtagcaccccaagaaaattcccaaacaatttctatgaaacttggtgaattgcaagttaccaagagatcataagtctgcatgctcacttgggaggcacccacaccttacggggcattaaactagcatagagaacttatgcagagacattttaacacttagtacaagctactaaaccaacctctaagttagttgcagccatactttagcttggcataaagaaatgtaaatctggaatcttacatgccaaggcaataagaagatagctaggattaaagaccttctggtcggtcacaccatcgataataaaaagcaacagggctaaatagtagtaacgttcaaaaatagagtgccaatatgccaagagtacaaacatgaaagtcctgaggctaaaaataagtggtattcaaaagtaaaaggcatgtaggccataccgaacatgaaataaaatgtctacattgataaaaccataatgttgaaatactaataagttgaaaactacatgtgtgcaggtgtaggagggggtgaatccgaagctgcagagtttggatcaccgatatgtgggccaaccatagcctctaaaggttggcctaccacctggtcaaagctttcgccgataacctccatagtagatgggctggtaatttcctcatcaaaatgcatcgaggataatccttctgactggatagttgtctagtccgcttcaaacctactctcaaacacttctctcccttgggccaatgtgctctctaggaaagaatcatcccccttttatgaaatattagtgttggggttgcatagcttgaactcataaatgagttatgaagacaagcaaacatattcgtcccttatggcctgcgggcaatcgagggctgccctcagcttctcctcacacctcgtgaggccagtctccaacttggatacattagtaatttgtaaggtattcttgtggttcttggtaccgagcatggcctccaaacaagaaatcatgtttcggttctaaaggccaagagcctccatatcacgtaaagcctttcccttttcgaagagtttagcctctaagatctttatctactctcatagagcacttcataaatacccctaaagttgccatgcaatagggtcagcttcataaaggcttgcaacctaaacaaaatcatgattagtgcaagaaacaacactggctgaccagcccatgtgcgatgcgcccaaggccggccaacttatccaagacactactcatggttgactagcttactacacaacccctatggctgcctagcataaaataacaaagaataaagttagcaaagttaaatgtggcacttatcgaagccaactcttgaagactaacggaggaaagcatctctagcgcactgtcaccatgcacctacaactcgctatccatagtaggataggccctatccatatgcccatgggccacctccatggctctctgcctgatggttgagcctactccctaactaggccttagggcacccctgcccaaagatcgttccctccacacaagagggtcaaccatcataggatgcttggtcagtgcatgccctacaggaagaggaggaggaggacatgacctcgtggcatctccagcacgggtggtttgagcccccttggccctcggaccactcgaaggctcctgtaaaggtccactaactagacgtcttaacctgaaacacatatctgaaaccaaaaagtaccaaagtcagactacaagttacaattattcaatgaaagataagaatataaaagatggtgtaatcaactatcaaataccataatccttagaaaaggattcatctaaatcctcaactgctacctttcctttacctatagatataggaaacggataagtaggctttgcagagctctgccctcaaggcctaatccaaatagtagcatctccaactgtgcccccacgagccatccactagcaggggccccactctctcctctccagaccccgggctattcaggacaatggcacattgtcatccatgtcaagaacatgcaccactaggacaaacctcctcagcagctggggctccatccacatccacaccaactgatgggccctcagcttcaatatctctagaaacaagaggataaaggtcgtacatctgaaagttggctacactggtcaatctgattacgttcctcttctccattaggagggacaacatgggatttgccctatccctcatctgcaaagtagggatggaccacttatatgtcagcacttgatggaagcagcgatgtcaaatctcatgggtatctcatgtaatgaagtagttatgggcatatgtaccaattttttatagagacgtggtattggtatcacccaaccagactgaactagaaatacccagtctagttctccttttgagtagattttagatcaaaatagtatccaatctcaaacaaatttggctatggccagcctagccccacatatagaacaaacatcacaattaggtattttatactatttagggtgatttgtgttggacacatcccgaagtaactagcaatatctcggaagtattggtgtcgcggcaacactgcaactagcggagagtaactagccattcatcgtgggtatctcacattggacacgtctcactagtccactagccaatatcctgtcaaaagtattgataggaataattgatataggagagacccacctttcttcctatgatccaacgtcatgaatctaaggctctgaagatagaatcaatacattgaaggttggcctagcgtggtcaatggctgcccattaatgtgatatccgcctagagagcaattgggaaagatagcacaagtactgtaagtcctcctcctaataggcacaacctcctccatctcagactagatattagagctctaagccccatggccgacatcaggcacctccacctagccgacctcaaaatctatatcatcacaggctgtcttccaattattattgccctaggaacatgagggtcatatcgtggcgcactatgatatgattattgcgttttggccatagtatatgactatcagtccagaatcactcaaaaggagcaagcggacagactgaatgctatctctcaaaagcaaagctaagggaacccatgaaagaggggttgtcacctccccaaatcaacactcaaaatcacctacataaaagagacaagaggaggtgagaaacctgacaaagctacaagcaatgttctggaaaattatacccaaggatactttctaggaaaatcatattgtacaaggctgggtattagtgaagtacaattgtaacaccctaactagcataggcgtattacgtgatt

SEQ ID NO: 378425 - DNA, 6051 bp, Cannabis indica
aaaaaaaagataaaaatattcttatgcaagaaaaggttataaactagtcagtgcatccttttcctcaattaatcaaatcatgtcatgatattcggtatcataataaagaaaactcaaagaattttatatttaacacacaaataggaaagagacataatttacgagttactcaaacgaaagattcttcaacatattagaatacaagagtaggaagatatatatccataataacactaatatactactcatttctagtacactagtattttctacagtaaaaccaaattagagtatagtgccataaacccggtagtacttgatggtacatagaaaaatgtcacaagaagtcgaagtaaatcaatagcaacacattttgaatctccataaaaatttcacatttctaacacttttattatcgatgtcatttttttgtgctcttacagaagtgacattccacaagaaaaccaaacaggtaattaacctgcagcttaagggcaaataataactagttcgtaccaaatatagcaggggaagaaatcccacctaattgaaatttcagaaaaggggaaacaaaaaaacaaaaaacaaagtttcgtgcacctacattaagcagaacaatctcacatctgccgaaacaacaaccaatttatctcgatgacgcagaaataatttcagttcattttcctcttgtttgataaaataagaagacattaataatcttacacttgcgcaccaagttccaatagtagagtgtgattagttgcatttgatgatgggccaacaaattgaataggacctgcgctcaacaaagtttggacagcactagttaagagtacgaatattgagcagtaagaatattagatgtttatggacattcctggttcgtggtaagaaactttagcaactatcagattcattactaaccgggactgatataacaattcttgatggcccactggtccctcaaggatgcaaacttcttaaaaggtgcacctgaaattcatttaaataattagagagggcagagaggaaagaattttaaggagttaagcaacctaataagacttatcatttaccccacattactactaagtataaaccaagtaaataagtagtctgcttttaccttcaagctccaccattgccttcttgatcactggcttaaacttgcctgaaaacaagagagtcccataaatcaaacaatattaaagaagaagcaatacagcaaggacagagcagaaatcttcaaatattcgtccaatatcatccttgcaaactttagtttacaaatgccagagaattttggatgataataattacactgagtgcgtaaataaaggttatagtagtaccgtgtcttctctccacgtccattagtgaggttaaagctgtcccacttactgtccattcctcaaccggagcagccaaattccctacctgtatacattaggcagaaaagaaaaagagaaaagagtcgttattgaactaaaaaaacttcgttctcaggataacaaaaatatacaatagttgcaaacaagaacatataagaaagaaactataagaggaaggggaaaaatagaaaaaaaaaaaaagaaaaaaagtacacaaaccgatgatatcaatccagttttcccactgtgaaggagagcccctgcaccataacccaatgcataacaataggtagaatcaaaatttgttggtagaccacatcttccttcatacctgcacatggaaagataacaaggatgaactaaagtatgcttttcaggattgttaaagcttcattgcttttctcacagatttctatttcatataatgtgaaagctacaaagcaataaagcccattgtacgagtcatacagttgtcagcaaaatctcgcaagcaaatcctcaaactcaatgagcctgacacattaactttcaagctaaattaaaatgtcatgcaacattggtaattggaacttgcgactcaaattaattagcgctatttggagatttcagcttatttatggatatatttaatatttacagatccatttagcttaaaagaaaaagacatgtattaaattgaagtgtatagaaaagaaatcaaatataatttctttctcaatttaggcaaaagacattaaatacccgaaaaagtgagactgtccttggaatccacctttgtatgcacctgcttgactccttttctctaattcagtttcaaccatttgaataagcatcttctctgtttctattttggcaacctgatggaaataactgtacatgaataacactgcccaatatatctagaacagtaaatatggaatagttgagtgacaatgtataaacatacctgaacatttccatgaggatctctttcaagcatcaactgctcttggattgctggaggtaaaaattcaaaaagctgtaaagattgatcagcaagtttctttttccattgcccatcctcatcgacaacctcgtgggctagaatttcattcagttcggcgataagttgttgcacctacaaattgcaattgactgtaatgtgggtctaatgtaaagagccaaaaaataggaaataaatttacacagcaactatgaccaagaattttacctccggaatgaaatcaattagaccttcaggaataagaatgacaccataattataaccaagttcagcacgtttggagattatgtcaacaatgtaatcggtaacatttttcagtgtcaacttcttttcagcaacctgtacagagatatacagtgataagattatttttttaagggaaacaaaaaaactgtattacagtacttcaggttcaatgtggtgcagaaatcaatagtaataactttcagcaccacattgaaaatagattttatgggaacagtaacttagtaatgcataatgtcaatactaaaagggtgaagtggacactagcacctttaccattattatagtgattctaaaaataaaaccaaaataccaaaatcaactttccaaagtgtgttccatagcaagatactgtatattgtctacattataaaaaggctatgtgcctgcagttatataatttttaattgagtagctatacaatgcaagacaaatcattcaatggtacctcttctcctataattgtaatattgggatgagtttgcaaagcacattcgagtgttatgtgtgaagctgcacgccccataagccgcacaactacagttgagaaataaatttcattaaactcacgaaagtgcaacaaaaagagaatatggattcaaatgtatgctagaatctacaacactatatgttccatgactttcaacaagcatacttacagtgataatattttccagttgacctggcatctatcatgacatttccaattcatttctgcatatatctgaataaaatgaagagcatcacgttactatttagttttcctcagtgtatccgtagttgcattgcatatcatagaaaatgatacactattaatgccaaggaaagtctgtcagagtctaacttagtcagtcagagtctaatttagtcagtcagtcagtcagtcagagtctattaagtattacacgcatgatccactaattctttttttcagaatttttattttagcacctgtttagttttttaggcagaacagagtacattgaatactatactatatttcattaatcaaacacaatatcaccaaattttcttgctacttgtagttgatcgcccacaattttgaacaattaatcaacagatatgcaaacaatattctatgagaagttccttctcgtaaaatttaaaggttgatgctttggagtgaattcatgagttcatgaccttaatgaaatagtcgtatcatggaacaataaaattacaattccaaataaattttcatcaagtaaattgatgaaattttcaagcttgttgggttaaaaaaatatagaatgttgctaaaagattgctaacacgatatgtggaaaggaccatacaaaatttcttaattctagtcgtaaaataaattattttagtttagtcaccttgcaagcagtatcaaacccaaaacttgttgggacttctttgcatttcaagtcaccatctatggtttttggacatccaatcaccctagttttcaaattctttcccctggttgaacgaaagaaaaaaagaaaaaagtatgttaaacaaaccagtagaacagccttaaagccagactcctgtgaccctgccatctgccaatcaagatttctctagagagagagagaaaaaaaaagtcacatacctgaaattttcagcaaggaggcaggcatttgtgttcgagtcatccccaccaataacaacaagtccatccaaatcaagcttctgggcagtgtctgcagcttgttgaaactaaaaggaaaatccatttaaacaatttattttggtttaatgtgtcaataaaactaaaaatgaaactctgaagaagcaaagaaaagtcacctgctctggagtttcaatcttatctcttccactacatatcatatcaaaaccaccctgataaaataaacaaataaatcaaatcaaatataatttcttagttaaaaagcacgcatgcatgaattttatgtaaatcactagaatacaaataacaatggatgcacgatatcttctaaaacattcggaagcacctatttaagcaagcagcgttaccagtgatcatgaactattcactccataaattttttgtatcatatgacaaactaaaccataattaaaactcacctggtttctatatgggtaaataaattctggtgtcagttccacgtactttcccttcatgattccggcgggacctcccctgaaaccgtacaatacgctgccttttgcacgttcctgcaagtaatctaccaggaagcacagaatgaacgatgaactcaagcatactgaacagcattaacttcgaagacaaaaatcaaggaataatgataaccaaagatcctcaccaaaaattccagaaatgacattgtgccctccaggtgcctggcctccagacaaaacaacaccaattttcaatttcttctgcgaatcattagagtcagaatcgctaggcactaccaaggcagatggctggccgaaaagatgtggaaaaagctttgcgatttcatctgaaagcatagaaaggaaaacacaatcgtatcaaaacgagaagccacacacataaccaaactaatactaaagttcgtaagagatcgaagtagactgaaccaattaaatcaacgaaaatctgtggatccaatacctggattgccagccgcggaactaggtggtccttcaacaatcttgaaggggtttctgatcacggtagggagagggagggcgtggtcgatacgactcgcctggacctcgctgtaaacggaggcaactcgaccagtagccggggccggaatgtcgccgttagcagccaatgccgtagccatttgtttagacctagtaatacctcggagaaatctttcagtaggagtgagtgagtgttgaatcaaaatccggtgaaacgaggaaatcaggaaagtagcatttatatatttgtagtagaaaagggtaataatgtcttttagacattggactctccgcctctttgggtttggttgcagttaaacaccggggtagtttaggaattgaaaattttttttgatttgcaacgattttttacaacaaagtaacggacaggattagggttttgagatggcgcatagaaagtcagggtattctaatccgcactggatcaaacgagcgttattctacctaaccttgtggtgggtcattcttaatgtaggtgagaactgagagggcatactccaaccaatattttacgtttggtgtgaataatagtttttttttaaaaaaaaataaatttgtctaagctaaaatcttaggtgagcacgtgggactcacctcccaaaaccattacaattatagttcaggagaggcgaaaaagaaaaaacaaaaacaaaaagcacctcattggcatggtaattcggatattctgaccacttgaaattgttaactttttttttttttttttggttgatg

SEQ ID NO: 378426 - DNA, 4501 bp, Cannabis indica
gggtgatctgggctctgctcacaagcagtgtgccgatacttggttcaagatcaagggtgacacgttagtatattctctttcttcccttcttttctttattatttggttttggtttatcgtttcagacaaattttgtgtacccatatgttagttttctaataagcttgctggaaatgatcttcttctgtacccaattttggttcttagattaaagtacgaagtgtttctctattttacctttacaaaaaaaaaaaaaataagtgctaattttgtacgatagctctgtttgtcttttagttgtctttggggaaacagtgaaaatttctgtagatttttggcttaaatttcactttgttccattcgaatagacatcacattgtaatattgtttttttttttttttggtatttgacatgttttctcgattaaaggtcatgcaattaatttctatccttatccatattgaaagagtagtatttccattgtattgaaatgaaggctaagctctaaagctacctaccaactttgtatacttcattcattgatctatgccaaatgcaattataggtgtagggttcacatgttactttcatgtaatttgttctataaatgtgatttaaccatgcttttgcttaggagttgaaaagtagtattttcttacaccatgcgaaacgtttctagcattctacatttcttgccatttacttttgaaagaacactttgcagaacgtgcgagatttgtggcgtcattgccgtcaacatagccggcgaaaggataaacgagacaaacactactactgtgaccgatccgttgacaatgacaacagctggagctcctgtgatccttgtagagaccatctggcatggccgccgcattatgaatttcctgcttgcctgcatggttcttgcctttgttacttcctggctttttcacttcaaaattctttgatgattccacccttattacccttaaaccttatgtatcatccgtttttttcttctccttccattattattttcaatggcacaatgttgattgagttagaatcaactccatagtcgatttgtcgtttataatatacatagctaagcttccatggttccaatcccagactgaatttattacgaaggtcagataattttggccaagttgttaaatcatcttcggtatttttcacctgcaagacataataatatgtaaaattgtgatagttagatatcagtggacccattgtgtacccggaatgcagtggtgtccgtaaattggattcttcgataaagactgaaaaagataatgtgatatgatatccagttgccttatctatctttgattcaattcaacaagttaaatagcaatcactacactagtatcccaaaataaacccctttgaatacgacaagcaactttgcccaagttaagatcagtaccactagtatcatcaaaatcttaggccatattatataagcaaacgatcagaaatcattgcctttttttcaaaatataataataaataagtaaacatgttgtgttgttcaactgtcttcaattacatttaccatcaaaattaacgtaagtgtgcacaacttagcaacttaattgagttcaaaactagttgacatccatgtcattgttgctctttttgaaatcaacaacagcttgatcaaaagtttccctgacatgcttgcatactaacattagatcctggcatgcatctttcattatatctgttgccggctcacctgaaatttgtgcaataaacaaaattaaaaggtgactaaatataatactcttattaagagtaactaattgacaggaacggaaaacatgagcaacataatactagctgcttactttgtttaaggaaaagcggcctttattctagaaggcaaatcataataggtctacagctataatctaatgctagaaatgtcataaaagcaacatagaaaatacacttgcatactctatattaatgttctgttggtttaggaattaaaaaatgttttagattgaccctagttaaaatattgataaaccaagattgagaggttggaaaatgggactaggttcatgaagatcacattattgaagtactgccactcgctttattggtaagtggttacaaaagaaatttagaacataacttgagccaataatgtcacatctatggaagaatttaaaaagactaattaataagcacagcacagaaatgtattgtcatgatctccattaaagaagattgggtgtacctgttgtctgaattctaatgttaacacgattgtctgaaggatggggaatgctgtatccacagaatgttactcttggactgcaacataagaaatcagctggtttagcatcttattgaacaccatactcacatgacatgaagcattatcgaatttgaatatcaaaagattaagttaattaagaacaaaatcactctaacctctcttgtcaaagcaacaaggaaaacactagacaaactctttactactgatataatgaagtaattttatgagtagtcaaaaattgacttgaaagttctgattgtcatcaatttcacaagagtattgtcaagtagtaccaatattacctaacaccataaagtatccgttttaataataatattgaaaaccgccaaacactcctaaggtgtcacctaaaaatgctaaataacaatgttggtttcacaaaattaaggagggttaagaagtcaaaaactcatggaacaatctcaacattgaaattgtggcatatccaaaaacaaggaaacacagttcctaatccttcctgacttgcgtataaagggtcaaactctcagcttgtgttcttttatgactttcgatccttgaatctgtactcatttgttttttctcacttaatcataacagaacataatccaacacatatcatctcatcctatggattttggggacaaacatattatctgacgatgttgctcctaagattatccttgaaatcatacataggtcctcctgccaagttctaatatgattgaaggctttgacaattatgccatattttaaatgaattaaatttgaaaaaaaattcctacaaaaaattattatataaatgttacaatacataaaagagcacttactcctgattcaaagtgaacctaattgagtttgccaatgtatgatcctcatccgtcaaagaaaatgatgatttactaagatctgaaaacgacccgtgttccataactccagaaaattctgcgaagttattattcataaaaacccaaaacaaagatttccacaataaacatactcaacatacaaattccactatgtttatgaccacaacaacaacagtttaaaatcactttcatctattctaaaagaataagattaaaatttaaataaaaggacaaaaaaaagttattcttttaaaaataacattatctaatttcaacggcatcataaaaatttcagtccaattacttctctaacattcaaaagatttaacacgaaaaagttcaaccttataaacatatactaactcatactctttttgaaacatatatcgagaaacagagcgagagagagggagtttaccagtatcgccggggttctttgaatctttagaacgagaggaggaagagagtgccaaagagaaagttggtaatactttctgagtttgaagaagatactaagaaatttttagttaaaaaaaaaaaagaaaataaggaatgtttccgaaattacagttttatcccaatttattaaccaatcaaatgctgtttaatttccacgtggcattatattattggatatctgtaaaacccttactaaattttcgatatttgtcaatacttatttctttaaaccctaactcgactatatatagctgctggattaataaagctagggtttttattctttttcttttgggctaacagcacaattactggatctcgaggagtaaacgagcaagagggattttaactctgtattggattttcttctaaaacccttaggtagttcgagtacttgtgcaaaccccaatttcaccattttgtaagattgttggttgtaattgatccaattaggtattattttgaaacggctgatgatttaattgtttgggttatttacaggttccaatggcttccaacgatactgcgtcttcattggaaaaggaacaggtaattcacttttccaattggtctttcttaatttatactgctactgactaggaaaaggaatttaagcaagtcttgagttgaatatcgaagtttactgacgttgggtctagattttttgggtaatgaaatttaagtggtggtatggagggagaaatttgccaaaataaccatttcaaatattaaaatttacaaaataacctcgcttcacacagtgtaaatctatggtcgttttgtaaccataatagttgtttatggtcggacatgaaggacagtgtaattcatggttatttctttttgctaataaaaattttcataaaagttatttttacaaaa
